United States Patent Application Publication US 2007/0105122 A1 - sequence listing, part 5

SEQ ID NO: 9816 - DNA, 573 bp, Homo sapiens
  misc_feature (6)..(6): "n" may be a, t, c, g, other or unknown
  misc_feature (8)..(8): "n" may be a, t, c, g, other or unknown
  misc_feature (13)..(13): "n" may be a, t, c, g, other or unknown
  misc_feature (32)..(32): "n" may be a, t, c, g, other or unknown
  misc_feature (100)..(100): "n" may be a, t, c, g, other or unknown
  misc_feature (139)..(139): "n" may be a, t, c, g, other or unknown
  misc_feature (223)..(223): "n" may be a, t, c, g, other or unknown
  misc_feature (386)..(386): "n" may be a, t, c, g, other or unknown
  misc_feature (394)..(394): "n" may be a, t, c, g, other or unknown
  misc_feature (421)..(421): "n" may be a, t, c, g, other or unknown
  misc_feature (432)..(432): "n" may be a, t, c, g, other or unknown
  misc_feature (450)..(450): "n" may be a, t, c, g, other or unknown
  misc_feature (458)..(458): "n" may be a, t, c, g, other or unknown
  misc_feature (465)..(465): "n" may be a, t, c, g, other or unknown
  misc_feature (506)..(506): "n" may be a, t, c, g, other or unknown
  misc_feature (532)..(532): "n" may be a, t, c, g, other or unknown
  misc_feature (538)..(538): "n" may be a, t, c, g, other or unknown
  misc_feature (545)..(545): "n" may be a, t, c, g, other or unknown
  misc_feature (561)..(561): "n" may be a, t, c, g, other or unknown
  misc_feature (565)..(565): "n" may be a, t, c, g, other or unknown
  misc_feature (569)..(569): "n" may be a, t, c, g, other or unknown
aaatananatgangttttgctatgttgcccangctggtctcctggactcaagcaatctcccacttcaggctaccaaagtgctgggatttacaggcatganccacctctcccagtctcagttattattttaataaatganactgaacgtcctcttataaggctcactcccttgttcctactacatttgctctgtttaagtatctctttaaattcttcagttaanatcatcccttttatcagaaacctagacaccacaaagtagctttctcacctttaattctccatagggatcactattatactataatatttgcatacgtatgtgtatatatgtatttgcttttttaaaaaggtaaaaatgctcttctcactctttgtcgatatangcacccangttacgttatttagaaattaaataaanggcacaataanttccccagggaagaatcnttaaaaanaaaaaanccttcctccccctaatatcacataacttggccttattggcntgcccacctaaaaaaaaaaggtttgncctatngttaaangaaaaaaccaaccttncccncttngggt

SEQ ID NO: 9817 - DNA, 575 bp, Homo sapiens
  misc_feature (32)..(32): "n" may be a, t, c, g, other or unknown
  misc_feature (35)..(35): "n" may be a, t, c, g, other or unknown
  misc_feature (62)..(62): "n" may be a, t, c, g, other or unknown
  misc_feature (136)..(136): "n" may be a, t, c, g, other or unknown
  misc_feature (350)..(350): "n" may be a, t, c, g, other or unknown
  misc_feature (473)..(473): "n" may be a, t, c, g, other or unknown
  misc_feature (528)..(528): "n" may be a, t, c, g, other or unknown
  misc_feature (531)..(531): "n" may be a, t, c, g, other or unknown
  misc_feature (538)..(538): "n" may be a, t, c, g, other or unknown
  misc_feature (550)..(551): "n" may be a, t, c, g, other or unknown
  misc_feature (570)..(570): "n" may be a, t, c, g, other or unknown
  misc_feature (575)..(575): "n" may be a, t, c, g, other or unknown
gttgtgtctttgccaggttttggtatcaggangangctggcctcataaaatgagttaaagangatccctcttttttctattgtttagaatagtttcacaagggaatggtaccagctcctctttgtacctgtgatanaattcagctgtgaatctgcctggtcctgggctttttatggttgggaggccattaattactgcctcaatttcagaacttgtgaatgatctattcagggattcgacttcttcctggtttagtcttgggagggcgtatgtgtccaggaatttatccatttcttctagattttctagcttatttgtgtagaggtgtttatagtattctctgatcgtantttgtatttctgtgggatcaatggtgatatcctctttatcattttttattgtgtctatttgattcgtgtctcctttcttgtttatcaatctggctagtggtctatctattttgttgatctttnccaaaaaccactcccggaatccttgaatttttgaaagggtttccacccccccccnccnccattcngcccgaatctanntaattcctgtctccgccanctttn

SEQ ID NO: 9818 - DNA, 571 bp, Homo sapiens
  misc_feature (85)..(85): "n" may be a, t, c, g, other or unknown
  misc_feature (130)..(130): "n" may be a, t, c, g, other or unknown
  misc_feature (412)..(412): "n" may be a, t, c, g, other or unknown
  misc_feature (484)..(484): "n" may be a, t, c, g, other or unknown
  misc_feature (498)..(498): "n" may be a, t, c, g, other or unknown
  misc_feature (501)..(501): "n" may be a, t, c, g, other or unknown
  misc_feature (516)..(516): "n" may be a, t, c, g, other or unknown
  misc_feature (521)..(521): "n" may be a, t, c, g, other or unknown
  misc_feature (558)..(558): "n" may be a, t, c, g, other or unknown
acaatcttaaaactacaaaatgctgtctttctttctttcagaacaggtgggattgttcctccagcagctcaacagcttcacaganaaaatattcaacgaatagtacaagaagctctttctgccagtggantctctccaagtgacctctcagcaattgcaactaccataaaaccaggacttgctttaagcctgggagtgggcttatcatttagcttacagctggtaggacagttaaaaaagccattcattcccattcatcatatggaggctcatgcacttactattaggttgaccaataaagtagaatttccttttttagttcttttgatttctggaggtcactgtctgttggcattagttcaaggagtttcagattttctgcttcttggaaagtctttggacatagcaccangtgacatgcttgacaaggtaattaagaattaaattctcccatcctttttgttatgttgtccattccactaanttacaataaaattnctnccccatcccctaatnttctnaatttttcttataactgaaaaaatcccctttggtganaaaaataaaaaat

SEQ ID NO: 9819 - DNA, 586 bp, Homo sapiens
  misc_feature (27)..(27): "n" may be a, t, c, g, other or unknown
  misc_feature (96)..(96): "n" may be a, t, c, g, other or unknown
  misc_feature (488)..(488): "n" may be a, t, c, g, other or unknown
  misc_feature (509)..(509): "n" may be a, t, c, g, other or unknown
  misc_feature (519)..(519): "n" may be a, t, c, g, other or unknown
  misc_feature (530)..(530): "n" may be a, t, c, g, other or unknown
  misc_feature (539)..(539): "n" may be a, t, c, g, other or unknown
  misc_feature (571)..(571): "n" may be a, t, c, g, other or unknown
  misc_feature (586)..(586): "n" may be a, t, c, g, other or unknown
aaatttctaaataggttttattttggncaccatcatttaatgacattcaattaaggatttcttgaacaatttctaccaaaaaaataatttcctccnccaaaacattgaaaaaattgaaaactggggtcctaacagttgcaaaacaagtctacaccattccttagtatgaaaaagcaaccataaaaaaatggagcatcaaaatattttatttcaaatttattttatgccagatccaagctgtaactggaacctattcccagtctatgggtttctgaatttcattttcctatttattgtatttttatgagaaacttgttgtaatgagtctgtaccactttatttgacatttactaaagctgtataaaagccatgcacagtttatttacagtattgtacattaaatgataatgtttgaagatcacacaaagatttcacaaaactataactaatacagaaagatgtgtgaaaacattaaggggcttccaaantttaaggttggaaatttggcnaaaatatttnggcttataatntttgggcanccctaacccgaaataattgacaaaacctgccnaaaaatacccttccn

SEQ ID NO: 9820 - DNA, 569 bp, Homo sapiens
  misc_feature (78)..(78): "n" may be a, t, c, g, other or unknown
  misc_feature (81)..(81): "n" may be a, t, c, g, other or unknown
  misc_feature (122)..(122): "n" may be a, t, c, g, other or unknown
  misc_feature (279)..(279): "n" may be a, t, c, g, other or unknown
  misc_feature (317)..(317): "n" may be a, t, c, g, other or unknown
  misc_feature (414)..(414): "n" may be a, t, c, g, other or unknown
  misc_feature (456)..(456): "n" may be a, t, c, g, other or unknown
  misc_feature (513)..(513): "n" may be a, t, c, g, other or unknown
  misc_feature (515)..(515): "n" may be a, t, c, g, other or unknown
  misc_feature (532)..(532): "n" may be a, t, c, g, other or unknown
  misc_feature (539)..(539): "n" may be a, t, c, g, other or unknown
  misc_feature (563)..(564): "n" may be a, t, c, g, other or unknown
  misc_feature (568)..(568): "n" may be a, t, c, g, other or unknown
catgattccaataagctttaaatcaataggcaaacacttctcatttatgatccatcttgctacaggtggttatgtganaanacacagtgtcgccaaagctgacctagtatttaggtccctanagggattgctgatctgctaagagaaataattaaaaaaaaaaaaaacaaaaaaaaaggacaaccatacattttggtagtcttttaaaaaaagctactacaaagatatcaataaccatccaaaaatcacttaaaatttaatatcccttaatttccaaanacactttgtgatctgactgttcttgaaggaaagcctanaactgaaaactactaaaacttggctcctctctaggaaatgtggaaacaggttttctgcaaaggaaaaacttgacaagggaatgctacaaaataccantcccctctttaaaaactcctcccacctctcctgctccatttnatggaatgggcaggctggattcaaaaaggcccttcccaaggaactgtttaaatcccncnaaaaatccctttccaanggattcnctttgaatttaaaaaaacttcaanntttnt

SEQ ID NO: 9821 - DNA, 575 bp, Homo sapiens
  misc_feature (31)..(31): "n" may be a, t, c, g, other or unknown
  misc_feature (424)..(424): "n" may be a, t, c, g, other or unknown
  misc_feature (465)..(465): "n" may be a, t, c, g, other or unknown
  misc_feature (491)..(491): "n" may be a, t, c, g, other or unknown
  misc_feature (502)..(502): "n" may be a, t, c, g, other or unknown
  misc_feature (504)..(504): "n" may be a, t, c, g, other or unknown
  misc_feature (524)..(525): "n" may be a, t, c, g, other or unknown
  misc_feature (573)..(573): "n" may be a, t, c, g, other or unknown
aacaatgaatatgcaggatttttattagggnaagcgtttccataaccataaatatttctttaaaacaaataaatgtcccaagatctctgttagtgatccaaactaaggagaaattagtaaaattaattataaatgaacaatttcagcatataaaccaacaagtcttttctagatttttaacactgtgacccaattgcattattttccaagttagaatgactaataatcaatgaatgtaaaagcaataattaatacagatgacattctacttttccacagtaaagaaataaacaatctaatatttttataaatcccattttatatcacaaaataacctttactaagcaaatttttttaaaatctcaggaaaggaaatgtaaaatccttatttgagtaaaagaaaatgctataaagcaatgagttntcaaaatacagaagaagtattctaaaacaaatgaaaaaccnagatgatgaaatagtgacactactcnaatgttttcananactgaaatgccaggggaaannaactgaattattccttaagccgtggaaaattttactttcaaaatgcanaa

SEQ ID NO: 9822 - DNA, 458 bp, Homo sapiens
  misc_feature (189)..(189): "n" may be a, t, c, g, other or unknown
  misc_feature (191)..(191): "n" may be a, t, c, g, other or unknown
  misc_feature (261)..(261): "n" may be a, t, c, g, other or unknown
  misc_feature (263)..(263): "n" may be a, t, c, g, other or unknown
  misc_feature (325)..(325): "n" may be a, t, c, g, other or unknown
  misc_feature (361)..(361): "n" may be a, t, c, g, other or unknown
  misc_feature (378)..(378): "n" may be a, t, c, g, other or unknown
  misc_feature (394)..(394): "n" may be a, t, c, g, other or unknown
  misc_feature (396)..(396): "n" may be a, t, c, g, other or unknown
  misc_feature (414)..(414): "n" may be a, t, c, g, other or unknown
  misc_feature (442)..(442): "n" may be a, t, c, g, other or unknown
  misc_feature (449)..(449): "n" may be a, t, c, g, other or unknown
attgtaaaagctttttattttagtaaaatatacagaagttctttttctgaactcatttatgatgataccaacctgaattctaaaacagcttcctgattcttggacactgctgtcaaaatgacattcagtctgcaacagccccaagaagcaagggcaaagccaggtgctggggggcctgggtcctccccnanccctgaaagtggagtaaagatgtttggcccaaaaaaggctggggtgcaaagccaggtcaggggaaagcanantccgctgggccttgtacgggggtactggtgccaggcttctctgggacacccccaccgaacangcacaggggccacggggcacaaacccactgaaagtnccgtctccaccacccanaagctttatttacaantnaacacactggtctctgtnaactggaatcctgaagcatcccacctcnaaaactnaaaaaaagt

SEQ ID NO: 9823 - DNA, 505 bp, Homo sapiens
  misc_feature (226)..(226): "n" may be a, t, c, g, other or unknown
  misc_feature (423)..(423): "n" may be a, t, c, g, other or unknown
  misc_feature (435)..(435): "n" may be a, t, c, g, other or unknown
  misc_feature (444)..(444): "n" may be a, t, c, g, other or unknown
  misc_feature (450)..(450): "n" may be a, t, c, g, other or unknown
  misc_feature (468)..(468): "n" may be a, t, c, g, other or unknown
  misc_feature (481)..(481): "n" may be a, t, c, g, other or unknown
  misc_feature (501)..(501): "n" may be a, t, c, g, other or unknown
ggttattcacaagttttgaacttcattcctctggggtgattatttataaagttaaacacatccaaacttgttgtgttacattattaaattaaatacatttttccttttgaagagcttcagtagtctgaaataacaagtgaagaaatttggaatcaaagaaacacaagagctaatcatataatgatcttggttgggaatagaagactcttatcaaaaaagggggaanaggtacattgtgctataaatttaaccaatgatgtgtaacactgacaaccccttttaattagtcattgacatatcaactagtgattcaaggtatattgtcctaaaatacacatcctgtatattatctgccatataatgatgttagatttctgatcgaaatctctaaaatactccttttcacagggcttatttgcttcntgtgttctttcntattttgangaaaanattctaattaccttttcntaattttaattcnatatgaatccccccgaaganaagg

SEQ ID NO: 9824 - DNA, 538 bp, Homo sapiens
  misc_feature (1)..(538): "n" may be a, t, c, g, other or unknown
nnnnnnnnnnnnnnnnnnnnnnnnnnnnnnnnnnnnnnnnnnnnnnnnnnnnnnnnnnnnnnnnnnnnnnnnnnnnnnnnnnnnnnnnnnnnnnnnnnnnnnnnnnnnnnnnnnnnnnnnnnnnnnnnnnnnnnnnnnnnnnnnnnnnnnnnnnnnnnnnnnnnnnnnnnnnnnnnnnnnnnnnnnnnnnnnnnnnnnnnnnnnnnnnnnnnnnnnnnnnnnnnnnnnnnnnnnnnnnnnnnnnnnnnnnnnnnnnnnnnnnnnnnnnnnnnnnnnnnnnnnnnnnnnnnnnnnnnnnnnnnnnnnnnnnnnnnnnnnnnnnnnnnnnnnnnnnnnnnnnnnnnnnnnnnnnnnnnnnnnnnnnnnnnnnnnnnnnnnnnnnnnnnnnnnnnnnnnnnnnnnnnnnnnnnnnnnnnnnnnnnnnnnnnnnnnnnnnnnnnnnnnnnnnnnnnnnnnnnnnnnnnnnnnnnnnnnnnnnnnnnnnnnnnnnnnnnnnnnnnnnnnnnnnnnnnnnnnnnnnnnnnnnnnnnnnnnnnnn

SEQ ID NO: 9825 - DNA, 557 bp, Homo sapiens
  misc_feature (488)..(488): "n" may be a, t, c, g, other or unknown
  misc_feature (501)..(501): "n" may be a, t, c, g, other or unknown
  misc_feature (504)..(504): "n" may be a, t, c, g, other or unknown
  misc_feature (506)..(506): "n" may be a, t, c, g, other or unknown
  misc_feature (522)..(522): "n" may be a, t, c, g, other or unknown
  misc_feature (528)..(528): "n" may be a, t, c, g, other or unknown
  misc_feature (540)..(540): "n" may be a, t, c, g, other or unknown
aaaatcaaaatgcttttattatggtcaaaatcagagccattgagtcctaacagcttaaactagatatagaaagcagggcaagtagtgtaaaacctccacattttctaggcccttcttcatatagcagtttgattatacttcaatttggtgttaagaggacaataatacaaagtaaatgtccacaaaggaccaaaacaccaaattttccatgtccaacaactctctataattaatctactatgtagctagtgtccacgccaaatgttcagttcttaacattcgccaagaaggaatgggaagaaacagatgagtgacttcagatagggagtacactttctcttcctagtctccatcgaacaatctcacttttttaacagagaatcccccacagctacatccaagttaagagcaaaatgcttacacaaaaccaaaagacaaattactgtaatattatagttatcatttctattccttaacataaataatcnaaaagtgactgtntananctattaaatgcaatcntccttntttctgcccgtnaaaaaatgcgccttaac

SEQ ID NO: 9826 - DNA, 546 bp, Homo sapiens
  misc_feature (11)..(11): "n" may be a, t, c, g, other or unknown
  misc_feature (93)..(93): "n" may be a, t, c, g, other or unknown
  misc_feature (149)..(149): "n" may be a, t, c, g, other or unknown
  misc_feature (234)..(234): "n" may be a, t, c, g, other or unknown
  misc_feature (299)..(299): "n" may be a, t, c, g, other or unknown
  misc_feature (313)..(313): "n" may be a, t, c, g, other or unknown
  misc_feature (427)..(427): "n" may be a, t, c, g, other or unknown
  misc_feature (440)..(440): "n" may be a, t, c, g, other or unknown
  misc_feature (451)..(451): "n" may be a, t, c, g, other or unknown
  misc_feature (468)..(468): "n" may be a, t, c, g, other or unknown
  misc_feature (502)..(502): "n" may be a, t, c, g, other or unknown
  misc_feature (522)..(522): "n" may be a, t, c, g, other or unknown
  misc_feature (527)..(527): "n" may be a, t, c, g, other or unknown
  misc_feature (532)..(532): "n" may be a, t, c, g, other or unknown
  misc_feature (543)..(543): "n" may be a, t, c, g, other or unknown
gtttggtaganaagagagtcttgctttgtttcccagactggtctcaaactcctggcctcaagcaattgttttacctcagcttcccaaagtgtnaggattacaggcatgagttaccatacccagcattttcttaatccttttccaattangaagcaaaggtttaaacctctagtttgtaaaagatggcagagtttaaggaaaagccatataacagaggtactatgttacttccanagcaaagttatttttctcctcaccaccccccaaacattttactacaataatttccagacatacanaaaagttgaacaanttgaacaatgaacattcacatgcccaccatctagtttctataactaatattttgccgtatttgctttatcagatatctatccacctaataacgtaatttttggatatattacanagggaagttacanacatcacttangtttttaaaaaaactanaaaggcaattattttctgttatgttggctaaganaatttaaaataattaatgantaacnttgtntccaagttganatc

SEQ ID NO: 9827 - DNA, 448 bp, Homo sapiens
  misc_feature (372)..(372): "n" may be a, t, c, g, other or unknown
  misc_feature (380)..(380): "n" may be a, t, c, g, other or unknown
  misc_feature (413)..(413): "n" may be a, t, c, g, other or unknown
  misc_feature (421)..(421): "n" may be a, t, c, g, other or unknown
  misc_feature (431)..(431): "n" may be a, t, c, g, other or unknown
  misc_feature (443)..(443): "n" may be a, t, c, g, other or unknown
  misc_feature (446)..(446): "n" may be a, t, c, g, other or unknown
cactgcaggatttgtttatttcacactcacccttgaggcccggcccgcgcccgtgccctccctctccctgcgccggggccgcggagctgcagagtccgcagaggggtggaggcaagagaggggggcagtgtgtccaggaccgagcgggtggggcgtctgcagagggtgagagcagcgagtggtctcagggcgcccaggactggtcccgatgccatcacagttcccaactcggtaaagacccggggggcaacaatcccaaaagaaggcactagcactcggggcgcgcctggacacccccccccgttccctctcagagcgcttacgtccacggggacgggggagagaagtcgcccaatcacgccacgagcgtangcctccanggatgcggctcgcgcgtgagcttgagggtatangtgcgcangcgcgggcantgcgcgcggaangcntc

SEQ ID NO: 9828 - DNA, 481 bp, Homo sapiens
  misc_feature (28)..(28): "n" may be a, t, c, g, other or unknown
  misc_feature (73)..(73): "n" may be a, t, c, g, other or unknown
  misc_feature (118)..(118): "n" may be a, t, c, g, other or unknown
  misc_feature (132)..(132): "n" may be a, t, c, g, other or unknown
  misc_feature (210)..(210): "n" may be a, t, c, g, other or unknown
  misc_feature (280)..(280): "n" may be a, t, c, g, other or unknown
  misc_feature (283)..(283): "n" may be a, t, c, g, other or unknown
  misc_feature (292)..(292): "n" may be a, t, c, g, other or unknown
  misc_feature (334)..(334): "n" may be a, t, c, g, other or unknown
  misc_feature (337)..(337): "n" may be a, t, c, g, other or unknown
  misc_feature (352)..(352): "n" may be a, t, c, g, other or unknown
  misc_feature (390)..(390): "n" may be a, t, c, g, other or unknown
  misc_feature (418)..(418): "n" may be a, t, c, g, other or unknown
  misc_feature (427)..(427): "n" may be a, t, c, g, other or unknown
  misc_feature (436)..(436): "n" may be a, t, c, g, other or unknown
  misc_feature (454)..(454): "n" may be a, t, c, g, other or unknown
  misc_feature (466)..(466): "n" may be a, t, c, g, other or unknown
  misc_feature (473)..(473): "n" may be a, t, c, g, other or unknown
cactattttgggtttttattttgttgangttggttaaatcttatctctttttttatacacaatacttcatgtncctatgaaataaaacaggtagggaatatgtccagtgcaaacagangactcacacctgtncatagacagcaccatccactgattgtcgctgcagtccacggcgttactaagcctgcgccacccacgtgctgccccagnaggcgctaccaggctcttcgggccacaggcctctcctccactgcatgtggcggcagggcgggttaggtcncanggctccatnattgtggggcagcttcaagggcacatggggcaaaagccctcnaangtccctcctcagtanggggatgtcattctgataatactgggatcatgttgtangtcccgctcctgttgctgaagaaaacanctctggatnaccttcatnataaaatttgcaacctcnccctcaatcatnttggggntaaacctt

SEQ ID NO: 9829 - DNA, 534 bp, Homo sapiens
  misc_feature (52)..(52): "n" may be a, t, c, g, other or unknown
  misc_feature (113)..(113): "n" may be a, t, c, g, other or unknown
  misc_feature (120)..(120): "n" may be a, t, c, g, other or unknown
  misc_feature (145)..(145): "n" may be a, t, c, g, other or unknown
  misc_feature (194)..(194): "n" may be a, t, c, g, other or unknown
  misc_feature (222)..(222): "n" may be a, t, c, g, other or unknown
  misc_feature (269)..(269): "n" may be a, t, c, g, other or unknown
  misc_feature (365)..(365): "n" may be a, t, c, g, other or unknown
  misc_feature (375)..(375): "n" may be a, t, c, g, other or unknown
  misc_feature (383)..(383): "n" may be a, t, c, g, other or unknown
  misc_feature (411)..(411): "n" may be a, t, c, g, other or unknown
  misc_feature (459)..(459): "n" may be a, t, c, g, other or unknown
  misc_feature (483)..(483): "n" may be a, t, c, g, other or unknown
  misc_feature (490)..(490): "n" may be a, t, c, g, other or unknown
  misc_feature (502)..(502): "n" may be a, t, c, g, other or unknown
  misc_feature (504)..(504): "n" may be a, t, c, g, other or unknown
  misc_feature (518)..(518): "n" may be a, t, c, g, other or unknown
  misc_feature (525)..(525): "n" may be a, t, c, g, other or unknown
gcccggccagaagttttatttccaaaccccaggaaagcattacaaataaganatagaaacccaaattaagctctgaaacaactgggagacaggcctgcctaggtgatcaggancatccangcagcagggatgggaagcagaaganatgcattctggatagggacctcaccccagagcctcagtctgtacatacntgtgactattcagggaccgggagttganaaccagaaacccaccaatcctagtgttgccctgggtgggaggcaganaaagcagcagcacgtgaggtcaaggacattaccaagtctgaccttggcatttgttgcctgctctcatccccaacagtccataaataagttatccancacatctcangggtggangcggggggaacaagccaactagccatancctctggaaaaaagggcaggccacctggcactggggcagactacacanaatgcatctgactcctgcttccgnctctgcnaaactccccggntnggcgtccaaatttngtccccnccccgcctt

SEQ ID NO: 9830 - DNA, 537 bp, Homo sapiens
  misc_feature (186)..(186): "n" may be a, t, c, g, other or unknown
  misc_feature (188)..(188): "n" may be a, t, c, g, other or unknown
  misc_feature (326)..(326): "n" may be a, t, c, g, other or unknown
  misc_feature (344)..(344): "n" may be a, t, c, g, other or unknown
  misc_feature (467)..(467): "n" may be a, t, c, g, other or unknown
  misc_feature (490)..(490): "n" may be a, t, c, g, other or unknown
  misc_feature (495)..(495): "n" may be a, t, c, g, other or unknown
  misc_feature (502)..(502): "n" may be a, t, c, g, other or unknown
  misc_feature (516)..(516): "n" may be a, t, c, g, other or unknown
  misc_feature (526)..(526): "n" may be a, t, c, g, other or unknown
  misc_feature (532)..(532): "n" may be a, t, c, g, other or unknown
gcacataaaaacatcatttattgttagaaatcatgacatgatacaaagtcaaaatccacttgtgtcttgctaaagactacagaaagccatgctcagcagcttcttctccaatgctggccagcagcgtacctttccaagtcacaaagcagttcatcccgccctcaaggagccgacagggcagcccanancctcccactgacaagtgtggtcacccactcaagatactgggaaagatccctgttctagcatcacattttaatcagatttgtcaaaatcaggttgcttggggcaaaggctctttcaccgagggatgctagtcctggaanacttctccttcggcgaanccgccagctcaatcttctgaaccaggctcacatcccagggatgggtccaaaactgatgacggtgcctgggcaactcgctccccacaagggccatctccctgctctgtggatgttatcttgcancgttggggggaaatcatattganaaccnctccccnccattgctgttcanccccaaaagntatttnttttc

SEQ ID NO: 9831 - DNA, 548 bp, Homo sapiens
  misc_feature (27)..(27): "n" may be a, t, c, g, other or unknown
  misc_feature (34)..(34): "n" may be a, t, c, g, other or unknown
  misc_feature (173)..(173): "n" may be a, t, c, g, other or unknown
  misc_feature (307)..(307): "n" may be a, t, c, g, other or unknown
  misc_feature (416)..(416): "n" may be a, t, c, g, other or unknown
  misc_feature (450)..(450): "n" may be a, t, c, g, other or unknown
  misc_feature (460)..(460): "n" may be a, t, c, g, other or unknown
  misc_feature (466)..(466): "n" may be a, t, c, g, other or unknown
  misc_feature (470)..(470): "n" may be a, t, c, g, other or unknown
  misc_feature (476)..(476): "n" may be a, t, c, g, other or unknown
  misc_feature (493)..(493): "n" may be a, t, c, g, other or unknown
  misc_feature (520)..(520): "n" may be a, t, c, g, other or unknown
gagacggagtctcgctctgtcgcccangctggantgcagtggcgccatcttggctcactgcaagctctgcctcctgggttcatgccattctcctgccttagcctcctgagtagctgggactacaggcgcccgccatcacgcccggctaatttttttttgtatttttagtaaanacggggtttcaccgtgttagccaggatggtctccatctcctgacctcgtgatccgcccgcctaggcctcccaaagtgctgggattacaggtgtgagccactgcgcccggccaagggaggtgatgttaaactganaatcataaaacccattaagaattcataatcacagcagaagcatatctatccatattctgtcctgagactgaaatcattatatacacatataagttaaggtatcaacaanttttaaaatatactattttattggaagggaaaanaataaccaanaaaaantgangacctnaactgctcctccaggcntttttccttttggaaaatttccctatnaagctggccttaattttcccctttactt

SEQ ID NO: 9832 - DNA, 581 bp, Homo sapiens
  misc_feature (18)..(18): "n" may be a, t, c, g, other or unknown
  misc_feature (92)..(92): "n" may be a, t, c, g, other or unknown
  misc_feature (177)..(177): "n" may be a, t, c, g, other or unknown
  misc_feature (231)..(231): "n" may be a, t, c, g, other or unknown
  misc_feature (253)..(253): "n" may be a, t, c, g, other or unknown
  misc_feature (255)..(255): "n" may be a, t, c, g, other or unknown
  misc_feature (260)..(260): "n" may be a, t, c, g, other or unknown
  misc_feature (344)..(344): "n" may be a, t, c, g, other or unknown
  misc_feature (425)..(425): "n" may be a, t, c, g, other or unknown
  misc_feature (457)..(457): "n" may be a, t, c, g, other or unknown
  misc_feature (490)..(490): "n" may be a, t, c, g, other or unknown
  misc_feature (507)..(507): "n" may be a, t, c, g, other or unknown
  misc_feature (546)..(546): "n" may be a, t, c, g, other or unknown
  misc_feature (565)..(565): "n" may be a, t, c, g, other or unknown
  misc_feature (569)..(569): "n" may be a, t, c, g, other or unknown
  misc_feature (581)..(581): "n" may be a, t, c, g, other or unknown
cttattcagtctccgtanagactgtcaaaaattgccagcgctgattatatttcaagtcatcacggtggggtattgggaaaatttccaattancaataatcgcgtctcggataaatctcattggctacggtactgccactgcaaagctagcttgacgtaggactttgatggtcatgtntaacacctcacaggggcagaacctcctccatccccgactccaaagactcatgtnatcagtacgcaagaaagttcananatganacctctggttgtattccacctttgggacatgggggatgtctttagttcaaagtcacaaataaatgcaggttctacaattcagangcttcatatccctgctggagtattacatgtttattcaggatggaccacttttcttagcaacagtttctaaacctttgccangtctgggaaatctgggcaggaaaaattctaanaaacaatcatcctgcacacacttcctgaaaaanaatatacattaatcccnaattatcccctcccaaggttttgttggcccattccatanttccaccatcttttttggnaaanccccattttttn

SEQ ID NO: 9833 - DNA, 462 bp, Homo sapiens
  misc_feature (456)..(462): "n" may be a, t, c, g, other or unknown
ggatcaggagtcttattctctctttggaatgactcccagaacagccacttatgcccagaaaatccatgatcccatctcctccatgatggaggaagctgaggaccagagaggggaagggagtagactaagggagtagccagtgcatcccaggagcaggacagaatctctgacccctgacccctagcccagtgctccttccaccacccctggctgctccttcatggaccaatgaggtgacagaggcagggcctagttcacaggctgacaagaatctgcggatgtcctcagatgtcccacaaggtctcctcctgcagacgcccaacccagaccttgtctgctgcaatatcactaccagtgcttgcagacctccagagacaggagtctcaccacctcgcaaggcagctactccatcctgaccctgtggaaggtgtgcaaatgtgggggtgggtggggacnnnnnnn

SEQ ID NO: 9834 - DNA, 454 bp, Homo sapiens
  misc_feature (361)..(361): "n" may be a, t, c, g, other or unknown
  misc_feature (364)..(364): "n" may be a, t, c, g, other or unknown
  misc_feature (376)..(376): "n" may be a, t, c, g, other or unknown
  misc_feature (385)..(385): "n" may be a, t, c, g, other or unknown
  misc_feature (423)..(423): "n" may be a, t, c, g, other or unknown
  misc_feature (444)..(444): "n" may be a, t, c, g, other or unknown
  misc_feature (451)..(451): "n" may be a, t, c, g, other or unknown
gttgatatcgagtttattgatgagccatttaccttcagatgccatactccagttttagcttcgactatctcattctacaaaagttcaccatcttcaaaatttaaacatagacttaccatttgaccagcaattccacccaagagaatcaaaaacatctatccacacataaatttgtacacaaatgatcatggtagcattatttatcatagacaaaaatgaacagaacctagatgtccatcagctgatgaatggataaagaaacatggcatatcatacaatggagtaatttcggccataaaaagaaatgaagtagtactgatacatgctatatcatgaatgaaccttgaaaacatgctaatanaangaagaagcaganagggccacntattgtatgattccatttacataaaattcccccatccntagagacagaaaacagattantgtttancgc

SEQ ID NO: 9835 - DNA, 374 bp, Homo sapiens
  misc_feature (7)..(7): "n" may be a, t, c, g, other or unknown
  misc_feature (58)..(58): "n" may be a, t, c, g, other or unknown
  misc_feature (147)..(147): "n" may be a, t, c, g, other or unknown
  misc_feature (158)..(158): "n" may be a, t, c, g, other or unknown
  misc_feature (161)..(161): "n" may be a, t, c, g, other or unknown
  misc_feature (171)..(171): "n" may be a, t, c, g, other or unknown
  misc_feature (251)..(251): "n" may be a, t, c, g, other or unknown
  misc_feature (289)..(289): "n" may be a, t, c, g, other or unknown
  misc_feature (302)..(302): "n" may be a, t, c, g, other or unknown
  misc_feature (318)..(318): "n" may be a, t, c, g, other or unknown
  misc_feature (322)..(322): "n" may be a, t, c, g, other or unknown
  misc_feature (329)..(329): "n" may be a, t, c, g, other or unknown
  misc_feature (349)..(349): "n" may be a, t, c, g, other or unknown
  misc_feature (352)..(352): "n" may be a, t, c, g, other or unknown
ggtaaangcaggatctcactttgtgcttagggtggtattgaacttctgggctaaaganatactcctgacttagcctcccaaagtgctaggattatagcagggagctactgctctgggtcagcttttctgctaaaatgctttgctgangtggaaatganganggtgaaacantgggcgggcatttgttttacaaaggctctacctaggctgtaccatctggtgaagtgcttgtaacttttaaggtggaaacnatgccatttttcctttattctcccgtctgtaagaccanaaagcaattggangatcctccaataccangganaaaccangtttcaaaaaaaattttttngtnggaaggggaaatcaaaccaaac

SEQ ID NO: 9836 - DNA, 558 bp, Homo sapiens
  misc_feature (404)..(404): "n" may be a, t, c, g, other or unknown
  misc_feature (440)..(440): "n" may be a, t, c, g, other or unknown
  misc_feature (450)..(450): "n" may be a, t, c, g, other or unknown
  misc_feature (481)..(481): "n" may be a, t, c, g, other or unknown
  misc_feature (516)..(516): "n" may be a, t, c, g, other or unknown
  misc_feature (526)..(526): "n" may be a, t, c, g, other or unknown
  misc_feature (530)..(530): "n" may be a, t, c, g, other or unknown
  misc_feature (546)..(546): "n" may be a, t, c, g, other or unknown
  misc_feature (551)..(551): "n" may be a, t, c, g, other or unknown
  misc_feature (557)..(557): "n" may be a, t, c, g, other or unknown
atggctattttcttaattttattcatgtaattaccaaagctctgtattctactaaggtacacatcttatcttgtatccatggacgctccttgatacattatggtatcatccagcaagtaaaaactaagcaggacaggcaagaaagcaacactatgacagtaaaaacaatatggtattcacttttgtttcctttaaaggggaaagtgttcttaataattactgttggctcacagaactaaagaaagtatattagaacctcagtattcttaacaatgatctctattggttgttatttgtctaagaagtgataagccatataatttacagaaagcaagtcactgaatccttcaaaaaacacaacctggcaatgttatcttcaatgcaaaataatgaagtggcaggancgtgatgaaaaaaacagtcttcgaaaacatcatgtnagggaaccanctgtgcttgtatagtctctaacttgttatanaaatcaaacaactccctgtgactgaattccccaanaacttccccnagcnccttgaatctccttgntcccncccaant

SEQ ID NO: 9837 - DNA, 418 bp, Homo sapiens
  misc_feature (412)..(418): "n" may be a, t, c, g, other or unknown
aaggataagcaagcttttattccgtcaagagaacaaaggtcaggacttttatcctggtggggggatggggagtccagattccttctctgatgaggcaaaaaaagaatcaagactcctgttcaagtaaagggcagagggtgagagctagtactcttattctagaaaggaagtagatacttttctttgataaaggaatgaacggtagactcctagtttgcagaaaaggtgggaaagatgtgacttgtactttggtaaggagatagggaaggaattaaggctattactctgaagaaagttggggggccagggctcctatttttttgctgaggagatggaagatcagggcttgtattcaataagaatgggaggggccagggatgcctggcaaaagccttgcactgtgaggtgcagnnnnnnn

SEQ ID NO: 9838 - DNA, 592 bp, Homo sapiens
  misc_feature (9)..(12): "n" may be a, t, c, g, other or unknown
  misc_feature (49)..(49): "n" may be a, t, c, g, other or unknown
  misc_feature (184)..(184): "n" may be a, t, c, g, other or unknown
  misc_feature (228)..(228): "n" may be a, t, c, g, other or unknown
  misc_feature (421)..(421): "n" may be a, t, c, g, other or unknown
  misc_feature (445)..(445): "n" may be a, t, c, g, other or unknown
  misc_feature (491)..(491): "n" may be a, t, c, g, other or unknown
  misc_feature (512)..(512): "n" may be a, t, c, g, other or unknown
  misc_feature (552)..(552): "n" may be a, t, c, g, other or unknown
gtttctttnnnnctggagttggagtctcactctgtcacccaggctggantgcagtgatgcaatcttggctcactgcaacctcagcctcccgggctcaagcaattctcctacctcaccctcccaagtaactgggactgcaggcacacaccaccatgcccggctaattctttgtattttagtaaanacagggtttcaccccgttgcccaggctggtctcaaactcctgangtcaggcaatccacccgcctcccaaagtgctgggattacaggcgtgagccactgcacccagccaaaaaagtttatctttcatgtttcagataaagccattgctctaataataataaaatatgatatgcaaacaaagtgacattggtgaatctgtacccaccaaaaaatagcacttaaaatatgttttgcatangtttttcagtgatctgatttcaantatgatgaaagttaatggaataggaaattatgaaactatactctcntatatatttaaatgccatgcnaaattttaaatttcctaaggaattatttaatgatcccacntgattgccaatccctaaaattaccgaatttattcaaaagt

SEQ ID NO: 9839 - DNA, 593 bp, Homo sapiens
  misc_feature (138)..(138): "n" may be a, t, c, g, other or unknown
  misc_feature (159)..(159): "n" may be a, t, c, g, other or unknown
  misc_feature (333)..(333): "n" may be a, t, c, g, other or unknown
  misc_feature (442)..(442): "n" may be a, t, c, g, other or unknown
  misc_feature (471)..(471): "n" may be a, t, c, g, other or unknown
  misc_feature (483)..(483): "n" may be a, t, c, g, other or unknown
  misc_feature (502)..(502): "n" may be a, t, c, g, other or unknown
  misc_feature (515)..(515): "n" may be a, t, c, g, other or unknown
  misc_feature (519)..(519): "n" may be a, t, c, g, other or unknown
  misc_feature (525)..(525): "n" may be a, t, c, g, other or unknown
  misc_feature (577)..(578): "n" may be a, t, c, g, other or unknown
  misc_feature (588)..(588): "n" may be a, t, c, g, other or unknown
aatgaaatcttatcttttgcaacaacatggatggacctgggaggccattaagtgaagtaatgatacagaaagtcaaaaaccacatgttctcgtaagtgggagataaacaatgtgtacacctggacgtggagagcagantcatagacactagagccttcnaaggtgggagtggggtgagagatgggaaagtatttactaggtacaatgtatactatttgggtgagggtatactaagcccagatttcaccactatgcaatatatccctgtaataaaagtgacataaatccataaaaattacaaaaagttgctcaaaaaagattggtagtcagaanctgaattctagatgtgctttttcaactatctcattttgtaaatgtagtgtatgaatccccaaatttaacaatagacaatttttaaaatacccactgcccaaattaaaanaaaccgccttttaaatatcccattttttngccacttgggcnccccacctgaatttccaanggattattggttncccncccccnttaatgtttggtcctttcccaagccgccgaaaccaaaaagtttccttttgannacactccganatccc

SEQ ID NO: 9840 - DNA, 593 bp, Homo sapiens
  misc_feature (25)..(25): "n" may be a, t, c, g, other or unknown
  misc_feature (60)..(60): "n" may be a, t, c, g, other or unknown
  misc_feature (116)..(116): "n" may be a, t, c, g, other or unknown
  misc_feature (382)..(382): "n" may be a, t, c, g, other or unknown
  misc_feature (442)..(442): "n" may be a, t, c, g, other or unknown
  misc_feature (520)..(520): "n" may be a, t, c, g, other or unknown
  misc_feature (537)..(537): "n" may be a, t, c, g, other or unknown
  misc_feature (542)..(542): "n" may be a, t, c, g, other or unknown
  misc_feature (556)..(556): "n" may be a, t, c, g, other or unknown
  misc_feature (560)..(560): "n" may be a, t, c, g, other or unknown
  misc_feature (568)..(568): "n" may be a, t, c, g, other or unknown
  misc_feature (578)..(578): "n" may be a, t, c, g, other or unknown
agtggtgcagaccactagtcactantctggtgtctggcttaggtaaatatgtcttcttanatattctctcatcagaactacagataggataatcaactcatcgagtttgccagggntttgctgggtgtagcactgaaagtctcacatgccaggaaaacctcatcttaggcaaactggagtggttgatcacacaacaaaagatgattctttttgactcaatcctggaccttctcatctctctgcggttttaagtaccatctgtatggatggctggtgtattttgtttcctgctttgacatttcttttaagctttggattcaaaataagttttgcaccttatttttaatgcctatcttatattccttactgcataaatcagaanaatctcaatattaaataatctaaatatcaaaacttcatccactctgaaaaaacaatttcncctctggatgctactatctcattaaataaccagcccttccaaccaattgctaaactccaaaccctggaaaaaaggttngggatttcctccttatnccctncaaaaatccatttncccnctacaaanggccttttanatccaatatccaaat

SEQ ID NO: 9841 - DNA, 581 bp, Homo sapiens
  misc_feature (368)..(368): "n" may be a, t, c, g, other or unknown
  misc_feature (420)..(420): "n" may be a, t, c, g, other or unknown
  misc_feature (422)..(422): "n" may be a, t, c, g, other or unknown
  misc_feature (466)..(466): "n" may be a, t, c, g, other or unknown
  misc_feature (516)..(516): "n" may be a, t, c, g, other or unknown
  misc_feature (554)..(554): "n" may be a, t, c, g, other or unknown
  misc_feature (556)..(556): "n" may be a, t, c, g, other or unknown
  misc_feature (569)..(569): "n" may be a, t, c, g, other or unknown
  misc_feature (581)..(581): "n" may be a, t, c, g, other or unknown
actgtataatagttttatttttctcattttactatttttacattttatgcacaaatatttatctgcgtaaaaatagaaaataactgttttatgtaaaattacaaaaaaaattaaaaccacaaagaaatacataattgttattatgacagtataagtgtcgttgtcgttatttaaagagtaaaaatgtatgcaaaagtcctcctcccatttacaaaagattgagaattttgtttttcctggcagcaagtgaaatattgaagtatcaatatttttacaccctttagatctgaagacattaagttagtcacagatttgttttgcaattatgaattttaaaacatttttgtgctatttcaaggatacactanttctttcttaaaggcagtagcataaaatgaatatggaaaacagcagaactcncnaaaatatttggtggtacaatccttttgtttcatactgaatatcnccttaatcaggggagaaaacactaacaatttccctataccttgacggatncaaaattactgtgatcagccattactgaagatcacccncntaccatccgcccnttgttttccgan

SEQ ID NO: 9842 - DNA, 588 bp, Homo sapiens
  misc_feature (69)..(69): "n" may be a, t, c, g, other or unknown
  misc_feature (153)..(153): "n" may be a, t, c, g, other or unknown
  misc_feature (156)..(156): "n" may be a, t, c, g, other or unknown
  misc_feature (181)..(181): "n" may be a, t, c, g, other or unknown
  misc_feature (259)..(259): "n" may be a, t, c, g, other or unknown
  misc_feature (326)..(326): "n" may be a, t, c, g, other or unknown
  misc_feature (359)..(359): "n" may be a, t, c, g, other or unknown
  misc_feature (381)..(381): "n" may be a, t, c, g, other or unknown
  misc_feature (462)..(462): "n" may be a, t, c, g, other or unknown
  misc_feature (466)..(466): "n" may be a, t, c, g, other or unknown
  misc_feature (492)..(492): "n" may be a, t, c, g, other or unknown
  misc_feature (496)..(496): "n" may be a, t, c, g, other or unknown
  misc_feature (523)..(523): "n" may be a, t, c, g, other or unknown
  misc_feature (529)..(529): "n" may be a, t, c, g, other or unknown
  misc_feature (578)..(578): "n" may be a, t, c, g, other or unknown
  misc_feature (581)..(581): "n" may be a, t, c, g, other or unknown
  misc_feature (585)..(585): "n" may be a, t, c, g, other or unknown
accaagttcataattttattatactctgaatagagatgatatttaaggagcagagaaaatgactatacnaaagatttatagaacattcatttacatactggatatattctttacagtatcagaaaagtaaaaatatgcactaacaaggcaganaanacgttacaaggtatttgatgctganaataaatgcacagtgacttttaacatggctatagcttaacactggaggaatacaacaatacgttcttttactgagtanttagtaggaccctggctataacatgcgttgggcacagttcgtgaactctcccgcatttactccccanggcagtacgtgcctgtccagcgggagccctggnaaacaaaatgcctgggaaaacnttccttttcctgtggccctaaaaccggtgtccacgggtggggggctctctcacggtttctgaacccacagtacaatctgtngatnacacacaccttgttctgtttaatgcncatntttcccaaaaggaaaaaaaaacttccnttccanctctccaaaatcgtggaaactttgcttcctttggttccccaaaggactnctncttnggg

SEQ ID NO: 9843 - DNA, 586 bp, Homo sapiens
  misc_feature (68)..(68): "n" may be a, t, c, g, other or unknown
  misc_feature (159)..(159): "n" may be a, t, c, g, other or unknown
  misc_feature (161)..(161): "n" may be a, t, c, g, other or unknown
  misc_feature (277)..(277): "n" may be a, t, c, g, other or unknown
  misc_feature (280)..(280): "n" may be a, t, c, g, other or unknown
  misc_feature (299)..(299): "n" may be a, t, c, g, other or unknown
  misc_feature (343)..(343): "n" may be a, t, c, g, other or unknown
  misc_feature (352)..(352): "n" may be a, t, c, g, other or unknown
  misc_feature (384)..(384): "n" may be a, t, c, g, other or unknown
  misc_feature (396)..(396): "n" may be a, t, c, g, other or unknown
  misc_feature (447)..(447): "n" may be a, t, c, g, other or unknown
  misc_feature (467)..(468): "n" may be a, t, c, g, other or unknown
  misc_feature (476)..(476): "n" may be a, t, c, g, other or unknown
  misc_feature (513)..(513): "n" may be a, t, c, g, other or unknown
  misc_feature (531)..(531): "n" may be a, t, c, g, other or unknown
  misc_feature (549)..(549): "n" may be a, t, c, g, other or unknown
  misc_feature (555)..(555): "n" may be a, t, c, g, other or unknown
  misc_feature (572)..(572): "n" may be a, t, c, g, other or unknown
  misc_feature (582)..(582): "n" may be a, t, c, g, other or unknown
  misc_feature (586)..(586): "n" may be a, t, c, g, other or unknown
ccacacagaaaccaaccacatttttactgcatctgctccacgctggattccaacatgctggcccggancgtggctggctggaaacaactccaacaggtttttcccttccccgtcatgtacattatttatttttgatcctactcactgtcccaagtccanangcagttacaaaaaacactcttgatgcaaaccgtgagtggctacaacacacggatgggggtgggcgcgattcccacaacagggagtggaatccgggaaaataatatataggggcaanacncccccttacttgctaaaantatatggaactcaaaacccacaattgctttgttttgtttctcanttcctggantattttaaactacttgctcttaacattaattncgtattttcccncaaatatctgacctgatttaaaacatttttgtttgcatacatctttttgtnttgccccttatatttttccnnctgatttngggataaaaatttaatttctgcctaaaaaaaaaaccntttactctttttaaaaanaacctcccttccccagcncttctntggttcctttccaaatnttccaccatntttn

SEQ ID NO: 9844 - DNA, 579 bp, Homo sapiens
  misc_feature (377)..(377): "n" may be a, t, c, g, other or unknown
  misc_feature (428)..(428): "n" may be a, t, c, g, other or unknown
  misc_feature (482)..(482): "n" may be a, t, c, g, other or unknown
  misc_feature (485)..(485): "n" may be a, t, c, g, other or unknown
  misc_feature (494)..(494): "n" may be a, t, c, g, other or unknown
  misc_feature (543)..(543): "n" may be a, t, c, g, other or unknown
  misc_feature (545)..(545): "n" may be a, t, c, g, other or unknown
  misc_feature (547)..(547): "n" may be a, t, c, g, other or unknown
  misc_feature (560)..(560): "n" may be a, t, c, g, other or unknown
agaaaacttatttttattctattatattgaacacattgtatcacccccactcatagctgcactccaaaacagttcttctgggaagcagggttttagttttactgaacatgaataaaaaatccaggcagaattcaaaaccagggggaaagagtcaaggaagcaaacttgcttttcagaagcaagatatttataaacagtaatagctgagaatcatataatttgtttctgaaaattaccttttaaatagggcttcattttacatttgcatagtatatggaattttgtaagaagcattaaatttcaaataacttgatgcaataaataatcatggaatactcattgtccaaatataacagatagagcatgtccactaagantaatgttatttctcttaaaataaaggggaaaatctaagttccttgaagcanaaactgtgttgttgactatggcagtcccgtgcctaccatgatacctgaaatgantcnctccaacantgacttttgaaaaagaataaagaaggattgaagaccaattttttaaccntncntggtaggaatttnggcggtacaataaaacaac

SEQ ID NO: 9845 - DNA, 583 bp, Homo sapiens
  misc_feature (93)..(93): "n" may be a, t, c, g, other or unknown
  misc_feature (95)..(95): "n" may be a, t, c, g, other or unknown
  misc_feature (113)..(113): "n" may be a, t, c, g, other or unknown
  misc_feature (451)..(451): "n" may be a, t, c, g, other or unknown
  misc_feature (484)..(484): "n" may be a, t, c, g, other or unknown
  misc_feature (514)..(514): "n" may be a, t, c, g, other or unknown
  misc_feature (572)..(572): "n" may be a, t, c, g, other or unknown
  misc_feature (576)..(576): "n" may be a, t, c, g, other or unknown
  misc_feature (582)..(582): "n" may be a, t, c, g, other or unknown
ggaggtaaaagtgagtttatcttatgctcagcaaaacatatttaggtcagtttaaatatgagcaactggtaaatttatcctcagctagcatanangtgggcattgttaatacnattcaaagcttggttgggcactcttcgttttatagtatgcctgggatacagcacatctgtgagacaagaaaggctaaactagagctctgcttcttctaatcctgcattacaaatttaataataaagtacatttctgctatgtttgtggttttaaaattattcactgtaaacatcctatattctttcctaattaatttcagagctggaacttatatctatgtctatgtcaaattatcatttattctatgaaaagcagcacgaatactcttcattctggttttgacacaaattccttaaaaaaaaattaaggccatttaattgaatcagggccactgaanattaacctggcaaaagtcaactactgatttaanaattttgaaaaaaaaccaaagttgttgtcntgtttttctccctggtacttgaaaacattgttaaattattatctccactctcctctcnattncataanc

SEQ ID NO: 9846 - DNA, 586 bp, Homo sapiens
  misc_feature (60)..(60): "n" may be a, t, c, g, other or unknown
  misc_feature (88)..(88): "n" may be a, t, c, g, other or unknown
  misc_feature (142)..(142): "n" may be a, t, c, g, other or unknown
  misc_feature (157)..(157): "n" may be a, t, c, g, other or unknown
  misc_feature (206)..(206): "n" may be a, t, c, g, other or unknown
  misc_feature (395)..(395): "n" may be a, t, c, g, other or unknown
  misc_feature (421)..(421): "n" may be a, t, c, g, other or unknown
  misc_feature (428)..(428): "n" may be a, t, c, g, other or unknown
  misc_feature (452)..(452): "n" may be a, t, c, g, other or unknown
  misc_feature (467)..(467): "n" may be a, t, c, g, other or unknown
  misc_feature (485)..(485): "n" may be a, t, c, g, other or unknown
  misc_feature (490)..(490): "n" may be a, t, c, g, other or unknown
  misc_feature (513)..(513): "n" may be a, t, c, g, other or unknown
  misc_feature (528)..(528): "n" may be a, t, c, g, other or unknown
  misc_feature (543)..(543): "n" may be a, t, c, g, other or unknown
acaaccgtatgaaagaaatttataatccacaaaactttttcaggtcttaaggtaaaatanttccacagtctacaggtaaaaccaaggnaacaaaaatgcgtgcttatcttgattaagtaagtaattttatgcagaagatgtnacactttgtttgtanacagcatggtatgcatttctcagcaagacataaggaaaacaagattccnaaagatccattgtaaggaatggagattcttgtacaatcatatctagcagtaaataaacagattctctatttcttgttgtagttttatctgtctcctggccaattttcagtagactggaggatgcaagcgccagaaattctttaagacggtcttcaatgcttcctttgtgaattgtaaacaaagctgcancaatctggttgatggctttggccaancaatgtntgttgttgcaatgcccttctatancagggctgttctganactcccattactggccantgttngcaaaaaactgcccccaaccccntgaaaaaggcggcantttatcccctcctcnggaaaattttcccaattttgttaaaaaaaaccccaaccttccg

SEQ ID NO: 9847 - DNA, 490 bp, Homo sapiens
  misc_feature (246)..(246): "n" may be a, t, c, g, other or unknown
  misc_feature (335)..(335): "n" may be a, t, c, g, other or unknown
  misc_feature (343)..(343): "n" may be a, t, c, g, other or unknown
  misc_feature (365)..(365): "n" may be a, t, c, g, other or unknown
  misc_feature (386)..(386): "n" may be a, t, c, g, other or unknown
  misc_feature (399)..(400): "n" may be a, t, c, g, other or unknown
  misc_feature (436)..(436): "n" may be a, t, c, g, other or unknown
  misc_feature (474)..(474): "n" may be a, t, c, g, other or unknown
  misc_feature (481)..(481): "n" may be a, t, c, g, other or unknown
  misc_feature (489)..(490): "n" may be a, t, c, g, other or unknown
ctctaatcttgacgtcacactttatgtcattaagttgatcttcaatctctgatatcctttcttctgcttgatcgattcagctattgatacttctgtatgcttcacgaaagtctcgtgctgtgtttttcagctccatcagatcatttatgttcttctctaaagtggttattctagttagcaattcctccagccttttttcatttttagcttccttgcattgggttagaacatgctcctttagctcanaggagtttgttattacccaccttctgaagcctccttctgtaaattcgtcaaactcattctccatccagttttgttctcttgctggcaangaattgtnatcctttgcaagaaaaaaaggnttcctggttttggaaatttcnacccttttggcannggttttcccccccctccatggaattaatctaccttnggtctttaatgccgggtgaacctcccgaatggggtttngttttgnaaattccnn

SEQ ID NO: 9848 - DNA, 310 bp, Homo sapiens
  misc_feature (80)..(80): "n" may be a, t, c, g, other or unknown
  misc_feature (224)..(224): "n" may be a, t, c, g, other or unknown
  misc_feature (232)..(232): "n" may be a, t, c, g, other or unknown
  misc_feature (234)..(234): "n" may be a, t, c, g, other or unknown
  misc_feature (246)..(246): "n" may be a, t, c, g, other or unknown
  misc_feature (255)..(255): "n" may be a, t, c, g, other or unknown
  misc_feature (287)..(287): "n" may be a, t, c, g, other or unknown
  misc_feature (290)..(290): "n" may be a, t, c, g, other or unknown
gaagatattaaaattcaggttttattatttgttcagttataataatttaagttaatatttgctgtattctcagagcaaanatgtatttctgtaccactgtcctgtataaatttgttacccaagatagtgactggtatgaaaggagagggaagagggtgacagatggaaacgattgctgtaggacagtccatctggccagatgcggtgggggaggggagaaaaantgggagananatggtcctacanatgctcccntgggtaaatgatgggtgcatccctccctgcantcnggctgtgcctgtacttcaca

SEQ ID NO: 9849 - DNA, 543 bp, Homo sapiens
  misc_feature (72)..(72): "n" may be a, t, c, g, other or unknown
  misc_feature (147)..(147): "n" may be a, t, c, g, other or unknown
  misc_feature (149)..(149): "n" may be a, t, c, g, other or unknown
  misc_feature (166)..(166): "n" may be a, t, c, g, other or unknown
  misc_feature (440)..(440): "n" may be a, t, c, g, other or unknown
  misc_feature (452)..(452): "n" may be a, t, c, g, other or unknown
  misc_feature (489)..(489): "n" may be a, t, c, g, other or unknown
  misc_feature (510)..(510): "n" may be a, t, c, g, other or unknown
  misc_feature (518)..(518): "n" may be a, t, c, g, other or unknown
  misc_feature (525)..(525): "n" may be a, t, c, g, other or unknown
  misc_feature (530)..(530): "n" may be a, t, c, g, other or unknown
  misc_feature (542)..(542): "n" may be a, t, c, g, other or unknown
cagagcatgtagcaaatttattatccgtgggtgagaaactgttacatgaagacacacagcaggggaaagaantcagcatttaacagataatctgtgcttctcagacaggggaaaaataaaaacactgtgctgcattataaacaggananggaagaatccagtgaanaacccttaaagtgaatgtcgtcagctaacataggcatctcatccaaagaagacttcaacagagcagttgtttgagttttcaatcatcagtattctgagaacttcaagtgtgtattattagtgctaatgctatccatgttccttctctattttctatgatacgaggaaatcacatgaagctgccttaagtggtgaaaataaatggattctatttttgcagtattcctgcagtcttttaaatcacacacgaatactgctccccaaattatcatcancttctgcctcanaccttcatgaaataactgaaacaatgtggggtgtctnttaaaaaacgaatggctaacntccccccnttcaatntttcnccccccttttcna

SEQ ID NO: 9850 - DNA, 530 bp, Homo sapiens
  misc_feature (90)..(90): "n" may be a, t, c, g, other or unknown
  misc_feature (104)..(104): "n" may be a, t, c, g, other or unknown
  misc_feature (108)..(108): "n" may be a, t, c, g, other or unknown
  misc_feature (118)..(118): "n" may be a, t, c, g, other or unknown
  misc_feature (133)..(133): "n" may be a, t, c, g, other or unknown
  misc_feature (135)..(135): "n" may be a, t, c, g, other or unknown
  misc_feature (172)..(172): "n" may be a, t, c, g, other or unknown
  misc_feature (234)..(234): "n" may be a, t, c, g, other or unknown
  misc_feature (257)..(257): "n" may be a, t, c, g, other or unknown
  misc_feature (334)..(334): "n" may be a, t, c, g, other or unknown
  misc_feature (374)..(374): "n" may be a, t, c, g, other or unknown
  misc_feature (403)..(403): "n" may be a, t, c, g, other or unknown
  misc_feature (424)..(424): "n" may be a, t, c, g, other or unknown
  misc_feature (453)..(453): "n" may be a, t, c, g, other or unknown
  misc_feature (499)..(499): "n" may be a, t, c, g, other or unknown
  misc_feature (503)..(503): "n" may be a, t, c, g, other or unknown
  misc_feature (506)..(506): "n" may be a, t, c, g, other or unknown
  misc_feature (509)..(509): "n" may be a, t, c, g, other or unknown
  misc_feature (517)..(517): "n" may be a, t, c, g, other or unknown
  misc_feature (525)..(525): "n" may be a, t, c, g, other or unknown
cccaagggaagttaatacctttactaagttacaaaacttgggcaaatcaatacagtactcttttataatgaaaccatacttttgttggantcatgttactttantganaattttcacnccaaaaatatttaantnccaaatcaaaacactggtttttaatggtggtttatancataataaggtattttgcacaaaatatattttaaaactacacaatttctccttttaagtganctcccttgtgcaagctgctgaantgtacagcaacagggcaatgggcgtctataggaggtggctctgctctgttctggggttggtccaaagtcaggtgganttccaatgtatgaaaagcttgaaaaatctaccttaagganactgaatatcaataccagtttccaagganttcttgttgaaattttcacanaaatactggaaaccctcaaaatcaaatantaatttcaaacaacattaattccaaataatccttttatttaaaagncccnccnctnttttaatnaattccanaccct

SEQ ID NO: 9851 - DNA, 493 bp, Homo sapiens
  misc_feature (50)..(50): "n" may be a, t, c, g, other or unknown
  misc_feature (225)..(225): "n" may be a, t, c, g, other or unknown
  misc_feature (245)..(245): "n" may be a, t, c, g, other or unknown
  misc_feature (285)..(285): "n" may be a, t, c, g, other or unknown
  misc_feature (288)..(288): "n" may be a, t, c, g, other or unknown
  misc_feature (359)..(359): "n" may be a, t, c, g, other or unknown
  misc_feature (363)..(363): "n" may be a, t, c, g, other or unknown
  misc_feature (372)..(372): "n" may be a, t, c, g, other or unknown
  misc_feature (385)..(385): "n" may be a, t, c, g, other or unknown
  misc_feature (424)..(424): "n" may be a, t, c, g, other or unknown
  misc_feature (463)..(463): "n" may be a, t, c, g, other or unknown
  misc_feature (472)..(472): "n" may be a, t, c, g, other or unknown
  misc_feature (474)..(474): "n" may be a, t, c, g, other or unknown
  misc_feature (481)..(481): "n" may be a, t, c, g, other or unknown
  misc_feature (490)..(490): "n" may be a, t, c, g, other or unknown
  misc_feature (492)..(492): "n" may be a, t, c, g, other or unknown
aatgtggagaaatttttattactttgaatgttttagaatgcaggtagaanagacccggagctcaaatagcttaaataagtaggaaatctattggctaatacaactggaaatgcggagatagggcaggctgcagggctggtggctcagggctcagggggccccaactctctgtgctgctctgaggcactgccttcaatctcaggttggcagcacaaagctgctganagtcccagtgtcacgcccanaccccacaatgccagggaaggaagacaggttctatctaanganaaatcttccatccccacctctgcggacttttactcacttctcagggacctgcttgggatctcaggcccatncctnaaccatttnttggcaaacaaantgaaatattttttacaccaggcaggcacccttggattgnaagcacccacctccaattctttcaggaaaaaagggaaantgggaactncncaaacancaaccaccntnc

SEQ ID NO: 9852 - DNA, 597 bp, Homo sapiens
  misc_feature (461)..(461): "n" may be a, t, c, g, other or unknown
  misc_feature (527)..(527): "n" may be a, t, c, g, other or unknown
  misc_feature (566)..(566): "n" may be a, t, c, g, other or unknown
  misc_feature (578)..(578): "n" may be a, t, c, g, other or unknown
  misc_feature (586)..(586): "n" may be a, t, c, g, other or unknown
  misc_feature (589)..(589): "n" may be a, t, c, g, other or unknown
  misc_feature (593)..(593): "n" may be a, t, c, g, other or unknown
acacaatatatgattttattaataaatagtgcaaaagcatcagtgataactgtttgaacattaaattttttaaacagccatgtcttggcattagttaatattgtgcatattggcctctatggcactacaagtaaacagatgaaaatattgcccattttcatgcacaggtattcagctataacaccatttacaaatcattatgaacaagataaattctgcaataatattcatttggatggccacaattaaatgagtgttatatcaagaaatagcctatgttcaatatactccagatgtcagattgtaaaatgtaatgttatttaaaacttaattctttattttccttaaagggacaccttttgtgtatttgggtactcaaatgaaaacttaggaatgcattctttgaccataataacaaaattcacacaaaagaagttgtatgcttcctcctctaaaagaancaatacatttgctcataatctctctctccaggtacatttctcatattattaatgaaaatgcctacnaacaccaacaccaaaattctgtcttccagggaaaggttncaatttaaaaanattggtcnttntttnaaaa

SEQ ID NO: 9853 - DNA, 582 bp, Homo sapiens
  misc_feature (111)..(111): "n" may be a, t, c, g, other or unknown
  misc_feature (254)..(254): "n" may be a, t, c, g, other or unknown
  misc_feature (417)..(417): "n" may be a, t, c, g, other or unknown
  misc_feature (566)..(566): "n" may be a, t, c, g, other or unknown
  misc_feature (570)..(570): "n" may be a, t, c, g, other or unknown
  misc_feature (579)..(579): "n" may be a, t, c, g, other or unknown
ccaattcttattttattaaaaaaaatggaaataaagtttaaaaaatcaatcaacatggcctttaattttaacaattttaacagcaagtggtggggggagttctcaaatgancaactggagctggaagcacttctgtggtcaagcaggcagcccatggggttgcatcttcctgttgggggatcatccattttcttcaatgaatagttttaagtcttgtcaaatgctcacacagaggcccgctattaaggaggcanacaggcaacattcaatacgaaggcaggacaagctcagccccgctccttcattcgggcatgtgtcattagggatgacattctctgaaggctgcccggcttgaatggccaaatccctgcatcatggctttctttaattccctctgctcccaactcacaaaatgangacctctcttttaaaacaaaaagcactgttctcaaaggtatacatttggaacttccaataatgaaaacatctcttgcttggcaggtggaatatagcaattttggatttttaatcatgcatggggcggaattaaatttcttccagggttntttncctaaaatngga

SEQ ID NO: 9854 - DNA, 547 bp, Homo sapiens
  misc_feature (1)..(547): "n" may be a, t, c, g, other or unknown
nnnnnnnnnnnnnnnnnnnnnnnnnnnnnnnnnnnnnnnnnnnnnnnnnnnnnnnnnnnnnnnnnnnnnnnnnnnnnnnnnnnnnnnnnnnnnnnnnnnnnnnnnnnnnnnnnnnnnnnnnnnnnnnnnnnnnnnnnnnnnnnnnnnnnnnnnnnnnnnnnnnnnnnnnnnnnnnnnnnnnnnnnnnnnnnnnnnnnnnnnnnnnnnnnnnnnnnnnnnnnnnnnnnnnnnnnnnnnnnnnnnnnnnnnnnnnnnnnnnnnnnnnnnnnnnnnnnnnnnnnnnnnnnnnnnnnnnnnnnnnnnnnnnnnnnnnnnnnnnnnnnnnnnnnnnnnnnnnnnnnnnnnnnnnnnnnnnnnnnnnnnnnnnnnnnnnnnnnnnnnnnnnnnnnnnnnnnnnnnnnnnnnnnnnnnnnnnnnnnnnnnnnnnnnnnnnnnnnnnnnnnnnnnnnnnnnnnnnnnnnnnnnnnnnnnnnnnnnnnnnnnnnnnnnnnnnnnnnnnnnnnnnnnnnnnnnnnnnnnnnnnnnnnnnnnnnnnnnnnnnnnnnnn

SEQ ID NO: 9855 - DNA, 580 bp, Homo sapiens
  misc_feature (76)..(76): "n" may be a, t, c, g, other or unknown
  misc_feature (116)..(116): "n" may be a, t, c, g, other or unknown
  misc_feature (496)..(496): "n" may be a, t, c, g, other or unknown
  misc_feature (501)..(501): "n" may be a, t, c, g, other or unknown
  misc_feature (549)..(549): "n" may be a, t, c, g, other or unknown
  misc_feature (559)..(559): "n" may be a, t, c, g, other or unknown
  misc_feature (564)..(564): "n" may be a, t, c, g, other or unknown
  misc_feature (570)..(570): "n" may be a, t, c, g, other or unknown
  misc_feature (572)..(572): "n" may be a, t, c, g, other or unknown
gcatttaaattttcaaatagtggcaatatttcactttccaggtataattattttcttttaaaaatgccactaatanatacatgtcattacacatttgttaaaatccacagaatgtncaacactgagagtgtaaactgtggactttgggtgataatgagacattgatgtaggttcatcgattgtaacaaatacaccactgtggcgtaagatgtcaatagtgggggcactctgtactttctgctcaattttgttctgaacctaagactgctctaaaatacaaagtctattaaataaataaataaaatggaaaaacagtaataacaaatgccccttgaaaccatttttccaaaaataatttgtgtcatcttgcctgaagaaaaagaatatgtaaaaaataatttctaaaattctgtttctttataccaaaatcacgggaccttgaatatcttaacaagtcctaattattgctgaagaacaggaatcactactccgaaanatgtnacaaagaacccctccctaccatattaacccggcccccccccaaaaaanattttccttntttcngggaancnggaaaccc

SEQ ID NO: 9856 - DNA, 473 bp, Homo sapiens
  misc_feature (3)..(3): "n" may be a, t, c, g, other or unknown
  misc_feature (34)..(34): "n" may be a, t, c, g, other or unknown
  misc_feature (130)..(130): "n" may be a, t, c, g, other or unknown
  misc_feature (303)..(303): "n" may be a, t, c, g, other or unknown
  misc_feature (325)..(325): "n" may be a, t, c, g, other or unknown
  misc_feature (328)..(328): "n" may be a, t, c, g, other or unknown
  misc_feature (338)..(338): "n" may be a, t, c, g, other or unknown
  misc_feature (340)..(340): "n" may be a, t, c, g, other or unknown
  misc_feature (355)..(355): "n" may be a, t, c, g, other or unknown
  misc_feature (386)..(386): "n" may be a, t, c, g, other or unknown
  misc_feature (424)..(424): "n" may be a, t, c, g, other or unknown
  misc_feature (452)..(452): "n" may be a, t, c, g, other or unknown
  misc_feature (454)..(454): "n" may be a, t, c, g, other or unknown
  misc_feature (466)..(466): "n" may be a, t, c, g, other or unknown
  misc_feature (469)..(469): "n" may be a, t, c, g, other or unknown
  misc_feature (473)..(473): "n" may be a, t, c, g, other or unknown
ganacaaggtatcactttgctgcacaggttgaantacagtggtacagtcatggctcactgtagccttcacaaacccagtcatttggactcctaggttcaggcaatcctcctgcctcagcctccaaaatanctgggactataggcatgcttcaccatgcctggctaatttttttttttttaaatagggacatgatcatgctatgttgaccaggcaggtctggaactcctaggctcaagcaatcttcccactttagcctcccaaaatgctgggatcacaggcttgaatcactgtgcccagcgganaccttctgttttctcagttaancanggaaagtgtntnaaaggtgaaatgcangttttcaactgtcatctgaaaaaatcaaaancaaatctgctaaaaaaacatacaaaaatgggtaggccntattaaatggctatttaaattttttgtnanaaatttcaattnttntcan

SEQ ID NO: 9857 - DNA, 470 bp, Homo sapiens
  misc_feature (190)..(190): "n" may be a, t, c, g, other or unknown
  misc_feature (331)..(331): "n" may be a, t, c, g, other or unknown
  misc_feature (359)..(359): "n" may be a, t, c, g, other or unknown
  misc_feature (406)..(406): "n" may be a, t, c, g, other or unknown
  misc_feature (419)..(419): "n" may be a, t, c, g, other or unknown
  misc_feature (439)..(439): "n" may be a, t, c, g, other or unknown
  misc_feature (445)..(445): "n" may be a, t, c, g, other or unknown
  misc_feature (447)..(447): "n" may be a, t, c, g, other or unknown
  misc_feature (460)..(460): "n" may be a, t, c, g, other or unknown
  misc_feature (468)..(468): "n" may be a, t, c, g, other or unknown
atgaatgaagagtgtgctatgcaaatgagggcgattcacaaaaagagacagaacatggctgccacttctgcttctacactgcactgacactgcagcaatgtacctccttctacacccgctcagcaaaagcgtgtgttttggggtggggagggagtaagggaggaggaaatgttgtttggcctttctctanctattttacgttaaacaggactcggtacagactttaaaaagttatttcaaaaaggtctgactttagtaatgcactgtatttaaaggaatgcatccaaatgactaagtcctaactcacttaactctttccaaccctccgaanataaacaaaagttgaacttaattacaanaaaacggatgctaatattctgcttggaattaaatcccttctcaatanaaaagtgttgccnaccattatttctccccgcanctgtcncnttaaagcaaaacntttaaaanac

SEQ ID NO: 9858 - DNA, 575 bp, Homo sapiens
  misc_feature (4)..(4): "n" may be a, t, c, g, other or unknown
  misc_feature (63)..(63): "n" may be a, t, c, g, other or unknown
  misc_feature (424)..(424): "n" may be a, t, c, g, other or unknown
  misc_feature (471)..(471): "n" may be a, t, c, g, other or unknown
  misc_feature (496)..(496): "n" may be a, t, c, g, other or unknown
  misc_feature (502)..(502): "n" may be a, t, c, g, other or unknown
  misc_feature (529)..(529): "n" may be a, t, c, g, other or unknown
  misc_feature (541)..(541): "n" may be a, t, c, g, other or unknown
  misc_feature (546)..(546): "n" may be a, t, c, g, other or unknown
  misc_feature (570)..(570): "n" may be a, t, c, g, other or unknown
  misc_feature (572)..(572): "n" may be a, t, c, g, other or unknown
agancattttaatcagttttattgattcatgcttccagttcttattcagttaaaaacaagggnacattaaatacatcctcttattgctctataaatgcatgcagctcattctgtgtatcaaaagtaataaataatggccataaaacaccaagacagttataaaaatgacaacccagcctcaaacatagtatttaacagtccagtctagaacaataacccaacatgatacataaaagtgccacatatgaaaacatgcggtgtgtatatccactctagcactgagcttacacttgctatttaaaaacatagtagggctttttcactccttcaaaaaggttgacatgatgcaaacatcgcaagttatagcatcattgactttaatattacattcatatgccaaaaatctttacagatacataagaanaaaaataacatcaatgatgaccctacagtatatttagtaaaagtganaatgaatttttttgttgttcaaaanaagaanctacttttttgaaacagacaagccaanccgaaactgaanccganaaaaacatgcttttataccaaaancnaaa

SEQ ID NO: 9859 - DNA, 595 bp, Homo sapiens
  misc_feature (1)..(595): "n" may be a, t, c, g, other or unknown
nnnnnnnnnnnnnnnnnnnnnnnnnnnnnnnnnnnnnnnnnnnnnnnnnnnnnnnnnnnnnnnnnnnnnnnnnnnnnnnnnnnnnnnnnnnnnnnnnnnnnnnnnnnnnnnnnnnnnnnnnnnnnnnnnnnnnnnnnnnnnnnnnnnnnnnnnnnnnnnnnnnnnnnnnnnnnnnnnnnnnnnnnnnnnnnnnnnnnnnnnnnnnnnnnnnnnnnnnnnnnnnnnnnnnnnnnnnnnnnnnnnnnnnnnnnnnnnnnnnnnnnnnnnnnnnnnnnnnnnnnnnnnnnnnnnnnnnnnnnnnnnnnnnnnnnnnnnnnnnnnnnnnnnnnnnnnnnnnnnnnnnnnnnnnnnnnnnnnnnnnnnnnnnnnnnnnnnnnnnnnnnnnnnnnnnnnnnnnnnnnnnnnnnnnnnnnnnnnnnnnnnnnnnnnnnnnnnnnnnnnnnnnnnnnnnnnnnnnnnnnnnnnnnnnnnnnnnnnnnnnnnnnnnnnnnnnnnnnnnnnnnnnnnnnnnnnnnnnnnnnnnnnnnnnnnnnnnnnnnnnnnnnnnnnnnnnnnnnnnnnnnnnnnnnnnnnnnnnnnnnnnnnnnnnnnnnnn

SEQ ID NO: 9860 - DNA, 583 bp, Homo sapiens
  misc_feature (31)..(31): "n" may be a, t, c, g, other or unknown
  misc_feature (120)..(120): "n" may be a, t, c, g, other or unknown
  misc_feature (126)..(126): "n" may be a, t, c, g, other or unknown
  misc_feature (163)..(163): "n" may be a, t, c, g, other or unknown
  misc_feature (165)..(165): "n" may be a, t, c, g, other or unknown
  misc_feature (207)..(207): "n" may be a, t, c, g, other or unknown
  misc_feature (265)..(265): "n" may be a, t, c, g, other or unknown
  misc_feature (309)..(309): "n" may be a, t, c, g, other or unknown
  misc_feature (337)..(337): "n" may be a, t, c, g, other or unknown
  misc_feature (346)..(346): "n" may be a, t, c, g, other or unknown
  misc_feature (374)..(374): "n" may be a, t, c, g, other or unknown
  misc_feature (410)..(410): "n" may be a, t, c, g, other or unknown
  misc_feature (444)..(444): "n" may be a, t, c, g, other or unknown
  misc_feature (459)..(459): "n" may be a, t, c, g, other or unknown
  misc_feature (499)..(499): "n" may be a, t, c, g, other or unknown
  misc_feature (518)..(518): "n" may be a, t, c, g, other or unknown
attttttttttttttttttttttttttgcanacgaagtttcaacctttttattcaaagcagcttctcacaatgtataaatactgcatattagcacacatgaaaaatacaacttctaaggnacccanaaatgtgttcatacacgttacaggaccattcacaaananagtgtacaatttgctctaaacagtcaggatttgataaatcanaaaattattatccctcagtactgcacccagtctcagtaaatatttacaacatggtganaaggggtcagctgtaccttctttataattctatgaagtactcanacttacaaatattcagaactagttaaanactctcccntgataatctggcaaaataaaacaagtancctaattttgcaaaggtctcggtggattttggtgtntgctacatccatgatcaaatccaaacactcctanggtgggctggataantttttggtagcctgcttcattatcggaatttggtaataanccttaccaacaaaatacanctcttcacatcatcattctcactggtcatggatcatgatccccctgaatgaaaatggaaaaaaat

SEQ ID NO: 9861 - DNA, 589 bp, Homo sapiens
  misc_feature (309)..(309): "n" may be a, t, c, g, other or unknown
  misc_feature (311)..(311): "n" may be a, t, c, g, other or unknown
  misc_feature (482)..(482): "n" may be a, t, c, g, other or unknown
  misc_feature (495)..(495): "n" may be a, t, c, g, other or unknown
  misc_feature (497)..(497): "n" may be a, t, c, g, other or unknown
  misc_feature (550)..(550): "n" may be a, t, c, g, other or unknown
  misc_feature (556)..(556): "n" may be a, t, c, g, other or unknown
  misc_feature (578)..(578): "n" may be a, t, c, g, other or unknown
  misc_feature (585)..(585): "n" may be a, t, c, g, other or unknown
acataatatgttatttatttgatattctggagaagtccaaacacacaaagtgattctgtatttgcgagaaatttaaggagatgatgaaaatgggtaaaaaatagatttaaaagggtgatgaaagtattatgtataatattataatggtaaatatgtgatatgaatttgttgaaatcaacagaatatacagcataaagggttaattccaattcacaaaaatataaataaataggagattaggaattccaggatagaatgcagacaatatagaaaatatctaatgtcattacaaatgtatgaaatcagaanangtgccaagtgacctcagaaatagtgtagtcaataaaagaataaagaaagtgcacgtcagaactgtaccccagctgatgatgttcctccaaagagcaaaacatacacaatctggttccactctacagaaatcctggaactggactacaaagggaataaacagggttgtggcnggaagggggtccncnccgttggattgcaaggttagggacaggaataaaaggccggtattaacattccnttggtnttacagggcgaattttcatatnttgcaanttta

SEQ ID NO: 9862 - DNA, 591 bp, Homo sapiens
  misc_feature (277)..(277): "n" may be a, t, c, g, other or unknown
  misc_feature (286)..(286): "n" may be a, t, c, g, other or unknown
  misc_feature (332)..(332): "n" may be a, t, c, g, other or unknown
  misc_feature (343)..(343): "n" may be a, t, c, g, other or unknown
  misc_feature (352)..(352): "n" may be a, t, c, g, other or unknown
  misc_feature (411)..(411): "n" may be a, t, c, g, other or unknown
  misc_feature (443)..(443): "n" may be a, t, c, g, other or unknown
  misc_feature (448)..(448): "n" may be a, t, c, g, other or unknown
  misc_feature (462)..(462): "n" may be a, t, c, g, other or unknown
  misc_feature (483)..(483): "n" may be a, t, c, g, other or unknown
  misc_feature (503)..(503): "n" may be a, t, c, g, other or unknown
  misc_feature (514)..(514): "n" may be a, t, c, g, other or unknown
  misc_feature (524)..(524): "n" may be a, t, c, g, other or unknown
  misc_feature (575)..(575): "n" may be a, t, c, g, other or unknown
  misc_feature (577)..(577): "n" may be a, t, c, g, other or unknown
ggtttaaataatccatttgtattgggtcttagtaagaatactactactagtaactattatcaagcaactactgtgtcatgtacttttcacacattcttttaattaaaaactctccactaacccttacagttcagtattatccttgttttacagatgaagaaaagccaaagagaagttatataactggcaagtttctctggctccccgcctgcaccactgctcgccagattgcatgaagagggaggcagctgtaacacctcatcccgttgatctccanggaactcanatacttgtttccacgtccaggaaaccgcaaactaagctctttgaancatcagcaaancttgctaantgacacgtgaaatgccattggatacatattctaatctttcaggtataaaggacagtcanactgcctcatctgttcatccaagggatctganaacanacattcctccagtnttgaacatccacatccttatnggaaaatggtccaaaaaaanaatggcccccntttaaaaaanatttttttagggccgaattttttttaaactaattttcccaaaattttttancntttttatgcccccc

SEQ ID NO: 9863 - DNA, 524 bp, Homo sapiens
  misc_feature (150)..(150): "n" may be a, t, c, g, other or unknown
  misc_feature (441)..(441): "n" may be a, t, c, g, other or unknown
  misc_feature (459)..(459): "n" may be a, t, c, g, other or unknown
  misc_feature (469)..(469): "n" may be a, t, c, g, other or unknown
  misc_feature (484)..(484): "n" may be a, t, c, g, other or unknown
  misc_feature (498)..(498): "n" may be a, t, c, g, other or unknown
  misc_feature (503)..(503): "n" may be a, t, c, g, other or unknown
  misc_feature (524)..(524): "n" may be a, t, c, g, other or unknown
cctggcataagacattttctatgtattcaaaataagaaaaggaaatggtgaatatattgacaagtagcagtttgaattataatgacaattctttaggattttatgtagcttgcatatttaacatttaaatatattgttctaggaattggntgataaaactagaaaataaagagaaattatgatcaccatgtgttcactcttcagactttgatctatgaatcagctcactgagagagatacttgaaaacttctcttggtttcttctaatccatctttggaatgtcctccacggatggatgccttgcagttgaaacataaatgctataaaaattaatccccctagcactaccgctgttgccacggcaataaacgtgtgtcctggggaatggcaatggtgcctcatcaacataaatctgaaattctcaattaagttacaaaaanttctcctgaaatgacggnccctctaaantggaaaagttcaaancctttatgcttaanttganacctgaaggattatacctgcn

SEQ ID NO: 9864 - DNA, 519 bp, Homo sapiens
  misc_feature (42)..(42): "n" may be a, t, c, g, other or unknown
  misc_feature (200)..(200): "n" may be a, t, c, g, other or unknown
  misc_feature (228)..(228): "n" may be a, t, c, g, other or unknown
  misc_feature (375)..(375): "n" may be a, t, c, g, other or unknown
  misc_feature (400)..(400): "n" may be a, t, c, g, other or unknown
  misc_feature (451)..(451): "n" may be a, t, c, g, other or unknown
  misc_feature (475)..(475): "n" may be a, t, c, g, other or unknown
  misc_feature (485)..(485): "n" may be a, t, c, g, other or unknown
  misc_feature (494)..(494): "n" may be a, t, c, g, other or unknown
  misc_feature (498)..(498): "n" may be a, t, c, g, other or unknown
  misc_feature (514)..(515): "n" may be a, t, c, g, other or unknown
acaaataaagcatgtgtttattgaaatagtacctctatgaanaatactttaagaatgtgaatggggttttgtttttgtaaactttcaattaccttcccttccctgaccctgccaggtattcatctcctgcccagatcccagggtggccttcctgaaatgaacgctccatctgaattttcttctcccctgtctctcaaganaatgcccaggctcctaaccatgtctcanactgccctgcacctcagcctctgtctctgcacccccaggcatgttcaacctcttgcaattcttgcattccccatagttcatgacccaacctttgcccccctaccagctggtcctggaataccccccaggctcgtttgtgaacctcangagtattcatgttccaaagtcgcancactctggaaccgcctccccaagctgctgtgggtctttgctgggtcccccnaatgttcaagtctgtctcccccangggcccaatnccactccanaatntgttttctccccccannacta

SEQ ID NO: 9865 - DNA, 433 bp, Homo sapiens
  misc_feature (368)..(368): "n" may be a, t, c, g, other or unknown
  misc_feature (428)..(433): "n" may be a, t, c, g, other or unknown
aggttttagcagcacttttacttccacatccaaactccctgggtcctcacaacagccctgtgaggtaggtagggtaggaaggtttcagagatccccatttatagatgaggatgctgaggcacagagaggtgaagtgacttgtccaaggtcatacaaccagcagtgtagagggctcaaagccagcattcctccacttgaactcctgcgctccggccctctggcagttcccacatcctctctattctctctgtgtcccccaccctctcaactctcctgggtctacagggaccctaaaggcagcctggcagctgagatttttcaggaatggcaactggggtaggcctggtcaactccagataggagctgancctgaagagcatggggccagctttgcttctccccattcccattgggatgaagggcctatnnnnnn

SEQ ID NO: 9866 - DNA, 532 bp, Homo sapiens
  misc_feature (12)..(12): "n" may be a, t, c, g, other or unknown
  misc_feature (39)..(39): "n" may be a, t, c, g, other or unknown
  misc_feature (43)..(43): "n" may be a, t, c, g, other or unknown
  misc_feature (45)..(45): "n" may be a, t, c, g, other or unknown
  misc_feature (66)..(66): "n" may be a, t, c, g, other or unknown
  misc_feature (85)..(85): "n" may be a, t, c, g, other or unknown
  misc_feature (148)..(148): "n" may be a, t, c, g, other or unknown
  misc_feature (242)..(242): "n" may be a, t, c, g, other or unknown
  misc_feature (246)..(246): "n" may be a, t, c, g, other or unknown
  misc_feature (365)..(365): "n" may be a, t, c, g, other or unknown
  misc_feature (374)..(374): "n" may be a, t, c, g, other or unknown
  misc_feature (381)..(381): "n" may be a, t, c, g, other or unknown
  misc_feature (404)..(404): "n" may be a, t, c, g, other or unknown
  misc_feature (441)..(441): "n" may be a, t, c, g, other or unknown
  misc_feature (450)..(450): "n" may be a, t, c, g, other or unknown
  misc_feature (457)..(457): "n" may be a, t, c, g, other or unknown
  misc_feature (466)..(466): "n" may be a, t, c, g, other or unknown
  misc_feature (480)..(480): "n" may be a, t, c, g, other or unknown
  misc_feature (505)..(505): "n" may be a, t, c, g, other or unknown
  misc_feature (516)..(516): "n" may be a, t, c, g, other or unknown
gtagttcagaanccaacccttattttattaaaatgtgtncaananatggggaaagaaaaggaccanactgtactgtggccatgtncacaaaggcatgcaccacatcccagctctgctgccctgggctgtcccacaggcagctctctanaacttgagagcctcaaaaggggcctcatgaagcccaaatcttccctggtcagctgatggcattcgtataactgaaagttggggaagaccaccangtcngtggagtggagaggttttgtatatggtcttctttgaaaaaacttacttcttgcaagccctggcatcttccaattggctgtcctagtaatggacgcggcatcagcctaccaacaatggangtctactcncccctcnctgaattttgttcctgaaatcanaaaccccggcccacccaattccacaggccaatccacntccaggccncccttgntccccccantgaaccccctttcnacggattttcggaaaccctcctccnggaatttcttnaaccttggtcccttcc

SEQ ID NO: 9867 - DNA, 576 bp, Homo sapiens
  misc_feature (328)..(328): "n" may be a, t, c, g, other or unknown
  misc_feature (354)..(354): "n" may be a, t, c, g, other or unknown
  misc_feature (371)..(371): "n" may be a, t, c, g, other or unknown
  misc_feature (489)..(489): "n" may be a, t, c, g, other or unknown
  misc_feature (521)..(521): "n" may be a, t, c, g, other or unknown
  misc_feature (528)..(529): "n" may be a, t, c, g, other or unknown
  misc_feature (532)..(532): "n" may be a, t, c, g, other or unknown
  misc_feature (562)..(562): "n" may be a, t, c, g, other or unknown
  misc_feature (569)..(569): "n" may be a, t, c, g, other or unknown
aagaaaagaacaacaataataaatctttattgagattttttaacaaaataatttttgaaaacaaaagctcccacatgtaaacaagaacgtaaataagttagatggcattattatgtacattcaagaatcaaaacatgttctggtaaacattccataatccggtaaaatgttttcacccatcactgttaagagaaactgtgtatttaatactatcaataacaaaacctaatctttgaacattataaaatggtttacggaatataaactatacagtttagtttttcattcctcctagcaatccgtgtcacatgtatactagtcctaagangtattttgtcagtattagcccaaaangtcccccaccccaaatnaaccagtttacacatatctcccccagttttaagggtggggatgtgttgaaacccatatattacaacatcctttttccaaactaacctaatcctaattcctatcctactaatccggggngcccccatttatctcccgtctacccttccttnaaatccnnggngggttccccttaaaaaatccgccgatcccntttaaanataattt

SEQ ID NO: 9868 - DNA, 505 bp, Homo sapiens
  misc_feature (250)..(250): "n" may be a, t, c, g, other or unknown
  misc_feature (345)..(345): "n" may be a, t, c, g, other or unknown
  misc_feature (382)..(382): "n" may be a, t, c, g, other or unknown
  misc_feature (466)..(466): "n" may be a, t, c, g, other or unknown
  misc_feature (468)..(468): "n" may be a, t, c, g, other or unknown
  misc_feature (471)..(471): "n" may be a, t, c, g, other or unknown
  misc_feature (476)..(476): "n" may be a, t, c, g, other or unknown
  misc_feature (480)..(480): "n" may be a, t, c, g, other or unknown
  misc_feature (489)..(489): "n" may be a, t, c, g, other or unknown
  misc_feature (498)..(498): "n" may be a, t, c, g, other or unknown
gacggagtctgtctctgtcgcccaggatggagtacagtggcacaatctcagctcactgcaatctctgcctcccaggttcaagcaattctcctgccttagcctcccaagtagctgggattacaggtgcctgccaccacgcctggctaatttttgtatttttggtagagacggggtttcaccatgttgcccaggctggtcttgaactcctgacctcaagtgatccacccccacccccattggcttcccaganttctgggattacaggcgtgaatcaccgcgcccagcccaaatcgccgaaatctttatctcctaccttgatctctgtagcagaaaagaacagtatanatatcaattgtcatcaacagatgcaacatatcttgtnaatcaatatattttcaagtgaggtctctgaatcacctgcactgaaatcatctgtgatgcttatcaagcatgcagatctcaggancntcnctganttcntaaatctcntctctggangttaaaa

SEQ ID NO: 9869 - DNA, 596 bp, Homo sapiens
  misc_feature (414)..(414): "n" may be a, t, c, g, other or unknown
  misc_feature (442)..(442): "n" may be a, t, c, g, other or unknown
  misc_feature (467)..(467): "n" may be a, t, c, g, other or unknown
  misc_feature (500)..(500): "n" may be a, t, c, g, other or unknown
  misc_feature (516)..(516): "n" may be a, t, c, g, other or unknown
  misc_feature (525)..(525): "n" may be a, t, c, g, other or unknown
  misc_feature (540)..(540): "n" may be a, t, c, g, other or unknown
  misc_feature (553)..(554): "n" may be a, t, c, g, other or unknown
  misc_feature (576)..(576): "n" may be a, t, c, g, other or unknown
caaaggcaaataaaataagtttattgggatgtaaccccatcataaattgaggagcatccatacggggcaagctataaaatctggaaaatttaaatcaaattaaattctgcttttaaaaaggtgccttaagttaaccaagcattttgataacacattcaaatttaatatataaaaatagatgtatcctggaagatataatgaagaacataccatgtgtataaattcagaatacgctttttacacaaagaactacaaaaagttacaaagacagccttcaggaaccacacttaggaaaagtgagccgagcagccttcacgcaaagcctccttcaaagaagtctcacaaagactccagaaccagccgagtccgtcctcggggctccgtgttactttcaacacaccgtggacaggggangaaatgggttctgcttgctgaccaccancttctgatgctgatgcgatatgttncctttgacgtgtccatgtttatccagttagccngaatacctgaacttcntccatttcncgtccccccccgctnaaattccaggggnncccaaaaactcccaaaaacctngggttttttcccttacaatt

SEQ ID NO: 9870 - DNA, 579 bp, Homo sapiens
  misc_feature (454)..(454): "n" may be a, t, c, g, other or unknown
  misc_feature (516)..(516): "n" may be a, t, c, g, other or unknown
  misc_feature (521)..(521): "n" may be a, t, c, g, other or unknown
  misc_feature (548)..(548): "n" may be a, t, c, g, other or unknown
  misc_feature (550)..(550): "n" may be a, t, c, g, other or unknown
  misc_feature (560)..(560): "n" may be a, t, c, g, other or unknown
  misc_feature (562)..(562): "n" may be a, t, c, g, other or unknown
  misc_feature (566)..(566): "n" may be a, t, c, g, other or unknown
aacaaataaaattctttatttaaatttctcttgtggggaaaatatttttctttaaagcacacttaaaagtaatttgcatttacttcctgtaaagcatttccatttcacaattagcaaaactaaaaggctatgtctcttcatgcatttatttttgttagaaaaatgtcccatggtgctatcaaaccgattttaaccatcatcaagcttaactttgcctctgttgacaacatgactacaaacatgaatcaaaaaggagttaaggaattttaagccataaggtttcaattatagcttaccaattatgtaattagctgacaaaaatcaagtctgatgtagaatagctgtcatctacttaactgcagataatcatggcattttcatttaagatgatctgaacttatgaaataaaggatccagtcccaagaactcaataatctcttatgttttcttttgnaagacttatttcaaatattaactatttcggtgcctgaatggaaaaatataaacattaactcnaaaanaatgttgtaccggtttggaatccactngnactttaaccncngtgnaaaaaccgaaagg

SEQ ID NO: 9871 - DNA, 594 bp, Homo sapiens
  misc_feature (133)..(133): "n" may be a, t, c, g, other or unknown
  misc_feature (218)..(218): "n" may be a, t, c, g, other or unknown
  misc_feature (220)..(220): "n" may be a, t, c, g, other or unknown
  misc_feature (369)..(369): "n" may be a, t, c, g, other or unknown
  misc_feature (395)..(395): "n" may be a, t, c, g, other or unknown
  misc_feature (468)..(468): "n" may be a, t, c, g, other or unknown
  misc_feature (474)..(474): "n" may be a, t, c, g, other or unknown
  misc_feature (509)..(509): "n" may be a, t, c, g, other or unknown
  misc_feature (518)..(518): "n" may be a, t, c, g, other or unknown
  misc_feature (543)..(543): "n" may be a, t, c, g, other or unknown
  misc_feature (554)..(554): "n" may be a, t, c, g, other or unknown
  misc_feature (581)..(581): "n" may be a, t, c, g, other or unknown
  misc_feature (583)..(583): "n" may be a, t, c, g, other or unknown
  misc_feature (594)..(594): "n" may be a, t, c, g, other or unknown
ctgtgttacaacaaagcagtttatttgtgatcagtgtttgagactctatacatccttcacaaatttaattttacataatctgatacgtctcttaaaacttaaactttgaactgctagacttttatttccctanaacagaagggctggtataagttattttccagaaatgaggtaccgttttcacagaactggtttcttttttttttttcaagttttananaactaaatttgcatttgttaaaatcaaaaagtaggaaagatgttctttacaaataattttgatcaagtatgtgttcaaagaaagcaggataaaaaggctttttctctaacattctgtgttgtactgtattgttgttcaataggaattancttctgtcatttgctaaaaaaatgantattggggaacaggatatgttggaaatttcataacgggtaacagaaccattctcttgggtaaaccataagcangggcanctgtgctgtaaccatatgggttttccataccctgnaactatttnccagaacaactgtcccccacaaaancccccctgttnaaattccccccccccgccccaaaactngnatggtgcaaan

SEQ ID NO: 9872 - DNA, 479 bp, Homo sapiens
  misc_feature (6)..(6): "n" may be a, t, c, g, other or unknown
  misc_feature (164)..(164): "n" may be a, t, c, g, other or unknown
  misc_feature (166)..(166): "n" may be a, t, c, g, other or unknown
  misc_feature (194)..(194): "n" may be a, t, c, g, other or unknown
  misc_feature (275)..(275): "n" may be a, t, c, g, other or unknown
  misc_feature (340)..(340): "n" may be a, t, c, g, other or unknown
  misc_feature (365)..(365): "n" may be a, t, c, g, other or unknown
  misc_feature (405)..(405): "n" may be a, t, c, g, other or unknown
  misc_feature (432)..(432): "n" may be a, t, c, g, other or unknown
  misc_feature (455)..(455): "n" may be a, t, c, g, other or unknown
  misc_feature (458)..(458): "n" may be a, t, c, g, other or unknown
  misc_feature (475)..(476): "n" may be a, t, c, g, other or unknown
  misc_feature (478)..(478): "n" may be a, t, c, g, other or unknown
caaggnagatatttcctggacttgaataaagtgtttttggtttgtattctcattccatcagtagtatgacttagggcaagagccaactcctttatgcttcatttttttaaatctaatagatcaaggaaatggaaaccggctcaataggttgtttaaagcttaananatgtgtgaatgcacctagcacctactanacacaacaatgagcctgcatttccgcaagtaagccattcctacctccttaccccccattccaattaatgtttgtctataanaatattttaaaattcaagagccaatgtaaaactctgtaaatattatcttgctatttatagagacnaccacaaaagtttgcaatgatgcanatgacatccataatgagtctcttaaatgaaggtttggcangcaatacaggtcttttgaataaaaatntccccaggaaaaatacttgcaantcnagcccccaaaccatcanntnt

SEQ ID NO: 9873 - DNA, 551 bp, Homo sapiens
  misc_feature (93)..(93): "n" may be a, t, c, g, other or unknown
  misc_feature (98)..(98): "n" may be a, t, c, g, other or unknown
  misc_feature (105)..(105): "n" may be a, t, c, g, other or unknown
  misc_feature (123)..(123): "n" may be a, t, c, g, other or unknown
  misc_feature (137)..(137): "n" may be a, t, c, g, other or unknown
  misc_feature (157)..(157): "n" may be a, t, c, g, other or unknown
  misc_feature (216)..(216): "n" may be a, t, c, g, other or unknown
  misc_feature (332)..(332): "n" may be a, t, c, g, other or unknown
  misc_feature (495)..(495): "n" may be a, t, c, g, other or unknown
  misc_feature (508)..(508): "n" may be a, t, c, g, other or unknown
  misc_feature (519)..(519): "n" may be a, t, c, g, other or unknown
  misc_feature (522)..(522): "n" may be a, t, c, g, other or unknown
  misc_feature (524)..(524): "n" may be a, t, c, g, other or unknown
  misc_feature (539)..(539): "n" may be a, t, c, g, other or unknown
  misc_feature (549)..(549): "n" may be a, t, c, g, other or unknown
ccacaagggaatatcattttattactgtaatcacaaaatcgtaatttctgtacaggaatgtataagtgaacattattcaaagcattggtaatncactncataaanagggtaaacatactacanaacatattgtaaanaaaaaatattgtaaaatttnctggtcttgcagtgcactatttagtgcaagtatttaaaacacaatagtgttcaattcancaaagtattgcaaaatgtcatgccacagtccacttaattcaaaaagggtcaggacatgcaccttgtaataaaatgtcaaaatgtgtgtgtgtgtgtgtgtgtgtgtgtgtgtgtanaaaaaaccacatgtaattcataaaatatatagtggtttatttaaatggttttaaatgaatttccctgtggaatccaccataactggaacacatcccagggtctccttaacggcaacaaaccttatgctaaggcaatggctttgggctccgggttagaaatccnccccatttttttnaccccctttgnttntntttgaaacaatgaanccaatttctnaa

SEQ ID NO: 9874 - DNA, 530 bp, Homo sapiens
  misc_feature (250)..(250): "n" may be a, t, c, g, other or unknown
  misc_feature (315)..(315): "n" may be a, t, c, g, other or unknown
  misc_feature (361)..(361): "n" may be a, t, c, g, other or unknown
  misc_feature (445)..(445): "n" may be a, t, c, g, other or unknown
  misc_feature (447)..(447): "n" may be a, t, c, g, other or unknown
  misc_feature (476)..(476): "n" may be a, t, c, g, other or unknown
  misc_feature (495)..(495): "n" may be a, t, c, g, other or unknown
  misc_feature (513)..(513): "n" may be a, t, c, g, other or unknown
  misc_feature (524)..(524): "n" may be a, t, c, g, other or unknown
  misc_feature (528)..(528): "n" may be a, t, c, g, other or unknown
gggaaaaatgtaatttatttgcactgcttccattcttctactgtagtgttaggacttaacataagcatcactcttctatttcctatttacattcttttggaatattactgcaaatacaatatacaatttaaaaaaacttatggggaaacacagcttatgtttttttctcctctttacaggcttctcagtatcattcgacttcaatggaaatttatatggacattttctgtacatatcttaaaaggcaganattacactgataaagcctaaagaatcctgcacaaatacaatacagaaaacagaaagtacagaacnatgttatttggggtacaaatataaacaatacagtaccatttgagtnactgagcaacataatacccatactttatagaaataaaactgcaaacctggagaatgctctgacaaatattaaacattatatacncnatgaggtaaatgttccttggtctcttganaagttatttaagttttaanccattgacttttgaaacntctcccttacntttnaa

SEQ ID NO: 9875 - DNA, 475 bp, Homo sapiens
  misc_feature (2)..(2): "n" may be a, t, c, g, other or unknown
  misc_feature (67)..(67): "n" may be a, t, c, g, other or unknown
  misc_feature (74)..(74): "n" may be a, t, c, g, other or unknown
  misc_feature (98)..(98): "n" may be a, t, c, g, other or unknown
  misc_feature (106)..(106): "n" may be a, t, c, g, other or unknown
  misc_feature (108)..(108): "n" may be a, t, c, g, other or unknown
  misc_feature (153)..(153): "n" may be a, t, c, g, other or unknown
  misc_feature (197)..(197): "n" may be a, t, c, g, other or unknown
  misc_feature (221)..(221): "n" may be a, t, c, g, other or unknown
  misc_feature (247)..(247): "n" may be a, t, c, g, other or unknown
  misc_feature (251)..(251): "n" may be a, t, c, g, other or unknown
  misc_feature (254)..(254): "n" may be a, t, c, g, other or unknown
  misc_feature (256)..(256): "n" may be a, t, c, g, other or unknown
  misc_feature (268)..(268): "n" may be a, t, c, g, other or unknown
  misc_feature (327)..(327): "n" may be a, t, c, g, other or unknown
  misc_feature (348)..(348): "n" may be a, t, c, g, other or unknown
  misc_feature (381)..(381): "n" may be a, t, c, g, other or unknown
  misc_feature (395)..(395): "n" may be a, t, c, g, other or unknown
  misc_feature (403)..(403): "n" may be a, t, c, g, other or unknown
  misc_feature (411)..(411): "n" may be a, t, c, g, other or unknown
  misc_feature (415)..(415): "n" may be a, t, c, g, other or unknown
  misc_feature (429)..(429): "n" may be a, t, c, g, other or unknown
  misc_feature (469)..(469): "n" may be a, t, c, g, other or unknown
antttaaaaacaacaagcatcctttattctccttccaatctcagtgtccaaaagctacggttaacangttttcnaagtgcaaatcatttcattcctcnaaagccanangggaataaaaactgtacatcatctccaatccatattcatcaggancgccctggggcttgtcatcctgctggcacggggccaggtttcanggcctggcggaaaaaagtctgtangctttgggacttggtgtctggccccntganatnanattagttctccnataacctgaatgcctcttggggaggcggcagcacgcaggcgtataatccctctagacanccagatcgggcgtgggtggantttaaaccccacgatgttctaacagccacaatnaaaactgggggttngaagttanaacctctnaacnagaattgggatttncccaagggaataagggggtttaaataatccaaaaggcccnaccatt

SEQ ID NO: 9876 - DNA, 471 bp, Homo sapiens
  misc_feature (428)..(428): "n" may be a, t, c, g, other or unknown
  misc_feature (430)..(430): "n" may be a, t, c, g, other or unknown
  misc_feature (450)..(450): "n" may be a, t, c, g, other or unknown
  misc_feature (453)..(453): "n" may be a, t, c, g, other or unknown
  misc_feature (455)..(455): "n" may be a, t, c, g, other or unknown
  misc_feature (462)..(462): "n" may be a, t, c, g, other or unknown
  misc_feature (464)..(464): "n" may be a, t, c, g, other or unknown
acattttaaagacatttttattgagctaattttaacaacattgctttagctggtgacagctgccccaaaccaaaacaaagccatcatgaatgctattcaacatcctcaatgtaatccagtatgtttttgtacttggaatatagttaaacttttgacattacataatcaagcaaatagcagtgcatactatattattcaaaaagactttatctatttcatttaaaaaatcaagttgcaagtggcctcagctttatcaacaatcgtagtgacacattccacacttcatgctctcaaaataaaaagtgccctaaaactaactctaagttttttagtcactgacattaatactaaccaggttacaggaattgaagtttaacattgtacaatataagcggcaataagttactgatatctgctgacaaattccncnccaactaaatatatcctganacntncaaaaananatttggt

SEQ ID NO: 9877 - DNA, 560 bp, Homo sapiens
  misc_feature (191)..(191): "n" may be a, t, c, g, other or unknown
  misc_feature (263)..(263): "n" may be a, t, c, g, other or unknown
  misc_feature (437)..(437): "n" may be a, t, c, g, other or unknown
  misc_feature (470)..(470): "n" may be a, t, c, g, other or unknown
  misc_feature (489)..(489): "n" may be a, t, c, g, other or unknown
  misc_feature (522)..(522): "n" may be a, t, c, g, other or unknown
  misc_feature (528)..(528): "n" may be a, t, c, g, other or unknown
  misc_feature (544)..(545): "n" may be a, t, c, g, other or unknown
  misc_feature (554)..(554): "n" may be a, t, c, g, other or unknown
cacagaacatacttaattttttattttgaaattccctattccctctatacaagaaactttgctgaaacagtttccacaaaggcagcagtgaattttcagaaacatttacattttttccccctcagcaaaaagataaatcacagtgtaaattatgttgttctgctgtcatctttggctggggttagacccanaagttggtgactagcaaaccaatatagccaaatgttgctagtgctccttaggcctttaagctataaactcancaaggaatgtctgcattttatctctttaaggtaccaccaggggggtatgacagcattaacttccataaacttttatagacaaatggaaaaaaatctacaaaatttgctagtaatattacacagcaatacacactttttatactctacacaaaaccaaaattcttggtcttaatngcgaattacaattctgtttgaaaatctgtttanaagaataaaatggaagttnattccaaaaatgccattttttcccttagaaaantttggncccccggtggcccatnntaataaggngaaggc

SEQ ID NO: 9878 - DNA, 582 bp, Homo sapiens
  misc_feature (45)..(45): "n" may be a, t, c, g, other or unknown
  misc_feature (62)..(62): "n" may be a, t, c, g, other or unknown
  misc_feature (71)..(71): "n" may be a, t, c, g, other or unknown
  misc_feature (90)..(90): "n" may be a, t, c, g, other or unknown
  misc_feature (146)..(146): "n" may be a, t, c, g, other or unknown
  misc_feature (165)..(165): "n" may be a, t, c, g, other or unknown
  misc_feature (444)..(444): "n" may be a, t, c, g, other or unknown
  misc_feature (499)..(500): "n" may be a, t, c, g, other or unknown
  misc_feature (513)..(513): "n" may be a, t, c, g, other or unknown
  misc_feature (521)..(521): "n" may be a, t, c, g, other or unknown
  misc_feature (545)..(545): "n" may be a, t, c, g, other or unknown
  misc_feature (555)..(555): "n" may be a, t, c, g, other or unknown
  misc_feature (572)..(572): "n" may be a, t, c, g, other or unknown
gagtgaacaatttttattgaaaccctccaagattaaagaggaccnaatggtgagtttgggtnccataacanaaaatctcacctaactgtnccatcattcacaggaatgaacaaacccaaacacgacaaaattcaaattctcatgtnattgctacaagtgaatgtnaatgaactaatcattttatcataaccttcctttaatcatacgaaaaagggaatttacatggcataacaaaagatatgcaaaacttaatgaaaacacaattctcttaaatttcttaaacttatttttaaaggatgcagaatgcacttgaaatgattaaatgacttaagctgattcatttttttttattgcaaactgttttaacatcagcttaacccccatgcacggtattcaaaaagaacacagctttcgaattagaaagatcacttaaattaaaaaganaaattaagttctaaaattaggaaaacgctggaattccttttgaaaggaatctccnnttccattcttttnaaaaatcnaattttggttacggttcccccctnccggttaatntccaactttattccctnccaattaatt

SEQ ID NO: 9879 - DNA, 582 bp, Homo sapiens
  misc_feature (75)..(75): "n" may be a, t, c, g, other or unknown
  misc_feature (156)..(156): "n" may be a, t, c, g, other or unknown
  misc_feature (203)..(203): "n" may be a, t, c, g, other or unknown
  misc_feature (233)..(233): "n" may be a, t, c, g, other or unknown
  misc_feature (525)..(525): "n" may be a, t, c, g, other or unknown
  misc_feature (540)..(540): "n" may be a, t, c, g, other or unknown
  misc_feature (544)..(544): "n" may be a, t, c, g, other or unknown
  misc_feature (562)..(562): "n" may be a, t, c, g, other or unknown
  misc_feature (567)..(567): "n" may be a, t, c, g, other or unknown
  misc_feature (570)..(571): "n" may be a, t, c, g, other or unknown
gacttatatcttataggatttatcacaaaatgttactgcccagtgcatttttgcaaacaataacaattcactganagtaataacattcacatatgtaattagagtttaaaaatgtaaaaaacttagggtaacaaacactttaaacttattttttanacattcaataagcccattctcccacaaactgtttgattacaaagaancacaatgggttaactgtggcaaaacataanaaataaggcaggggaggcagatacagacttgagaacataaggatatccaaacaattttgtcaatatcaaaagacaaaatcaaaacatcttttataatataaaacaaatccatataattaaatactaattaggtgaaagattatagggtatataacatttattttctctacataaatttgcatatcttaaatttaatgcaaaacatcatgtttcaacttccacttaacatcataacatgttattcctggggaatccaaaatttatggaatgaatatttaaattgactcccaanatccaaccagttttnattnggttatggtggccttaantcctnaanncttcccttttt

SEQ ID NO: 9880 - DNA, 578 bp, Homo sapiens
  misc_feature (36)..(36): "n" may be a, t, c, g, other or unknown
  misc_feature (64)..(64): "n" may be a, t, c, g, other or unknown
  misc_feature (88)..(88): "n" may be a, t, c, g, other or unknown
  misc_feature (375)..(375): "n" may be a, t, c, g, other or unknown
  misc_feature (485)..(485): "n" may be a, t, c, g, other or unknown
  misc_feature (512)..(512): "n" may be a, t, c, g, other or unknown
  misc_feature (576)..(576): "n" may be a, t, c, g, other or unknown
gctgttgttgcttgtgcttttggtgccatatctaanaaacattgccaaatccaaggtcatgaanatttattcctgtattttcttctcnaagttttatggttttagctcttacatttaggtctttgatctattttgaattaatttttatatatggtatgaagtacaggtacaaattcattcttttgcatgtgaatattcacttgtcttagcactattagttgaagacactgttctttcttcattgaatggtcctggaacccttgtcaaaaatcaattgaccatagtgtattggcgtaatttgtttctggactttccattctactctattgctttatatatttttataccagcacaacactgttttgattgaagtanctttgcagtaaattttgaaattggaaaatgtgaatccttcaactttattcttgttccagatgttttgaacagacttgaattcctccgttacttgcaatccctataattcnagggtcggctttccatttctgttaaanggtcctggaatttaatggggaagttttaatccttaaaaaatttgggaattagccccctaacaantt

SEQ ID NO: 9881 - DNA, 588 bp, Homo sapiens
  misc_feature (32)..(32): "n" may be a, t, c, g, other or unknown
  misc_feature (60)..(60): "n" may be a, t, c, g, other or unknown
  misc_feature (341)..(341): "n" may be a, t, c, g, other or unknown
  misc_feature (412)..(412): "n" may be a, t, c, g, other or unknown
  misc_feature (440)..(440): "n" may be a, t, c, g, other or unknown
  misc_feature (509)..(509): "n" may be a, t, c, g, other or unknown
  misc_feature (511)..(511): "n" may be a, t, c, g, other or unknown
  misc_feature (540)..(540): "n" may be a, t, c, g, other or unknown
  misc_feature (554)..(554): "n" may be a, t, c, g, other or unknown
  misc_feature (572)..(572): "n" may be a, t, c, g, other or unknown
  misc_feature (577)..(577): "n" may be a, t, c, g, other or unknown
  misc_feature (587)..(587): "n" may be a, t, c, g, other or unknown
acataaaattatctcactccattttatttaanatttttttatccagttagtaaaaggaanatgtgtctctctttatacatatgtacaagttcagttataaaaatagcacattcaaagagaaaaggcttggcatttttctgattccctctaaatagcatctgtacacaggaatctgggtttgagcaggggaatcttaatgatttaaattaaatgattcccctataccccctactccaaaaaagttttaaaaatcaatctatcgaaactcaattccgcgattttcaggtgtgcaaatcaaaggcttgcccgcccggaggtacctgctccaccagggacatcangcagggacaggcagaaacacctcccatgcaaacactgcccctctgtctctactggagggcagcaaactcangctggccgggctgggaaggccggtgccnaacctgcccctctctccgccctcttcacctcaatcctgctgtcccttcctctctcattgcaatataaanantgcatacacccaaccagggaatgaagggnttaccaggaaaatnttcttccggatgggcaangggantctccaaaang

SEQ ID NO: 9882 - DNA, 456 bp, Homo sapiens
  misc_feature (48)..(48): "n" may be a, t, c, g, other or unknown
  misc_feature (403)..(403): "n" may be a, t, c, g, other or unknown
  misc_feature (406)..(406): "n" may be a, t, c, g, other or unknown
  misc_feature (419)..(419): "n" may be a, t, c, g, other or unknown
  misc_feature (423)..(423): "n" may be a, t, c, g, other or unknown
  misc_feature (431)..(431): "n" may be a, t, c, g, other or unknown
  misc_feature (446)..(446): "n" may be a, t, c, g, other or unknown
  misc_feature (453)..(453): "n" may be a, t, c, g, other or unknown
cataacttttcatagaaaaatataaatatattccctgaattgtaaganaaaaaaataattttaacagccagctttcaccataaatgccagtccatttcctcttaaatgaactggctttccctcaaggtcataaggtgcaaccattgaaatctaacacattttctaaacttctgtcatcatccccatcatggtatctcacagtccttctaccctgatttctcgtttttatttttgaacgtcgaaaaactcttttagattttgcatagtccaaatcctcccagtcattatcatccacacttaacctagggcgtttgctttgtctttgacgtctcacagttttagatatgttagctgtaaaagttttaccttttctaactacttttgcttttcctttcgttttccnccntttgggttttgtnttanccgtacantccaaatctgaatcnatttccnaat

SEQ ID NO: 9883 - DNA, 509 bp, Homo sapiens
  misc_feature (5)..(8): "n" may be a, t, c, g, other or unknown
  misc_feature (277)..(277): "n" may be a, t, c, g, other or unknown
  misc_feature (306)..(306): "n" may be a, t, c, g, other or unknown
  misc_feature (340)..(340): "n" may be a, t, c, g, other or unknown
  misc_feature (442)..(442): "n" may be a, t, c, g, other or unknown
  misc_feature (453)..(453): "n" may be a, t, c, g, other or unknown
  misc_feature (461)..(461): "n" may be a, t, c, g, other or unknown
  misc_feature (470)..(470): "n" may be a, t, c, g, other or unknown
  misc_feature (480)..(480): "n" may be a, t, c, g, other or unknown
  misc_feature (498)..(498): "n" may be a, t, c, g, other or unknown
  misc_feature (502)..(502): "n" may be a, t, c, g, other or unknown
atttnnnngcacatcccttttcactttacagtacatttgactatagtgcacaacatgattccgagtcaaaacagtggcccattgggcactgagcttctgattggtgtaaggcagtccaatcagtgctggtgtcactgggttaccccaaccatgtccggccaaaatggcactacccagtggtagtgaaccatctaattaaaaccaaaactcccccagggaaaatgctacactatcagagtcagtcttgagtcagatctttatttggtgctccatccanatatatttttagtgctttctctttacgangtgagtatgttacacgatgtccagtcttctggantcgactgctttcttttttcatcagttcatttctttgctcatctgtcaattccattaattcttctgttttatccctataaaatatgaccgccccctcctcccngatattaagangcccaaantcccgggtnaaaactttangaatcccctccaaatccngaanaaaatcc

SEQ ID NO: 9884 - DNA, 423 bp, Homo sapiens
  misc_feature (345)..(345): "n" may be a, t, c, g, other or unknown
  misc_feature (362)..(362): "n" may be a, t, c, g, other or unknown
  misc_feature (372)..(372): "n" may be a, t, c, g, other or unknown
  misc_feature (392)..(392): "n" may be a, t, c, g, other or unknown
  misc_feature (398)..(398): "n" may be a, t, c, g, other or unknown
  misc_feature (406)..(406): "n" may be a, t, c, g, other or unknown
  misc_feature (417)..(417): "n" may be a, t, c, g, other or unknown
aatctcaagctgcttttattacagaagtaatacatgttttgtacggaaaatgtagaaaacttagaaaagctcaaacaaacataaaaatcacatattaacccagtacctagaaggaaccactgttatcactctgcagtttaccttcaagtatttttctacacacgcacacaaaaaatatatacatcttatttttcaatcttattttttcagttatgtagtgaaacagcttttctggcgtacagcctacgaacttgagcgcttgtgtggattttgtcctcacaaccacagccagcatacacacagctctgccacccaaaacactcttcaccctttctctggtggtcntgcctccccgaaccccngcctctccanccaccgatctgggtctccanccccanggtctgtnttctttttganaatatc

SEQ ID NO: 9885 - DNA, 546 bp, Homo sapiens
  misc_feature (207)..(207): "n" may be a, t, c, g, other or unknown
  misc_feature (220)..(220): "n" may be a, t, c, g, other or unknown
  misc_feature (280)..(280): "n" may be a, t, c, g, other or unknown
  misc_feature (299)..(299): "n" may be a, t, c, g, other or unknown
  misc_feature (388)..(388): "n" may be a, t, c, g, other or unknown
  misc_feature (405)..(405): "n" may be a, t, c, g, other or unknown
  misc_feature (429)..(429): "n" may be a, t, c, g, other or unknown
  misc_feature (488)..(488): "n" may be a, t, c, g, other or unknown
  misc_feature (493)..(493): "n" may be a, t, c, g, other or unknown
  misc_feature (498)..(498): "n" may be a, t, c, g, other or unknown
  misc_feature (518)..(518): "n" may be a, t, c, g, other or unknown
  misc_feature (524)..(524): "n" may be a, t, c, g, other or unknown
  misc_feature (527)..(527): "n" may be a, t, c, g, other or unknown
  misc_feature (529)..(529): "n" may be a, t, c, g, other or unknown
aagattaaaaaatgctttaatactgctgaagtctttcaattctagagcaggcatagaatatatagaatgtttaccttatgaccagatacaacctcccaagaaaaactggatcctgcagggcagctggtcttcacagttcctgctgggactacagttgcagaagtcattccatcacttttctctttttaagggagttaagtacaggtnaaggaactcttcnagcaaagatcttaataatctcttgattatcgatgtccgtggaggctttttaatccttccnttgcttctgcattcttganccttggcttctttcactcactctctcctaattctcctgtctttctgaatgggccattccagttttcaataggtgacttctatttctccngtgttggtgttgcctanggttctgttgtgtgcatttctganatatattaacactccgggaaatcttattgacaaatcccccattacttaaacattgtcanttccnggccnaaatccctattttaactccnggtccnaancnccactttatgggctttg

SEQ ID NO: 9886 - DNA, 557 bp, Homo sapiens
  misc_feature (258)..(258): "n" may be a, t, c, g, other or unknown
  misc_feature (363)..(363): "n" may be a, t, c, g, other or unknown
  misc_feature (384)..(384): "n" may be a, t, c, g, other or unknown
  misc_feature (390)..(390): "n" may be a, t, c, g, other or unknown
  misc_feature (393)..(393): "n" may be a, t, c, g, other or unknown
  misc_feature (395)..(395): "n" may be a, t, c, g, other or unknown
  misc_feature (399)..(399): "n" may be a, t, c, g, other or unknown
  misc_feature (418)..(418): "n" may be a, t, c, g, other or unknown
  misc_feature (492)..(492): "n" may be a, t, c, g, other or unknown
  misc_feature (510)..(510): "n" may be a, t, c, g, other or unknown
  misc_feature (526)..(526): "n" may be a, t, c, g, other or unknown
  misc_feature (529)..(529): "n" may be a, t, c, g, other or unknown
  misc_feature (546)..(546): "n" may be a, t, c, g, other or unknown
  misc_feature (548)..(548): "n" may be a, t, c, g, other or unknown
  misc_feature (551)..(551): "n" may be a, t, c, g, other or unknown
gaaatggtactgaatatatttgttacatcctgaatcaacccaatagactatcttgtaaacaaaatagtaaggtaacacttcaaaaacagatgaacaatttatccaccaagaatgtatatagtaagccaaaagctcactgtggaaatacacttagcatggttattagaaaatcacaaagagtaatgtaacaagttaccaaattttatggtcatgttctgcttgataattcaaataggatggatggtagttactagtttnctatttgtgttgttttaacatctccattgatttttaatgctttattttttatttgaatttgctggctggcaggtttgctttgcttaatacattgactgcaacacncttattgttgtgtttgggtanaataanacntncganaatattttttaaaggcctntggaaggttccatggaaaaatccgaatactccataaccctgccgttccaaaattccactgaatgcctgttattngggcaccaacggaccctngttggcaggttttttnctncaaaacaatggttggtntnccncctgct

SEQ ID NO: 9887 - DNA, 553 bp, Homo sapiens
  misc_feature (175)..(175): "n" may be a, t, c, g, other or unknown
  misc_feature (248)..(248): "n" may be a, t, c, g, other or unknown
  misc_feature (254)..(254): "n" may be a, t, c, g, other or unknown
  misc_feature (364)..(364): "n" may be a, t, c, g, other or unknown
  misc_feature (373)..(373): "n" may be a, t, c, g, other or unknown
  misc_feature (375)..(375): "n" may be a, t, c, g, other or unknown
  misc_feature (394)..(394): "n" may be a, t, c, g, other or unknown
  misc_feature (418)..(418): "n" may be a, t, c, g, other or unknown
  misc_feature (444)..(444): "n" may be a, t, c, g, other or unknown
  misc_feature (473)..(473): "n" may be a, t, c, g, other or unknown
  misc_feature (486)..(486): "n" may be a, t, c, g, other or unknown
  misc_feature (511)..(511): "n" may be a, t, c, g, other or unknown
  misc_feature (515)..(515): "n" may be a, t, c, g, other or unknown
  misc_feature (523)..(523): "n" may be a, t, c, g, other or unknown
  misc_feature (539)..(539): "n" may be a, t, c, g, other or unknown
  misc_feature (549)..(549): "n" may be a, t, c, g, other or unknown
actgaatacaaccctcccccgtgaaagccaagctgggtaatgctcttgtctcccaggatggtgttgcaggatgttgcaaaatggaacagtaataaaaaaccactacctcattatctcatcatctgctggagccaggcaaatagcttcctgattgaagctcaacaaaaggtgagangtcccttgggttgctgtgtacctaaaagctctcccatatctcagactgcaaactacctgtttttcgtgcaganagaaangcctctaggttccaggttctggactttgcctttaagcagattggctttgccagaatgtctccttttcttatcacttaatgctgttgcctcccagaactgatacttcccanataacccanancaaatgtgaaaaagcacancatgccctgagaacgatttctaanaaactgcatggactccatcatctaanaacattacatgttggtctcctatacttcntaaccagccagcntactccgaatatctgaaattagttnctcntatatttncagggttgtttccccncctgttcctnatat

SEQ ID NO: 9888 - DNA, 492 bp, Homo sapiens
  misc_feature (56)..(56): "n" may be a, t, c, g, other or unknown
  misc_feature (83)..(83): "n" may be a, t, c, g, other or unknown
  misc_feature (114)..(114): "n" may be a, t, c, g, other or unknown
  misc_feature (160)..(160): "n" may be a, t, c, g, other or unknown
  misc_feature (312)..(312): "n" may be a, t, c, g, other or unknown
  misc_feature (331)..(331): "n" may be a, t, c, g, other or unknown
  misc_feature (379)..(379): "n" may be a, t, c, g, other or unknown
  misc_feature (417)..(417): "n" may be a, t, c, g, other or unknown
  misc_feature (425)..(425): "n" may be a, t, c, g, other or unknown
  misc_feature (440)..(440): "n" may be a, t, c, g, other or unknown
  misc_feature (460)..(460): "n" may be a, t, c, g, other or unknown
  misc_feature (466)..(466): "n" may be a, t, c, g, other or unknown
  misc_feature (471)..(471): "n" may be a, t, c, g, other or unknown
  misc_feature (487)..(487): "n" may be a, t, c, g, other or unknown
aaaaacatgttaagatgttttatttcttaatcagctaatttgactgggaaacaaanatgccttttattcacattttctttgantcgtgttactgtagtaaaggttccccacaanatttggcctttgctcacaagttttgcggctgccaattagtttccanagtcgctattttacaaaaatgcttctcacttttaaaaaatgtaattgaatgtctgttcatcacagagtttcttgtgttcaagcccagggtgttaaacatttttcaggttgacttgggtcagctttgaaaaatttcagacagtgaaacttganaagggaccgtatgctatantgtgttcctcacatcctgttaagtattaagtggatatttaaaatgganttgttatcctcttgactgacttaaagtgagccatatantttaccanactattaattaaatnaaaaaaatgcctgggatgcncatttntttcntaatcatcccattggncccga

SEQ ID NO: 9889 - DNA, 441 bp, Homo sapiens
  misc_feature (311)..(311): "n" may be a, t, c, g, other or unknown
  misc_feature (323)..(323): "n" may be a, t, c, g, other or unknown
  misc_feature (331)..(331): "n" may be a, t, c, g, other or unknown
  misc_feature (363)..(363): "n" may be a, t, c, g, other or unknown
  misc_feature (371)..(371): "n" may be a, t, c, g, other or unknown
  misc_feature (384)..(384): "n" may be a, t, c, g, other or unknown
  misc_feature (405)..(405): "n" may be a, t, c, g, other or unknown
  misc_feature (431)..(431): "n" may be a, t, c, g, other or unknown
  misc_feature (436)..(437): "n" may be a, t, c, g, other or unknown
aagcttaccctgtaatttttaataactttataaggagcaaatgtgtcaccttaaaaatgtaccagtggcatttacaaattccttcaaactcatttacaaatacagtaataaaaattcctgagctcccttttcttacaccagtattcaccaatcaacatccatgcggtgttttatttgacccacatcctctttccttttcttaagaaaatattttatcacattcgtaaaagtatctgtgcttcaagtcagtttgtaagtatctgtttttaatgtgaatctgatgataacaagagaaaaatgcttaacattancaggggcagcangaattgangggtggtgtgggggacaatggaaggaaatatnaataccanaattccagtttangtgttgggacttccaaggtanaatacatctgacaatatcaaaaacanactcnntttc

SEQ ID NO: 9890 - DNA, 579 bp, Homo sapiens
  misc_feature (92)..(92): "n" may be a, t, c, g, other or unknown
  misc_feature (101)..(101): "n" may be a, t, c, g, other or unknown
  misc_feature (105)..(105): "n" may be a, t, c, g, other or unknown
  misc_feature (116)..(116): "n" may be a, t, c, g, other or unknown
  misc_feature (119)..(119): "n" may be a, t, c, g, other or unknown
  misc_feature (126)..(126): "n" may be a, t, c, g, other or unknown
  misc_feature (352)..(352): "n" may be a, t, c, g, other or unknown
  misc_feature (378)..(378): "n" may be a, t, c, g, other or unknown
  misc_feature (381)..(381): "n" may be a, t, c, g, other or unknown
  misc_feature (397)..(397): "n" may be a, t, c, g, other or unknown
  misc_feature (430)..(430): "n" may be a, t, c, g, other or unknown
  misc_feature (444)..(444): "n" may be a, t, c, g, other or unknown
  misc_feature (477)..(477): "n" may be a, t, c, g, other or unknown
  misc_feature (531)..(531): "n" may be a, t, c, g, other or unknown
  misc_feature (535)..(535): "n" may be a, t, c, g, other or unknown
  misc_feature (539)..(539): "n" may be a, t, c, g, other or unknown
  misc_feature (547)..(547): "n" may be a, t, c, g, other or unknown
  misc_feature (578)..(578): "n" may be a, t, c, g, other or unknown
ctggtaaaactgtagtttatttatcaaaaaatgtgaatttttattttagaaatgtaggtcaagcattgtcatagttgtagtacttaattganaataatggnttcnatttggaagantcnatatacncattaaacaaaattaaacagtttaaattataattcataataattataattctcatttttagatggccaaaatatattgttttcttactataaagtgttatttattcatcgtctatttttactaattatattcaattcacagtagtgacatcaaagggacaagtcatcataggtctgagaccaggaaaacctggtctgttttaacagaagcgtgtctaaaataaaantacatatttcaattaggccccccganatngaaaagaacccggatnatccttgtttttgaaggcctgaattccagtttnaatgttattccttncgccccctgaaataattaaaaatttgcccatanggtcggtgctatttaaggcgggttcaaccccttttgaaatttaccacttaaaanttcncctntggaaaanaaaaaaaaaattttgacgttttggttaaaana

SEQ ID NO: 9891 - DNA, 522 bp, Homo sapiens
  misc_feature (6)..(6): "n" may be a, t, c, g, other or unknown
  misc_feature (8)..(8): "n" may be a, t, c, g, other or unknown
  misc_feature (27)..(27): "n" may be a, t, c, g, other or unknown
  misc_feature (34)..(34): "n" may be a, t, c, g, other or unknown
  misc_feature (43)..(43): "n" may be a, t, c, g, other or unknown
  misc_feature (78)..(78): "n" may be a, t, c, g, other or unknown
  misc_feature (120)..(120): "n" may be a, t, c, g, other or unknown
  misc_feature (129)..(129): "n" may be a, t, c, g, other or unknown
  misc_feature (172)..(172): "n" may be a, t, c, g, other or unknown
  misc_feature (343)..(343): "n" may be a, t, c, g, other or unknown
  misc_feature (395)..(395): "n" may be a, t, c, g, other or unknown
  misc_feature (427)..(427): "n" may be a, t, c, g, other or unknown
  misc_feature (452)..(452): "n" may be a, t, c, g, other or unknown
  misc_feature (455)..(455): "n" may be a, t, c, g, other or unknown
  misc_feature (459)..(459): "n" may be a, t, c, g, other or unknown
  misc_feature (473)..(473): "n" may be a, t, c, g, other or unknown
  misc_feature (484)..(484): "n" may be a, t, c, g, other or unknown
  misc_feature (513)..(513): "n" may be a, t, c, g, other or unknown
agatanantttcgctcttgtcacccangctggantgcaatggnacaatctcagctcactgtaacctctgcctcctganttcaagcgaatttcctgcctcagcctcctgaataactaggantacaagggnctgccaccatgcctggctaattttttgtatttatagtaaaaantaagtttcaccatgttgggcaggccggtcttgaactcctgacctcagataatccacctgcctcggccccccaaatttctgggattacaggtgtgagccaccatgcccggccagttttctttttttaataatatctttgcctatcttttgtatcataattctggcctcatancgggagaaagaaattatccctcctcctttagttttctggaatattttatgtnaaattggtattatttcttccctaaatgtttanttaaaattgcccaccaaaccctctnggntttnaattttcctttttnaataatcccanttttttaaaattgttttcctttaaaaaanaaaagggaa

SEQ ID NO: 9892 - DNA, 519 bp, Homo sapiens
  misc_feature (149)..(149): "n" may be a, t, c, g, other or unknown
  misc_feature (276)..(276): "n" may be a, t, c, g, other or unknown
  misc_feature (339)..(339): "n" may be a, t, c, g, other or unknown
  misc_feature (373)..(373): "n" may be a, t, c, g, other or unknown
  misc_feature (376)..(376): "n" may be a, t, c, g, other or unknown
  misc_feature (386)..(386): "n" may be a, t, c, g, other or unknown
  misc_feature (402)..(402): "n" may be a, t, c, g, other or unknown
  misc_feature (431)..(431): "n" may be a, t, c, g, other or unknown
  misc_feature (437)..(437): "n" may be a, t, c, g, other or unknown
  misc_feature (467)..(467): "n" may be a, t, c, g, other or unknown
  misc_feature (478)..(478): "n" may be a, t, c, g, other or unknown
  misc_feature (485)..(486): "n" may be a, t, c, g, other or unknown
  misc_feature (514)..(514): "n" may be a, t, c, g, other or unknown
ggcaactttctggtattacttgtaaacactggttccttcaactttctgatattacttgtaaacactggttccttctcaaccaccgtattctgattgggtctataagtagcacccagtccacaccacagcacgcttctggggtccagganaccgccttcactactgtgctggccccgcctgtgtacgggccccggggccgggccatccaaggtgcctgtggtgctcacacccccatggcgctcttctcgctgtctttggggctgggctcctccggantcttcttcatctcccaacccctgaaccaagtgtatgcggaagaccgcccaacaccatcatttnctcctccacaaaaagaaactcttggtctcccccntantaaaacaacnggccaacaattttctnggcacaaaggcctttggccgtgccccaanaatttnttggttcaccggaatggttaaaattaaatnttccattcctntcccttnncccaatgggcaaaacccaaaaagggccncccaa

SEQ ID NO: 9893 - DNA, 568 bp, Homo sapiens
  misc_feature (283)..(283): "n" may be a, t, c, g, other or unknown
  misc_feature (481)..(481): "n" may be a, t, c, g, other or unknown
  misc_feature (501)..(501): "n" may be a, t, c, g, other or unknown
  misc_feature (505)..(505): "n" may be a, t, c, g, other or unknown
  misc_feature (512)..(512): "n" may be a, t, c, g, other or unknown
  misc_feature (541)..(541): "n" may be a, t, c, g, other or unknown
  misc_feature (556)..(556): "n" may be a, t, c, g, other or unknown
  misc_feature (567)..(567): "n" may be a, t, c, g, other or unknown
gcttccaaatgcaattcttttaataaacagtaacaaattctctgttaagatgtttaaactgagagaaaaaaaaaacccagtaaatccagcttttaaaagaaaattcaataaatagctattttacatggataaagtcatagtggtacaatttatgaatgtcacatcaagcatgcacaaaaatggtattatacatggcagaagtagtcagaaaatattgaattagatctaaaaagatatgaagaatttacacttatatacaaaaatcttgcaaattattgcctcnttttaacaaggaattaaaagtaaacattaccagctagttagcactctctaagaagggtaaaatcagattgacatttaaaaatctattaaactagctggaatttatttttctctcataccattttccgggattttgggccaaaatctttatttaaataactaaaagtgtccatccacttgctgataatccaaactttanataaaaaacctggtttcccncttntttccanaacccccccatggcttaaataactgaatnttttctgctcccccncgaaaaagggng

SEQ ID NO: 9894 - DNA, 589 bp, Homo sapiens
  misc_feature (70)..(70): "n" may be a, t, c, g, other or unknown
  misc_feature (185)..(185): "n" may be a, t, c, g, other or unknown
  misc_feature (285)..(285): "n" may be a, t, c, g, other or unknown
  misc_feature (331)..(331): "n" may be a, t, c, g, other or unknown
  misc_feature (436)..(436): "n" may be a, t, c, g, other or unknown
  misc_feature (494)..(494): "n" may be a, t, c, g, other or unknown
  misc_feature (500)..(500): "n" may be a, t, c, g, other or unknown
  misc_feature (513)..(513): "n" may be a, t, c, g, other or unknown
  misc_feature (542)..(542): "n" may be a, t, c, g, other or unknown
  misc_feature (545)..(545): "n" may be a, t, c, g, other or unknown
  misc_feature (578)..(578): "n" may be a, t, c, g, other or unknown
  misc_feature (589)..(589): "n" may be a, t, c, g, other or unknown
ctctttttttttttttttgagacagtttcattctgtcacccaggctggagtgcagtgttgcaatcttggntcactgcaacctctgcctcccaggttcaagcgatcctctcaccttggccacccgagtagctgggattacaggcatatgacaccatacccagctaatttttttgtagtttcagtanaaatggggtctcaccatgctggccaggctggtcttgaactcctgacctcaagtgatacactctcctcggcctccaaaagtgctaggattacaggcttgancactgcatccagccactctttttgatttcttacagttcatatgaanagaaacaaatttgtgcaatgaaatgtccatgaaacaatttaaacccttcacaaattttagaaagaaactaaggacagggattttttttatgttacactaaccccnaagcattatctttatacactaaatgcattatgctatagtaagaataaattccaatacngctatnttttttttaaaangccaattggaaaaaatttgtttctccctnaanaaccccccttttcccgattatccctccttaaanccaagggcccn

SEQ ID NO: 9895 - DNA, 581 bp, Homo sapiens
  misc_feature (5)..(5): "n" may be a, t, c, g, other or unknown
  misc_feature (34)..(34): "n" may be a, t, c, g, other or unknown
  misc_feature (42)..(42): "n" may be a, t, c, g, other or unknown
  misc_feature (54)..(54): "n" may be a, t, c, g, other or unknown
  misc_feature (77)..(77): "n" may be a, t, c, g, other or unknown
  misc_feature (98)..(98): "n" may be a, t, c, g, other or unknown
  misc_feature (149)..(149): "n" may be a, t, c, g, other or unknown
  misc_feature (171)..(171): "n" may be a, t, c, g, other or unknown
  misc_feature (191)..(191): "n" may be a, t, c, g, other or unknown
  misc_feature (450)..(450): "n" may be a, t, c, g, other or unknown
  misc_feature (486)..(486): "n" may be a, t, c, g, other or unknown
  misc_feature (550)..(550): "n" may be a, t, c, g, other or unknown
  misc_feature (554)..(554): "n" may be a, t, c, g, other or unknown
  misc_feature (561)..(561): "n" may be a, t, c, g, other or unknown
  misc_feature (563)..(563): "n" may be a, t, c, g, other or unknown
  misc_feature (579)..(580): "n" may be a, t, c, g, other or unknown
gaganagtgtctcgctctgttgcacaggctggancacagtancgccacctcggntcactgcaacctccacctcccangttcaagcgaattgctgggantacgggtgcataccaacatgccctgctaatttctgtatttttagcaaaaanagggttttaccatgttggccangctgttcttgaattcctganctcaggtgatccgcccacctcgaccacccaaagtgctgggattacaggcgtgagccactgcgcccagcaaattcttacttttcatatgttgaacgtgcatgcaagtgtgatcctctagttttcttattttctcccactttacaactctttttgtcctcctccgtgggagttttctcaactttatcttccaaccctctaagaatttaatattctgaatttccaactcttctatgaagtgtttcatattctaaatttctanaaactcttgttttctgggcctgctttttcataacancctttcttgtttcaaaaatcaatacctttattctgaaaaaacatttacttttttacaaaacttntccncccctgnantttttccattcccccnnc

SEQ ID NO: 9896 - DNA, 472 bp, Homo sapiens
  misc_feature (466)..(472): "n" may be a, t, c, g, other or unknown
gactttaatgatgttcatttatttaaacgatctgtatgaatttggtgattttgtggatacgcccctgacagacaaggattcacagccgacggaagtcagggaggctccctgcaaattcttcatctccgcggggcctgcccgagccctgatcctgcagagccgtggggctgaggtagccgccggttgtggtccaggagtgcgtctttctggatgcggggcaccttcatttcaccgtagcaaccgggtaccaaaagtagaagcggatttttggaaaatgagtcattaggtcccaaagagaacctattgcaacatggactccataacgttcttgaggatcatcctgagaaactgatgtctctcgttagacaaaaatgcacgatttgcttgggaaaggggagtaaaaatggtgctggcatccattggctggctgggaacttgaaccagcagctccaacaagcgacatgtnnnnnnn

SEQ ID NO: 9897 - DNA, 558 bp, Homo sapiens
  misc_feature (29)..(29): "n" may be a, t, c, g, other or unknown
  misc_feature (34)..(34): "n" may be a, t, c, g, other or unknown
  misc_feature (137)..(137): "n" may be a, t, c, g, other or unknown
  misc_feature (152)..(152): "n" may be a, t, c, g, other or unknown
  misc_feature (223)..(223): "n" may be a, t, c, g, other or unknown
  misc_feature (281)..(281): "n" may be a, t, c, g, other or unknown
  misc_feature (335)..(335): "n" may be a, t, c, g, other or unknown
  misc_feature (342)..(342): "n" may be a, t, c, g, other or unknown
  misc_feature (394)..(394): "n" may be a, t, c, g, other or unknown
  misc_feature (417)..(417): "n" may be a, t, c, g, other or unknown
  misc_feature (446)..(446): "n" may be a, t, c, g, other or unknown
  misc_feature (474)..(474): "n" may be a, t, c, g, other or unknown
  misc_feature (483)..(483): "n" may be a, t, c, g, other or unknown
  misc_feature (501)..(501): "n" may be a, t, c, g, other or unknown
  misc_feature (506)..(506): "n" may be a, t, c, g, other or unknown
  misc_feature (508)..(508): "n" may be a, t, c, g, other or unknown
  misc_feature (551)..(551): "n" may be a, t, c, g, other or unknown
  misc_feature (558)..(558): "n" may be a, t, c, g, other or unknown
caatgtaaaatcaagttttatatgattcnaaganaaaagttacattacacatgctcgtttaaataatgtcaaagtctgttacataaaacataattatgaaacattttaagtcttatcattcaaactacttaaaaggntcaaagtcacaaaanatcaagcaaaactgcccaggcaataaagtgcacgaggggagcccacctctccagcggccgtcagcacccanagccgccagctgagggctccatgccgaatccatacacaaggtttgtggttctcagaanagttttcagacaggaactgtttccaacttaaaatctttcaacagacaaatggangtggaanggggatggtttacacaaagtatttccaaatgtaatcaggaaatggaagtgtnaattaaaaccgttttcacatgtntctcctctttagaaatatcctgcttgganaatgttttgacaaccacccaattctccnaaaaccttntcccccaaaatactggcnggacncncattactttgcttttcttattaaaaaaaatttcccatttgaanccctttn

SEQ ID NO: 9898 - DNA, 542 bp, Homo sapiens
  misc_feature (76)..(76): "n" may be a, t, c, g, other or unknown
  misc_feature (117)..(117): "n" may be a, t, c, g, other or unknown
  misc_feature (302)..(302): "n" may be a, t, c, g, other or unknown
  misc_feature (468)..(468): "n" may be a, t, c, g, other or unknown
  misc_feature (474)..(474): "n" may be a, t, c, g, other or unknown
  misc_feature (485)..(485): "n" may be a, t, c, g, other or unknown
  misc_feature (507)..(507): "n" may be a, t, c, g, other or unknown
  misc_feature (515)..(515): "n" may be a, t, c, g, other or unknown
  misc_feature (527)..(527): "n" may be a, t, c, g, other or unknown
  misc_feature (531)..(531): "n" may be a, t, c, g, other or unknown
agatggagtctcactctgttgcccaggctggagtgcagtggcacgatcttggcttactgcaacttccgcctcccanattcaagtgatttctggctaatttttgtatttttagtcganacagcatttcgccttgttggccaggctggtcttgaactcctgacctcaagtgatctgcccgccttggcctcccaaagtgctaggattacaggcgtgagccaccatgcctggcatttttccatatgtctttgaacaaattattaactctttttcaccttggtttgctttctggaaatggggctganaatacctaactcctaggatacgtcaaaggattaaatgaggcaatcagtaaattgcccaacaccatttctggcacaaagtagatacttggaaaacaattccttccctttctttccccaaatgtcaaggtgccagcatttcttccctcaatggcttccctcccagtanaaaatnttcatctcccnaaatttaaaaggcatggcggtngggggaanggaaaattgggnattnctttaactttc

SEQ ID NO: 9899 - DNA, 461 bp, Homo sapiens
  misc_feature (32)..(32): "n" may be a, t, c, g, other or unknown
  misc_feature (37)..(37): "n" may be a, t, c, g, other or unknown
  misc_feature (113)..(113): "n" may be a, t, c, g, other or unknown
  misc_feature (122)..(122): "n" may be a, t, c, g, other or unknown
  misc_feature (126)..(126): "n" may be a, t, c, g, other or unknown
  misc_feature (134)..(134): "n" may be a, t, c, g, other or unknown
  misc_feature (137)..(137): "n" may be a, t, c, g, other or unknown
  misc_feature (184)..(184): "n" may be a, t, c, g, other or unknown
  misc_feature (201)..(201): "n" may be a, t, c, g, other or unknown
  misc_feature (377)..(377): "n" may be a, t, c, g, other or unknown
  misc_feature (400)..(400): "n" may be a, t, c, g, other or unknown
  misc_feature (411)..(411): "n" may be a, t, c, g, other or unknown
  misc_feature (413)..(413): "n" may be a, t, c, g, other or unknown
  misc_feature (422)..(422): "n" may be a, t, c, g, other or unknown
  misc_feature (428)..(428): "n" may be a, t, c, g, other or unknown
  misc_feature (430)..(430): "n" may be a, t, c, g, other or unknown
aaaagaaaatcatgtacagattttatttctgntgaanatcacaaaacaatttcaacctctgggggtcaaaataatttaaggatcttgtcctttggggtttattttctggttcnactaagganaganttcagaanggntagcttcccttgttacgtttttaaacatctttttcatttgttagaanaacatttcaaaagcccnaattaaattatcattaaaatactttgacactttacaatcttccaagtggaatttaagttgtatgccttgatactgtagttttacagtttccccatcattggtaaatattcttctatgatgccactataatgctactggtagaaaatatgtgcatataatttatcagtatattttcntgttaaattttataaaaatctcnaagttatgaananagttttacncccccncnaaactaagtgtttgccaactattacccctaa

SEQ ID NO: 9900 - DNA, 554 bp, Homo sapiens
  misc_feature (4)..(4): "n" may be a, t, c, g, other or unknown
  misc_feature (311)..(311): "n" may be a, t, c, g, other or unknown
  misc_feature (531)..(531): "n" may be a, t, c, g, other or unknown
cctngtgcagtcaacaagtttcattttagttgtgcttacattatataactgaagcctgaacactgattgtgtttttaatttacacgtttcaagaaaaccataattaaatattcaccatatacaacaaattgaacaaatgcaacaaatactcatttgctcccaagaaattaatctatagaaaggaaacatctttttaaaaagttgaacacagtctgctatccaggctacaagtacatatttactgtgttacagcacattattttttttaaagtccgctttcaacataaatataaataatcacattttaaaanagctccatactaagttttcaggtaagtgctaaacagttggccagtagcaactacttaccattatctttctcacatagagtgactagactatctgcgaaactgtatagggtgatgggcaaggcaaaatgaaacatctttgttcacccattgaataaacattgtgttctaaatgcccctactttctaaatacccacccatggaatgcaattatttaaaaagntggttttaaggatcattatcctt

SEQ ID NO: 9901 - DNA, 437 bp, Homo sapiens
  misc_feature (9)..(9): "n" may be a, t, c, g, other or unknown
  misc_feature (141)..(141): "n" may be a, t, c, g, other or unknown
  misc_feature (292)..(292): "n" may be a, t, c, g, other or unknown
  misc_feature (385)..(385): "n" may be a, t, c, g, other or unknown
  misc_feature (389)..(389): "n" may be a, t, c, g, other or unknown
  misc_feature (391)..(391): "n" may be a, t, c, g, other or unknown
  misc_feature (402)..(402): "n" may be a, t, c, g, other or unknown
  misc_feature (407)..(407): "n" may be a, t, c, g, other or unknown
  misc_feature (417)..(417): "n" may be a, t, c, g, other or unknown
  misc_feature (428)..(428): "n" may be a, t, c, g, other or unknown
ccattgaanagcgacattcattctggaatgtttgttttgaaaacaactcttctgggggaattcaaaaggtactgaacaaagcaacgtaaagtaagttttgggttgttttgcaaaataaaaatatacaattgagtggaccanatggcaaaaacataccaattacaatctgaatgctatatttaaaacccttaaattctgaaggcctgaatatcaacaaacctatttatgtttatgatcctaaaaagacattaaatattattaaacccccaacttccaaaacatagagacccancaaactgggctagtggtatctcagtacacagtcacacatgactagactagactagactagactagactagagatctgagtttgcaaccaagtncaanangtctttaaganctcangctaagggangcctttattcnaatgccttg

SEQ ID NO: 9902 - DNA, 518 bp, Homo sapiens
  misc_feature (75)..(75): "n" may be a, t, c, g, other or unknown
  misc_feature (77)..(77): "n" may be a, t, c, g, other or unknown
  misc_feature (224)..(224): "n" may be a, t, c, g, other or unknown
  misc_feature (273)..(273): "n" may be a, t, c, g, other or unknown
  misc_feature (406)..(406): "n" may be a, t, c, g, other or unknown
  misc_feature (452)..(452): "n" may be a, t, c, g, other or unknown
  misc_feature (454)..(454): "n" may be a, t, c, g, other or unknown
  misc_feature (458)..(458): "n" may be a, t, c, g, other or unknown
  misc_feature (472)..(472): "n" may be a, t, c, g, other or unknown
  misc_feature (502)..(502): "n" may be a, t, c, g, other or unknown
  misc_feature (508)..(508): "n" may be a, t, c, g, other or unknown
  misc_feature (510)..(510): "n" may be a, t, c, g, other or unknown
gataggtagtcagattttttattttcaaacgtgccaggtacatttcccacttttgaataacagcaaaaccggaanangatgctttcacacataataaatgttctccatcctttctgaaatgcaccaaagcaaaaagcctctgaagtcaaaacatgagacataattccttgctcattgcaggagacatgcaggtgccccctcctttacccaataccaagagacanacggccgggcaggtgtaaggcgggtggcgctgcagctgacatggagaanagtctaaatctgaagacacttttccacacttaggacaagttcttcactttcatgctttattgaaagtagaatatgaatcaaagacaggcattggtaagcaggttatgtctctaaaattacttttcgttcagancagaatgttgtcccatctacttgatacaatcctttatggaccaacncntctngtttgaaactccanccaggaaattttaccgaacttttttccccncccccnantaataatc

SEQ ID NO: 9903 - DNA, 469 bp, Homo sapiens
  misc_feature (162)..(162): "n" may be a, t, c, g, other or unknown
  misc_feature (428)..(428): "n" may be a, t, c, g, other or unknown
  misc_feature (447)..(447): "n" may be a, t, c, g, other or unknown
  misc_feature (452)..(452): "n" may be a, t, c, g, other or unknown
  misc_feature (456)..(456): "n" may be a, t, c, g, other or unknown
  misc_feature (460)..(461): "n" may be a, t, c, g, other or unknown
  misc_feature (469)..(469): "n" may be a, t, c, g, other or unknown
gtctgaaactttttccttttaatatggtttacattctatctccagagaaaacacacttaacagaagacagaaaacatttaacaaatccaaagcaattaaaaatagccacaaaaaaagagaataacctagactgacagctcacagagcaaggaggtggcaganacctgcccaggtgagcttggctgttgcccccagctcaatcttcctcctctcctctctctgtcccttcacctctgatcagtcccagcctgattcccgttccctgatgcctcaccttcttgctgccagatgcctctaggaactagggtccttcagactccagatgccctggcctgggccttaggacatcttgacttccccagtggacagctggacagtgccctgctctcacccacagctgggacctgaacatgccatgaggccctgtnttgaaattgtttttgggtnggganggtncccnnaatttttn

SEQ ID NO: 9904 - DNA, 556 bp, Homo sapiens; identical to SEQ ID NO: 7611
  misc_feature (1)..(556): "n" may be a, t, c, g, other or unknown

SEQ ID NO: 9905 - DNA, 509 bp, Homo sapiens
  misc_feature (132)..(132): "n" may be a, t, c, g, other or unknown
  misc_feature (223)..(223): "n" may be a, t, c, g, other or unknown
  misc_feature (294)..(294): "n" may be a, t, c, g, other or unknown
  misc_feature (335)..(335): "n" may be a, t, c, g, other or unknown
  misc_feature (350)..(350): "n" may be a, t, c, g, other or unknown
  misc_feature (396)..(396): "n" may be a, t, c, g, other or unknown
  misc_feature (439)..(440): "n" may be a, t, c, g, other or unknown
  misc_feature (468)..(468): "n" may be a, t, c, g, other or unknown
  misc_feature (475)..(475): "n" may be a, t, c, g, other or unknown
  misc_feature (497)..(497): "n" may be a, t, c, g, other or unknown
  misc_feature (501)..(501): "n" may be a, t, c, g, other or unknown
  misc_feature (509)..(509): "n" may be a, t, c, g, other or unknown
aaatgtaactggacaatatttaatcatatacactatttacatgtaatttatgtcataattttcttaacattcaatttccaagcctttgctcttggaaagcttccctggagcttctgggaggttatgtgggancacagccttatggcaggaggaaaatggtgaatccaagtcaggtttcgtgcaatccatctggccattctgaggctgtgtcttttgagctaanatcctggtgaattctctcctgtcaatccctgtgagcatgaggagtgatacatactttggttctgaaaaaanaaatggaaaaaactacaggttcctctgctggcaaagggaangggtctttccctganaaaatccgtgaaaaacaaaaattcccatctgcttgcctttgcccantgcatgactgaattcctcctttggggaagaaagaaagcccctnnaaggcaaaatcccctctcctcccaattntttttgnaaaaattctttccaagcttttntttnaaagcacn

SEQ ID NO: 9906 - DNA, 589 bp, Homo sapiens
  misc_feature (141)..(141): "n" may be a, t, c, g, other or unknown
  misc_feature (474)..(474): "n" may be a, t, c, g, other or unknown
  misc_feature (476)..(476): "n" may be a, t, c, g, other or unknown
  misc_feature (507)..(507): "n" may be a, t, c, g, other or unknown
  misc_feature (512)..(512): "n" may be a, t, c, g, other or unknown
  misc_feature (527)..(527): "n" may be a, t, c, g, other or unknown
  misc_feature (547)..(547): "n" may be a, t, c, g, other or unknown
  misc_feature (572)..(572): "n" may be a, t, c, g, other or unknown
  misc_feature (581)..(581): "n" may be a, t, c, g, other or unknown
  misc_feature (589)..(589): "n" may be a, t, c, g, other or unknown
atttgtataatatgtctttcaattacaaattcatctacagtagaaacagaagggaacataaaagtatgatctactttacagtaagctgtttttaaaataaaaattacagatcaatagtgaaggtgaggaaatttaactganaaaattttcaaaatattaaaatattcaaaaacattgacacatgaataatacctatcttaaagtaataataataaatgacatgtgtatacaaacacatttaacatgaatcaggatttcttgttcttgatgtcagcacctactgtctaacgggtcgagacaaaatactgtgccttcaagagttagtcccattttgaacccctcctgcatctcatctaattttgattgaatatctggagggaaatctgctgctccacagttaaatgggtcaaaaagttctgctccaaacaagtcccgtttaatctcaataaatctctaagttctggaagtggtgtntnccattgccaattaggctccaaaaaaggtgtnatttngaaaaaattgaatcntttccaaaatttccttgganggcaaattaggtttcttctgcccgncggaagtcngaaacctn

SEQ ID NO: 9907 - DNA, 595 bp, Homo sapiens
  misc_feature (76)..(76): "n" may be a, t, c, g, other or unknown
  misc_feature (118)..(118): "n" may be a, t, c, g, other or unknown
  misc_feature (232)..(232): "n" may be a, t, c, g, other or unknown
  misc_feature (251)..(251): "n" may be a, t, c, g, other or unknown
  misc_feature (424)..(424): "n" may be a, t, c, g, other or unknown
  misc_feature (496)..(496): "n" may be a, t, c, g, other or unknown
  misc_feature (524)..(524): "n" may be a, t, c, g, other or unknown
  misc_feature (548)..(548): "n" may be a, t, c, g, other or unknown
  misc_feature (576)..(576): "n" may be a, t, c, g, other or unknown
  misc_feature (585)..(585): "n" may be a, t, c, g, other or unknown
  misc_feature (589)..(589): "n" may be a, t, c, g, other or unknown
aaggagaaaaaagtataaaaatttcttttcttattacaagaattccaagatgtgtcagagttgaccagaagcatanagaaaactacatagtcgagtacccaccaggggaatgtggtanaattggcagtctgttggtctctttgtaatgtcagattaaagaaatcacctggaggctgacattggccccttcccttcccaggaggcagatctggcctaaatacggagatgcgtncaaagaagacctaggatcncaatcgttcttagccatcaaactcttcttccaggtcctagagaaagtggccactctataccaaagccaaagaactgcagagtactcctcttggttggggtttcatattgctcttgcaattcagtttcctctcatctttgctgtcatttcgtgggtaccaacagccttggccangtgtgagaagtgtccattactattgtttgctctgactatcttgcgccaagatcccattaaggtggaaccaanggcctggtgatctcttgccttgggacanaataattggtgggtgtgtttcctntccccccgttgcccccgtttttttcccnagggcgttnaccncaattt

SEQ ID NO: 9908 - DNA, 389 bp, Homo sapiens
  misc_feature (121)..(121): "n" may be a, t, c, g, other or unknown
  misc_feature (219)..(219): "n" may be a, t, c, g, other or unknown
  misc_feature (255)..(255): "n" may be a, t, c, g, other or unknown
  misc_feature (326)..(326): "n" may be a, t, c, g, other or unknown
  misc_feature (333)..(333): "n" may be a, t, c, g, other or unknown
  misc_feature (341)..(341): "n" may be a, t, c, g, other or unknown
  misc_feature (344)..(344): "n" may be a, t, c, g, other or unknown
  misc_feature (358)..(358): "n" may be a, t, c, g, other or unknown
  misc_feature (374)..(374): "n" may be a, t, c, g, other or unknown
  misc_feature (377)..(377): "n" may be a, t, c, g, other or unknown
agtggcaactggtatttattacaattatatacagtcctatcttccgttctgaggtctatacatgatcacacaaatgaacatgtgtttcctggggggaaagacaaaactggctgttggtcangaagccctgctgcctggctcctcctccggagtgagcccccatctcgccatgggattagctgaaccattacacggcaagcgggggcatcggaagcgcancgtggtttcatttgtctgggaagacaacggggcatnaatggggttggggctggggacaagcacctgacgggtccaaggccgggcccaggggaaggaaggggatgcanacaccanaaggaccncanctcctcctccactnaagaatccggaagcantanggacctactctt

SEQ ID NO: 9909 - DNA, 573 bp, Homo sapiens
  misc_feature (139)..(139): "n" may be a, t, c, g, other or unknown
  misc_feature (171)..(171): "n" may be a, t, c, g, other or unknown
  misc_feature (238)..(238): "n" may be a, t, c, g, other or unknown
  misc_feature (302)..(302): "n" may be a, t, c, g, other or unknown
  misc_feature (462)..(462): "n" may be a, t, c, g, other or unknown
  misc_feature (495)..(495): "n" may be a, t, c, g, other or unknown
  misc_feature (510)..(510): "n" may be a, t, c, g, other or unknown
  misc_feature (523)..(523): "n" may be a, t, c, g, other or unknown
  misc_feature (525)..(525): "n" may be a, t, c, g, other or unknown
  misc_feature (544)..(544): "n" may be a, t, c, g, other or unknown
  misc_feature (552)..(552): "n" may be a, t, c, g, other or unknown
  misc_feature (569)..(569): "n" may be a, t, c, g, other or unknown
gcaaatatatttatttttattttgtctcatacacacacagaaaaacagataaaaatctagcctgagatttaaaactcactaaggaaaaaaaatcacagcaaaagcagtaggttaacatcaggatatttatattcaaggntctatggtatcaagttttttttctctttaganccaggcatggtggcatgcacctgtggtcctagctactcacgaagctgaggcaggaggtttgcttganccccagtgcttgaggctgcagttagccgcgaatgcactgctgtactccaatctggaaaacagancaggaccctgtctctaaaaaatttgagattttttaaagtccatatttttttgttatttaaacgtggtattattcaacattgatgaacttgggtcgtgagttctaaaagggattcaaaataaaatggcattttcacttttttaaaattaagatacttttcntgatcaaaaatatgtttttgtctcccccctganccccctttccaggtnggttaccaacttncnaaatttaatttggcttatnctccaaanaaccttttctttaatcnttac

SEQ ID NO: 9910 - DNA, 569 bp, Homo sapiens
  misc_feature (373)..(373): "n" may be a, t, c, g, other or unknown
  misc_feature (437)..(437): "n" may be a, t, c, g, other or unknown
  misc_feature (494)..(494): "n" may be a, t, c, g, other or unknown
  misc_feature (507)..(507): "n" may be a, t, c, g, other or unknown
  misc_feature (512)..(512): "n" may be a, t, c, g, other or unknown
aatttttactttttctcaagtttaatgtagacatacaagaaaacatcaagcaatgtttattgtgcaattccaatcattatttgcagaatcttggtttagagtcagtctttatagccatttcaactgcttggtttaaacaaaaagcaacaatctggttatctacctataaatttcacggtatttctttaaacactgaagtactaaaagcactgatgatttgtattataatttttaaaatatttaaaacctacacagatttcatagatcattccttttataaaataatcaaaataatttgattatctggaaaaaaaaattcttgaaacagagccctttccaggtatcttcaatctctgtaaaaccccaaaccccnaacagagtagatgatgaaataaggatttctcagttgcccaagactgtctgaaatttaaggtganaaatggactggcgtttttcatgtttcctgtgaattcaaaacttacaggtgggatcanaactccatctctnggaanggtttacttggcttccctttgaattggttcctttccattggctcctttcccactcct

SEQ ID NO: 9911 - DNA, 549 bp, Homo sapiens
  misc_feature (349)..(349): "n" may be a, t, c, g, other or unknown
  misc_feature (409)..(409): "n" may be a, t, c, g, other or unknown
  misc_feature (423)..(423): "n" may be a, t, c, g, other or unknown
  misc_feature (475)..(475): "n" may be a, t, c, g, other or unknown
  misc_feature (478)..(478): "n" may be a, t, c, g, other or unknown
  misc_feature (488)..(488): "n" may be a, t, c, g, other or unknown
  misc_feature (500)..(500): "n" may be a, t, c, g, other or unknown
  misc_feature (528)..(528): "n" may be a, t, c, g, other or unknown
  misc_feature (533)..(533): "n" may be a, t, c, g, other or unknown
  misc_feature (546)..(546): "n" may be a, t, c, g, other or unknown
gttttttttttttaactgatgtgccagttttttgacacctttattcataagtcaatatatttgtcagtttgaatgttatacacatgataaaatagattatgagaagtatcatatttacaataagaacactattttatataactgactcaccaaatatgcaacctcttgcaacaataacagaatggactcaactccatcctttgaatagaccaatttcatgattctcctaaaaagttttgagttgagtatagttccttgttgcttctctctgtgatccagagcttaagaatcaatccctggaaaccagccactggaaccagacctctccagaattgagaagagacagccntagaaaaaaggacacaaacccaaaagtcttgagcgctgtgccatatgcttgatttcagancattcaggcactcnaggtcaagtgtgggggcatatatatatatgttctgtcatctcaaatgccacnacnggttcagttngccgggatttcnaaaaaaagaagctttcctggaagaatgnatccntccccccattttnttt

SEQ ID NO: 9912 - DNA, 515 bp, Homo sapiens
  misc_feature (8)..(8): "n" may be a, t, c, g, other or unknown
  misc_feature (84)..(84): "n" may be a, t, c, g, other or unknown
  misc_feature (379)..(379): "n" may be a, t, c, g, other or unknown
  misc_feature (457)..(457): "n" may be a, t, c, g, other or unknown
  misc_feature (481)..(481): "n" may be a, t, c, g, other or unknown
  misc_feature (483)..(483): "n" may be a, t, c, g, other or unknown
  misc_feature (490)..(490): "n" may be a, t, c, g, other or unknown
  misc_feature (494)..(494): "n" may be a, t, c, g, other or unknown
  misc_feature (496)..(496): "n" may be a, t, c, g, other or unknown
  misc_feature (505)..(505): "n" may be a, t, c, g, other or unknown
agggatanagtctatgttgcacagtctggtcacaaactcctggcctcaagtgatgtttcctcctcagcctcctaaagtattganattacagctgtaagccactatacctggcctcaaaattatattaatgtctattagttaacttgaattgtttgtgcttgtcttgttggttttaaccctacttatatacaagaattcaaaagtattttcaagccctatcatttagttgtaaaatatacccaactcacatttatagactgccaactaacttgaatgtttgtacaggcatttctgctgtgatgccatgtgtacctaaataaaactcacactctataaaatcacacactaaattaaattaacagggctatagaaaaaaganttataggcttacctctcaaaatctatagacttttgtgactagaaagcactaaaaaacagcaataatatcctattaacngttttaccggttaatctctccgcnancaacccnaatncnggggaaatncttggcacct

SEQ ID NO: 9913 - DNA, 510 bp, Homo sapiens
  misc_feature (434)..(434): "n" may be a, t, c, g, other or unknown
  misc_feature (438)..(438): "n" may be a, t, c, g, other or unknown
  misc_feature (480)..(481): "n" may be a, t, c, g, other or unknown
  misc_feature (484)..(484): "n" may be a, t, c, g, other or unknown
  misc_feature (502)..(502): "n" may be a, t, c, g, other or unknown
  misc_feature (508)..(508): "n" may be a, t, c, g, other or unknown
ccgaattatttaacttcattttattattatttatgctcctcaggtaatttacatcgactgcatctgtatggtgaaaatatagtataatggggtgctgctgtgaatctccttccaattctgcattctgtgatatcatagtggtaacctgaaatccaccatagtggggacatttacacaataactggcaaatgctacaaggctgggctttttcagttttgttgattgtctggacataaaaaggtaatacagaaaatgttaccaatacaagcatttgggaaaaataaactaaaaccttttgtgaaaaacaacaggttttatggaatttacaataaataatactgtatattttattatttataaattctgtgctacacattcttcatatcagtaaaacttaaaacatatatatgttatccatacattttgttttctanaaanccactggttgaacattaaccaacacactactgggaatttccnnccnccaaagtttttttaggtnggggangg

SEQ ID NO: 9914 - DNA, 554 bp, Homo sapiens
  misc_feature (240)..(240): "n" may be a, t, c, g, other or unknown
  misc_feature (415)..(415): "n" may be a, t, c, g, other or unknown
  misc_feature (447)..(447): "n" may be a, t, c, g, other or unknown
  misc_feature (473)..(473): "n" may be a, t, c, g, other or unknown
  misc_feature (491)..(491): "n" may be a, t, c, g, other or unknown
  misc_feature (498)..(498): "n" may be a, t, c, g, other or unknown
  misc_feature (524)..(524): "n" may be a, t, c, g, other or unknown
  misc_feature (530)..(530): "n" may be a, t, c, g, other or unknown
  misc_feature (548)..(548): "n" may be a, t, c, g, other or unknown
  misc_feature (553)..(553): "n" may be a, t, c, g, other or unknown
gactgaaaactactttatttgaagacattttcttctatagttctaaacacaaaaggaatgctgttatagtgggtatttcataggcattcttgtattcaaatgaatcacataatgtttacacttttaagctagacttgaaattgaagacttaatacaaccttttaacaaagaaagtatcagtcatatcaaaacataactattcattctacagattatcactttccctaaaatgactactanatatgaaaacattgcagggacagctcaagtgccccattcttaagggttttttttaataggaaaaatgacaacgtaaatcacattttccttttctttactagtaatgaactatggcaatccatttgagaaagcaccagccaaccgtacaagtcatttcagcaccctttgctcttcnaaactgaacatcttttatatttaatgcttccngtttgaataaaaatgggtatgtttanttcaaaattccccacctntttattnggggtttaattaaaaagttttccccnttcccnaaaaaattaaaaaattcncccgnt

SEQ ID NO: 9915 - DNA, 497 bp, Homo sapiens
  misc_feature (189)..(189): "n" may be a, t, c, g, other or unknown
  misc_feature (217)..(217): "n" may be a, t, c, g, other or unknown
  misc_feature (258)..(258): "n" may be a, t, c, g, other or unknown
  misc_feature (362)..(362): "n" may be a, t, c, g, other or unknown
  misc_feature (364)..(364): "n" may be a, t, c, g, other or unknown
  misc_feature (368)..(368): "n" may be a, t, c, g, other or unknown
  misc_feature (412)..(412): "n" may be a, t, c, g, other or unknown
  misc_feature (442)..(442): "n" may be a, t, c, g, other or unknown
  misc_feature (448)..(448): "n" may be a, t, c, g, other or unknown
  misc_feature (459)..(459): "n" may be a, t, c, g, other or unknown
  misc_feature (471)..(471): "n" may be a, t, c, g, other or unknown
  misc_feature (483)..(483): "n" may be a, t, c, g, other or unknown
  misc_feature (485)..(485): "n" may be a, t, c, g, other or unknown
gggaatcaccattttcagtttttaatgttaaaggggctaacactgtatgggactcaagactggttttgaaattctcttttacatcagtcataaataactgattgttaacattatttaatttctgtgttagattttccaccaaactctgaggttcacaagttggaattacatttgaatgagggttagtanttgggatttcaacactctttgctatgantcccattgttgttaagtcacttgttaccaagttttgggaancgttaggtgcaattagtggaggagcaactttctttcttctcttaaaaacactgtttcccctttttatttaaatgactggatcttgtgttctgaaggaccacttntnacanaaacacgaaaactgttactggtaaaattttgtgatgggcccccncaattaggaaatgaactaaaacacaaaccntttccncagtcctccantattaattcctnccttggaaaaanangcaaactgctac

SEQ ID NO: 9916 - DNA, 520 bp, Homo sapiens
  misc_feature (82)..(82): "n" may be a, t, c, g, other or unknown
  misc_feature (119)..(119): "n" may be a, t, c, g, other or unknown
  misc_feature (185)..(185): "n" may be a, t, c, g, other or unknown
  misc_feature (187)..(187): "n" may be a, t, c, g, other or unknown
  misc_feature (212)..(212): "n" may be a, t, c, g, other or unknown
  misc_feature (221)..(221): "n" may be a, t, c, g, other or unknown
  misc_feature (336)..(336): "n" may be a, t, c, g, other or unknown
  misc_feature (368)..(368): "n" may be a, t, c, g, other or unknown
  misc_feature (370)..(370): "n" may be a, t, c, g, other or unknown
  misc_feature (449)..(449): "n" may be a, t, c, g, other or unknown
  misc_feature (473)..(473): "n" may be a, t, c, g, other or unknown
  misc_feature (482)..(482): "n" may be a, t, c, g, other or unknown
  misc_feature (491)..(491): "n" may be a, t, c, g, other or unknown
  misc_feature (500)..(500): "n" may be a, t, c, g, other or unknown
  misc_feature (502)..(502): "n" may be a, t, c, g, other or unknown
  misc_feature (504)..(504): "n" may be a, t, c, g, other or unknown
cagtggatttctcaacaagtcttttcaacagtgatacacaatattcttccctttggaatcggtgctgttaaataaacatgtnctatatagccattttccaatgcaacattagagtacanaacaggtattctgtggctagtgagtaatactgctgctgtagggtgcatacacgttaggatcggacnangatcttactcaggattgcatcgtantagggacanaaaaccatcttgttatatttgaccaggcgagcaaatttaatagcaacttcctccagctctctctgaactggactgagtcccccagggactgtgggcaatggcttctgatgacccnaggcaaggtaggttctaaaaagtcaggattcnanatcccatgatcctgccaatggggtctcgggaactgggccacggcctggatctgggccttgaacaccggctccttgttcntggtgaaaggaaaagacccccccnggaaaagcngcttgctcncctcccagncnancttctccccatggtat

SEQ ID NO: 9917 - DNA, 543 bp, Homo sapiens
  misc_feature (52)..(52): "n" may be a, t, c, g, other or unknown
  misc_feature (201)..(201): "n" may be a, t, c, g, other or unknown
  misc_feature (203)..(203): "n" may be a, t, c, g, other or unknown
  misc_feature (473)..(473): "n" may be a, t, c, g, other or unknown
  misc_feature (479)..(479): "n" may be a, t, c, g, other or unknown
  misc_feature (490)..(490): "n" may be a, t, c, g, other or unknown
  misc_feature (500)..(500): "n" may be a, t, c, g, other or unknown
  misc_feature (512)..(512): "n" may be a, t, c, g, other or unknown
  misc_feature (517)..(517): "n" may be a, t, c, g, other or unknown
  misc_feature (523)..(523): "n" may be a, t, c, g, other or unknown
gaggtacaaatccaacagagctttaatcccaaagatccagtggccaccagantacagaagtcagaatcaaatgctcagaatcaaaaggtgtggcactcctgcccagccggcttatcagcagttgtatagacagatcagaaaaaactagcatttattataaaaactgtttttcaaatggggtgatttcctgtccttctccananatcataattcttcacgtttctgaggaccttctcggcttggttcttttgtcttctctttgtacagtgctcccgtttctttctccttctgaaagcggatctgtagctgtttgatctcttggtcgtagtcctgccactccgggacaatccgcacagctgcttcccagtttccgggctctttgggtctccggaattattacacaaatcaatgggttttgtccttttcttaaaaaggcgtcatcacaccacgtttcacaccaaaaccattcttgnaagganggatttaattngcacctgatnaatcattttttnggccnatcttnatcaaaattgaaaggtgttt

SEQ ID NO: 9918 - DNA, 575 bp, Homo sapiens
  misc_feature (12)..(12): "n" may be a, t, c, g, other or unknown
  misc_feature (204)..(204): "n" may be a, t, c, g, other or unknown
  misc_feature (281)..(281): "n" may be a, t, c, g, other or unknown
  misc_feature (344)..(344): "n" may be a, t, c, g, other or unknown
  misc_feature (347)..(347): "n" may be a, t, c, g, other or unknown
  misc_feature (351)..(351): "n" may be a, t, c, g, other or unknown
  misc_feature (355)..(355): "n" may be a, t, c, g, other or unknown
  misc_feature (372)..(372): "n" may be a, t, c, g, other or unknown
  misc_feature (397)..(397): "n" may be a, t, c, g, other or unknown
  misc_feature (456)..(456): "n" may be a, t, c, g, other or unknown
  misc_feature (481)..(481): "n" may be a, t, c, g, other or unknown
  misc_feature (489)..(489): "n" may be a, t, c, g, other or unknown
  misc_feature (538)..(538): "n" may be a, t, c, g, other or unknown
  misc_feature (542)..(542): "n" may be a, t, c, g, other or unknown
  misc_feature (548)..(548): "n" may be a, t, c, g, other or unknown
  misc_feature (560)..(560): "n" may be a, t, c, g, other or unknown
  misc_feature (569)..(569): "n" may be a, t, c, g, other or unknown
gtactctaaggnttttatttggtgacatctttccacagataaatgtaatgtgtatcattacacttacattgcttttatctagcacaaaacctctgatgagtaagttcatagtagttattaaatgctttgccacattctttaaaatcagaatttttctcagcatgaattttcttctgtgcaataagctgtcagcaatggttgaanactttccccacattcttcacatttgtagtgtttctctccagtatgaattatcttgtgatttcaatgccttgagcaanatttatggaatttgccacattctttacatttgtagggatttctctttagtaaaaattcttacntantaanggtngaagcagtgattaaaanctcccccacattttttatacttgcnggattctctcctctttgaactctcttatgtttcattaaaatgtgagcaccgtttaaaanctttgccacattctcccatttatancgtttganggcagtatgaatttcctaatgtctagtgggtgtgaccccgaataaaggntttncccatnctccccgttgtngggttcccnccatat

SEQ ID NO: 9919 - DNA, 500 bp, Homo sapiens
  misc_feature (94)..(94): "n" may be a, t, c, g, other or unknown
  misc_feature (96)..(96): "n" may be a, t, c, g, other or unknown
  misc_feature (298)..(298): "n" may be a, t, c, g, other or unknown
  misc_feature (314)..(314): "n" may be a, t, c, g, other or unknown
  misc_feature (367)..(367): "n" may be a, t, c, g, other or unknown
  misc_feature (379)..(379): "n" may be a, t, c, g, other or unknown
  misc_feature (405)..(405): "n" may be a, t, c, g, other or unknown
  misc_feature (446)..(446): "n" may be a, t, c, g, other or unknown
  misc_feature (460)..(460): "n" may be a, t, c, g, other or unknown
  misc_feature (466)..(466): "n" may be a, t, c, g, other or unknown
  misc_feature (486)..(486): "n" may be a, t, c, g, other or unknown
  misc_feature (496)..(496): "n" may be a, t, c, g, other or unknown
  misc_feature (500)..(500): "n" may be a, t, c, g, other or unknown
gtaaatggtctcagatactttcttttgctaaatggtgtgatacagataaatccaataaatataataatttacttaattcattatcatcaggaangnctggaattaaaattcttgattttgagtttataacggtttcatttcacttattacctctacatatgatcattttaaatgtcagactaattgaactactgaattgaatgcaggctattagcattaaatgagactcatgcaatagaatataaaggtattacactgtccctattttgtgcactgtttaataatcttaggtacttanaatttttagatgtgtntctaataaatatttttgtaaatacgtcttgaccaagtgttataaatgtttctnacagatataaanatcatttccaaagtttactctcatanatttctgatacgtgtaaattccaatgttacctcataaccanccaaatattccaantctcanaaaatgcaaaattacaatantccctgtttncccn

SEQ ID NO: 9920 - DNA, 457 bp, Homo sapiens
  misc_feature (364)..(364): "n" may be a, t, c, g, other or unknown
  misc_feature (376)..(376): "n" may be a, t, c, g, other or unknown
  misc_feature (383)..(383): "n" may be a, t, c, g, other or unknown
  misc_feature (389)..(389): "n" may be a, t, c, g, other or unknown
  misc_feature (419)..(419): "n" may be a, t, c, g, other or unknown
  misc_feature (436)..(437): "n" may be a, t, c, g, other or unknown
gaagttgtttctccagttttttggctttactcgtggcatgttttaacttttctctaacttgaacatcttccaaatctagctgtgtaaatttttctttattctcctcaataaattttgtaattttattcagtttcttttctgtatcttttacatctttattcttagctttcatttcatttgatagtatattgctcttctcattaatttctttggtatcttcatgaattttttccttttgagtttccatttcagcaattcgtttctgcaactcataactcccaacttaaagcaggatactaaaaagtcaacttcaatgaattaatatgcctaatttaataaattcaaccctggtgatcaacgggangaacagggttcncaccaanaaaatnccccacattggaataattccacccataatnccttttttgttaaaaanngggtctggcatgttgcccag

SEQ ID NO: 9921 - DNA, 507 bp, Homo sapiens
  misc_feature (17)..(17): "n" may be a, t, c, g, other or unknown
  misc_feature (22)..(22): "n" may be a, t, c, g, other or unknown
  misc_feature (91)..(91): "n" may be a, t, c, g, other or unknown
  misc_feature (106)..(106): "n" may be a, t, c, g, other or unknown
  misc_feature (123)..(123): "n" may be a, t, c, g, other or unknown
  misc_feature (168)..(168): "n" may be a, t, c, g, other or unknown
  misc_feature (184)..(185): "n" may be a, t, c, g, other or unknown
  misc_feature (188)..(188): "n" may be a, t, c, g, other or unknown
  misc_feature (227)..(227): "n" may be a, t, c, g, other or unknown
  misc_feature (412)..(412): "n" may be a, t, c, g, other or unknown
  misc_feature (435)..(435): "n" may be a, t, c, g, other or unknown
  misc_feature (442)..(442): "n" may be a, t, c, g, other or unknown
  misc_feature (458)..(458): "n" may be a, t, c, g, other or unknown
  misc_feature (480)..(480): "n" may be a, t, c, g, other or unknown
  misc_feature (496)..(496): "n" may be a, t, c, g, other or unknown
  misc_feature (504)..(504): "n" may be a, t, c, g, other or unknown
attattatactttaccntttanggtacatgtgcacaatgtgcaggttagttacatatgtatacatgtgccatgctggggtgctgcacccantaacttgtcatttancattaactatatctccnaatgctaatcctcccccctccccccaccccaaaaacagtccccanaatgtgaagttccccnnccngtgtccatgtgttctcattgttcaattctcatctatgantgagaacatgcggtgtttggttttttgtccttgcgatagtttactgagaatgatgatttccaatttcatccatgtccctacaaaggacatgaactcatcattttttatggctgcatagtattccatggtgtatatgtgccacattttcttaatccagtctatcattgttgtacatttgggttggntccaagtctttgctattgtgaanaatgtcncaataaacatactttncatgttttcttaataccaccangaattaaaatcccttngggtattnccc

SEQ ID NO: 9922 - DNA, 529 bp, Homo sapiens
  misc_feature (66)..(66): "n" may be a, t, c, g, other or unknown
  misc_feature (79)..(79): "n" may be a, t, c, g, other or unknown
  misc_feature (124)..(124): "n" may be a, t, c, g, other or unknown
  misc_feature (149)..(149): "n" may be a, t, c, g, other or unknown
  misc_feature (238)..(238): "n" may be a, t, c, g, other or unknown
  misc_feature (251)..(251): "n" may be a, t, c, g, other or unknown
  misc_feature (268)..(268): "n" may be a, t, c, g, other or unknown
  misc_feature (346)..(346): "n" may be a, t, c, g, other or unknown
  misc_feature (351)..(351): "n" may be a, t, c, g, other or unknown
  misc_feature (365)..(365): "n" may be a, t, c, g, other or unknown
  misc_feature (372)..(372): "n" may be a, t, c, g, other or unknown
  misc_feature (398)..(398): "n" may be a, t, c, g, other or unknown
  misc_feature (444)..(444): "n" may be a, t, c, g, other or unknown
  misc_feature (453)..(453): "n" may be a, t, c, g, other or unknown
  misc_feature (496)..(496): "n" may be a, t, c, g, other or unknown
  misc_feature (506)..(506): "n" may be a, t, c, g, other or unknown
  misc_feature (515)..(515): "n" may be a, t, c, g, other or unknown
  misc_feature (520)..(520): "n" may be a, t, c, g, other or unknown
  misc_feature (522)..(522): "n" may be a, t, c, g, other or unknown
cctcaggcactttttatttcatgctgtgcgggggcccttgtcccaaatttgtggccacgtgtccangtgtctgggggantgggccaaacctgaaaaaagaaggccctgctccaaaaatccccangttgtccctgttgacctatagggangtctgacttcaggcgttgccctcctgacccgtgagcagtcctgaatcgctggctcctattctgtcacacggggtgggtagtgccaaaancagcctcctgcancccttggcgtccggaanagtgacagccacattcaagtctccctggcacgtgaggtccatggtgcccctgactcatgtcctggctccagccaatancccanacccccatggaaangttccancatgtgcaaaaatgcacattggccangtggctgccccccggaaacatttttcaaaaaagcaggggtcaggtnacccaattntccaaaatctcatggaaaggtcccacccattggcccccccaanccaaccacancagggtttnaaccncnaaacccc

SEQ ID NO: 9923 - DNA, 544 bp, Homo sapiens
  misc_feature (116)..(116): "n" may be a, t, c, g, other or unknown
  misc_feature (473)..(473): "n" may be a, t, c, g, other or unknown
  misc_feature (485)..(485): "n" may be a, t, c, g, other or unknown
  misc_feature (497)..(497): "n" may be a, t, c, g, other or unknown
  misc_feature (506)..(506): "n" may be a, t, c, g, other or unknown
  misc_feature (511)..(511): "n" may be a, t, c, g, other or unknown
  misc_feature (515)..(515): "n" may be a, t, c, g, other or unknown
  misc_feature (520)..(520): "n" may be a, t, c, g, other or unknown
cagagtcaataactttattagaaaaagattaatactaaaacttttcaatgacagagacaatcaactttgtaacagaaagtcagagatactttatttttacttctaaatccaaaggntaagtagagcagagttgtaaaaatgaaatcccacttagtctgattcacacgaatactaacgtttaatcctgttttcaaagtccaagattgaaaacttgcaattaaacactgagcaagccacatgtttaagtaatatttcttaaaaagtcttaaagaaaaaagtatgatacaggacctaagttttcagtggcatatatattattaacacatgttctgaaatctggtaggtcacatcagtcctgaattaacttttaataataataataataaaaaaactaactgagctttatactttttctatgccctatagctttctttccctcactttttaaatgtcgatcttcactctatgccgtnctcggtattctnccaaaaatctcnaacagtatnccccngtcngatcngaggtcttatcaaatcagtttaat

SEQ ID NO: 9924 - DNA, 366 bp, Homo sapiens
  misc_feature (278)..(278): "n" may be a, t, c, g, other or unknown
  misc_feature (315)..(315): "n" may be a, t, c, g, other or unknown
  misc_feature (328)..(328): "n" may be a, t, c, g, other or unknown
  misc_feature (338)..(338): "n" may be a, t, c, g, other or unknown
  misc_feature (346)..(346): "n" may be a, t, c, g, other or unknown
  misc_feature (360)..(360): "n" may be a, t, c, g, other or unknown
  misc_feature (364)..(364): "n" may be a, t, c, g, other or unknown
acggggaagagtggactcaatttttatttttgaaacctcatgcacagagttccttatattccccaggtcccacaagagtaccaggtgccatttcagaaccacctttctaaacctctgcccacccactgaaagcaacacggcccttcacagcctggcttccttcttttgacacacagcccttccgctccagtggagaatcgccaaagatcatgaagggtaaatagtctcctctgaacccctggtctgggaaacccgtttcaaccccggggggagcccantggccactggtgctgcccaagggctgctgtggggcanaaataacacacanaagaaaggtnggggtggnaggaaccctcccanaaanca

SEQ ID NO: 9925 - DNA, 571 bp, Homo sapiens
  misc_feature (11)..(11): "n" may be a, t, c, g, other or unknown
  misc_feature (55)..(55): "n" may be a, t, c, g, other or unknown
  misc_feature (77)..(77): "n" may be a, t, c, g, other or unknown
  misc_feature (271)..(271): "n" may be a, t, c, g, other or unknown
  misc_feature (346)..(346): "n" may be a, t, c, g, other or unknown
  misc_feature (444)..(444): "n" may be a, t, c, g, other or unknown
  misc_feature (458)..(458): "n" may be a, t, c, g, other or unknown
  misc_feature (522)..(522): "n" may be a, t, c, g, other or unknown
  misc_feature (553)..(553): "n" may be a, t, c, g, other or unknown
  misc_feature (556)..(556): "n" may be a, t, c, g, other or unknown
  misc_feature (562)..(562): "n" may be a, t, c, g, other or unknown
  misc_feature (564)..(565): "n" may be a, t, c, g, other or unknown
  misc_feature (568)..(568): "n" may be a, t, c, g, other or unknown
aaaggtaagancactttattcttatttgaaccacactgtattgttgattaccgantgtgaaagtagtatgttcagantcttgttttatgcctttgtagctgtgttgccagcatttgaaggtaactcctccacataagcggcaggaaaatggccttttttcccattcaaagatccaaaccaccatccttcttcttttttctcgtgtataatcacaatgtcacccttttccaaattcaactcatcatcttgcctggcttgaaaagaatacaangccttgcaaagtctgctgctgagctgggctgcaccaggggctggagttgaaaaactggattgctctgcccaccanaagatgccttgctcacaatattctctaatctcttcattaaaaaaggccgagatattttcacatagctatgagtatgctccttttccctcccctgaaanatggaattactacnaggatggctgggttgaagtctttgctccaatttctgctacattgataacagtttgttggattcncttccaaaaggtctatttcaaattgtccccnccnttaacncnnctnttt

SEQ ID NO: 9926 - DNA, 582 bp, Homo sapiens
  misc_feature (61)..(61): "n" may be a, t, c, g, other or unknown
  misc_feature (105)..(105): "n" may be a, t, c, g, other or unknown
  misc_feature (191)..(191): "n" may be a, t, c, g, other or unknown
  misc_feature (333)..(333): "n" may be a, t, c, g, other or unknown
  misc_feature (339)..(339): "n" may be a, t, c, g, other or unknown
  misc_feature (397)..(397): "n" may be a, t, c, g, other or unknown
  misc_feature (437)..(437): "n" may be a, t, c, g, other or unknown
  misc_feature (446)..(446): "n" may be a, t, c, g, other or unknown
  misc_feature (521)..(521): "n" may be a, t, c, g, other or unknown
  misc_feature (535)..(535): "n" may be a, t, c, g, other or unknown
  misc_feature (544)..(544): "n" may be a, t, c, g, other or unknown
  misc_feature (582)..(582): "n" may be a, t, c, g, other or unknown
gctcacggccatgatttattacagtgaaaggatacaaaacaaaatcagcaaaggaaaaaanacacatggggtgaagtcaggggaaactaagtgcaagcttccaanaatcctccgccagtggaatcacagaggatgagcttaattctcccagcaaccagttgtaacagcacttgtgaaacactgtcaaccanaaaagcttgttagagactgagtgcctggggtttttactgggagctggtcacaaaggtagtctctgcctggcacataccaaaattccagactcccagaaggaaagcaggtgttcaggagaaactatattgttttacagtttanatatantaagctactttgatcagttctgggaatggtggaagccccctgaactccaagttcccanatgccaatcaagggccaaccttgtaaagcaagtctctaangttaagtantcaggtcgcttcattaacacttttttctgcacagcaattttatctcacattttttcctccatgcccataaatacncatttccttaattntctttaacnagtttactatctccggtttccccttaataatccaatan

SEQ ID NO: 9927 - DNA, 582 bp, Homo sapiens
  misc_feature (492)..(492): "n" may be a, t, c, g, other or unknown
  misc_feature (500)..(500): "n" may be a, t, c, g, other or unknown
  misc_feature (502)..(502): "n" may be a, t, c, g, other or unknown
  misc_feature (544)..(544): "n" may be a, t, c, g, other or unknown
  misc_feature (559)..(559): "n" may be a, t, c, g, other or unknown
acactgcttgcactttattttgtacagacatttcattaattattactcaattttgaggtgcaaaccttctgaatatagctttcattttggaccaaacaatttgttatggcaataaataatgatgcattgaaaaaccaatttttgtatttgatttaatgcactcttacatttaagaaattatatatacattcttgaatttcaacttaccaaaatagaatagcttttatttaacagcctaagcttttgttttcctgacaaatactgaaactttttgttacattaatgctgcaaagttgtttatcacctcaactttctcactgctttgctcataactaagtgtgattacatggagagagaaagttttgtaacagtaacacatgatttagagtttaaaatcatatcagaaagatgggaattatttaaatataccttataaaaataagtggcttaatcaatgaaaaaaaaacccaggggtttttggcttataattanaaaataantntatccttagttatagttaattaaaaaaatcaccacctaaaanttaaaccatccgaanttttccttaccgaaaaaattttt

SEQ ID NO: 9928 - DNA, 580 bp, Homo sapiens
  misc_feature (177)..(177): "n" may be a, t, c, g, other or unknown
  misc_feature (490)..(490): "n" may be a, t, c, g, other or unknown
  misc_feature (515)..(515): "n" may be a, t, c, g, other or unknown
  misc_feature (525)..(525): "n" may be a, t, c, g, other or unknown
  misc_feature (533)..(533): "n" may be a, t, c, g, other or unknown
  misc_feature (543)..(543): "n" may be a, t, c, g, other or unknown
  misc_feature (563)..(563): "n" may be a, t, c, g, other or unknown
  misc_feature (573)..(573): "n" may be a, t, c, g, other or unknown
gttaattttttacagctttattttagacagatagtttaagaaccaaagacatacctctgtaatgataaaggaaagaaaacaagctttccttttaagaaaccaaagagcacaaaataagactgtttcattatacataatcaccacaggatattaggcactctgacagggttaggcaanattcttggtgtgaggtgaagcacaggcactttatttgtacagtgctgctgattctaattttgaaggtaggtattataaaagtctttacttgtcaccttatttctggccccaacacagcagcctatagttttaaaagttctgtttctccctggtctttgttcgtatacacatcgaaagtaacttaaaaacaaggatccaagggggccatacttcatatgttatctaaatgttaatatgagaactcaaaagtaggcagattatatgaatacatattcttacctctgctacaaataaaaacaccccaaacccttcntcatacttttattaaaattccgatnttaactgttncctttatntccattcctnaaaatttttattgcttaatnaatccagatnttttttt

SEQ ID NO: 9929 - DNA, 418 bp, Homo sapiens
  misc_feature (27)..(27): "n" may be a, t, c, g, other or unknown
  misc_feature (118)..(118): "n" may be a, t, c, g, other or unknown
  misc_feature (367)..(367): "n" may be a, t, c, g, other or unknown
  misc_feature (370)..(370): "n" may be a, t, c, g, other or unknown
  misc_feature (396)..(396): "n" may be a, t, c, g, other or unknown
  misc_feature (399)..(399): "n" may be a, t, c, g, other or unknown
  misc_feature (402)..(402): "n" may be a, t, c, g, other or unknown
  misc_feature (411)..(412): "n" may be a, t, c, g, other or unknown
agaaaggcagatgatttctttattgtnaagacagcagttacaaaagagaataaatatgacattaggatatatttgttaaaaatacaacaaaaacccctagtatttgtgagcaaccccnagaactcacaagtatgggggataagaacatctacagctggataccctgaaacagatgttataaactggctaatggtgagtatggccatgactttggggatgtttgaaaggccctggatctgtcacttgggaacgtcagcggtctactgtaatacaatttgcacagagtcagagtgaacaggaacccttttactcattggtatcctaactattctttcgttcttacagtgaaattattacagtatttaanaantggggaaaaaggctgaactgggaaanacntanacggagccnngtttaa

SEQ ID NO: 9930 - DNA, 604 bp, Homo sapiens
  misc_feature (171)..(171): "n" may be a, t, c, g, other or unknown
  misc_feature (183)..(183): "n" may be a, t, c, g, other or unknown
  misc_feature (423)..(423): "n" may be a, t, c, g, other or unknown
  misc_feature (426)..(426): "n" may be a, t, c, g, other or unknown
  misc_feature (439)..(439): "n" may be a, t, c, g, other or unknown
  misc_feature (450)..(450): "n" may be a, t, c, g, other or unknown
  misc_feature (484)..(484): "n" may be a, t, c, g, other or unknown
  misc_feature (514)..(514): "n" may be a, t, c, g, other or unknown
  misc_feature (524)..(524): "n" may be a, t, c, g, other or unknown
  misc_feature (534)..(534): "n" may be a, t, c, g, other or unknown
  misc_feature (570)..(570): "n" may be a, t, c, g, other or unknown
  misc_feature (599)..(601): "n" may be a, t, c, g, other or unknown
gtgttaaaattacttttattcagggatgaaaaatacaatatgtaaccagattagatgatagtctgtgattatttctttaccacatatttcaaaagaactacatacttacttcccattgttactgcaatatatttctttttatttattattacttagaaagttacaatgtantgttttacgtancttttctttaatagcagatagaggacattttgcatacaaatacaggcagaaaaaaaattaacacatgactttttaaagtaagaacaagggaagacaccaaatctacaacttggagttgagagctcagggaattgttttttctttaaataggtgctttcttgggtatgacatggcctgataaaagctctagactttgcagactgcagcagcataaagcagtttccaatgcaatggatgaanatngatctgaaggtanaaaaggtgtcntggctttcccttttatattaaacaattttcttcntttccaaatatctctgctgccaataaaaancctggccccnacccccccanctattccaaataataccattccacttttaacccccnctcgggccattccccttaaaaaaaccccnnnaaa

SEQ ID NO: 9931 - DNA, 519 bp, Homo sapiens
  misc_feature (91)..(91): "n" may be a, t, c, g, other or unknown
  misc_feature (199)..(199): "n" may be a, t, c, g, other or unknown
  misc_feature (233)..(233): "n" may be a, t, c, g, other or unknown
  misc_feature (338)..(338): "n" may be a, t, c, g, other or unknown
  misc_feature (364)..(364): "n" may be a, t, c, g, other or unknown
  misc_feature (429)..(429): "n" may be a, t, c, g, other or unknown
  misc_feature (432)..(432): "n" may be a, t, c, g, other or unknown
  misc_feature (460)..(460): "n" may be a, t, c, g, other or unknown
  misc_feature (463)..(463): "n" may be a, t, c, g, other or unknown
  misc_feature (468)..(468): "n" may be a, t, c, g, other or unknown
  misc_feature (470)..(470): "n" may be a, t, c, g, other or unknown
  misc_feature (480)..(480): "n" may be a, t, c, g, other or unknown
atgaataagaaagctttttattttacaggtctttgtgggaagaaacagaaagaaatcacaaaagcaattaagagagctcaaataatgggtnagaaagaatacctcaacaactgaattgagctagctgaaattttgctcattatgttttgtcaagaactttaattatctctttacagggtttatgccagttacatacaangatcctgcatatctcaaggaccctaaagtttgtnacatcagatatcgggaataaattctatcacgttaccactaataaacttattttacagtaagtggttgtatgatgccaatactgactcaaaccaacctttggatanaaaagtgtttgaggaatgaggtaaanaatgacacttccccttcataccaatgtccattaagcagattgcttatttaaaatgttaacactcntcncattttatctatgttgaataaaaatggntcngtgtnantgtcctttanatctgatcccccaatagctcctaccataatcccttccat

SEQ ID NO: 9932 - DNA, 486 bp, Homo sapiens
  misc_feature (75)..(75): "n" may be a, t, c, g, other or unknown
  misc_feature (347)..(347): "n" may be a, t, c, g, other or unknown
  misc_feature (435)..(435): "n" may be a, t, c, g, other or unknown
  misc_feature (444)..(444): "n" may be a, t, c, g, other or unknown
  misc_feature (448)..(448): "n" may be a, t, c, g, other or unknown
  misc_feature (461)..(461): "n" may be a, t, c, g, other or unknown
  misc_feature (470)..(470): "n" may be a, t, c, g, other or unknown
  misc_feature (473)..(473): "n" may be a, t, c, g, other or unknown
  misc_feature (483)..(483): "n" may be a, t, c, g, other or unknown
gatttaaggaatttctttattggaattccactttacctcgccacaagggagctggctttcatgacaaagagagantgagccctgaacaaagtattcgttaacattttacaacagacaacatatacatgtcctgcatgacatctttacaataacacattccaaaaacaatcaaacatttaacaggattattaagaaacattaatttccttctctctagatgactggtactttagctttttagcttctgcaataaaatgcgttccttctcagcatttctattcataggaatccctgaatcacttctgtcatgtaaggtgcgaattcatgttgacggtgtgttccattanttactgaatgtgtcaaaatcctctccacggtagaaccttttattgtagcataatgtgtgaatacacttccaggttatccctcctcccnaattcctcnttcnttatgggaattcntctgaaacnttnaaaaagttcntcc

SEQ ID NO: 9933 - DNA, 502 bp, Homo sapiens
  misc_feature (66)..(66): "n" may be a, t, c, g, other or unknown
  misc_feature (216)..(216): "n" may be a, t, c, g, other or unknown
  misc_feature (344)..(344): "n" may be a, t, c, g, other or unknown
  misc_feature (436)..(436): "n" may be a, t, c, g, other or unknown
  misc_feature (450)..(450): "n" may be a, t, c, g, other or unknown
  misc_feature (458)..(458): "n" may be a, t, c, g, other or unknown
  misc_feature (462)..(462): "n" may be a, t, c, g, other or unknown
  misc_feature (482)..(482): "n" may be a, t, c, g, other or unknown
  misc_feature (488)..(488): "n" may be a, t, c, g, other or unknown
  misc_feature (498)..(498): "n" may be a, t, c, g, other or unknown
gacgtaataatctatttttattcattttaaatcaaagagaccattccatttcctaacaaacaggtnagttacaaaagtagtccattttacttttcatcagtctttccctgttttgaacaagtttttttgagaattcttagttttagtttttgtttagcttacacactgaaaattttgagaagcatctaaaaaaatccacaattagtgcaaaaagangggacaatactttaagtcattccttctataaaaagaattaaggttactaaatgccaatttttaagcaaatatatagtttcctatttgccttctgaaagacagcagatataaaaatagttcaatattangtttaacaagggtttgaacaacacatgttactatcagctttattttacctgcaaaaatattttagctacacttggaaaaaaataaacttganaatataacttcccntttcttanggcngaagccagaatacctattcntttccntttaaattgnaaaa

SEQ ID NO: 9934 - DNA, 333 bp, Homo sapiens
  misc_feature (48)..(48): "n" may be a, t, c, g, other or unknown
  misc_feature (96)..(96): "n" may be a, t, c, g, other or unknown
  misc_feature (131)..(131): "n" may be a, t, c, g, other or unknown
  misc_feature (173)..(173): "n" may be a, t, c, g, other or unknown
  misc_feature (261)..(261): "n" may be a, t, c, g, other or unknown
  misc_feature (264)..(265): "n" may be a, t, c, g, other or unknown
  misc_feature (308)..(309): "n" may be a, t, c, g, other or unknown
  misc_feature (321)..(321): "n" may be a, t, c, g, other or unknown
  misc_feature (329)..(329): "n" may be a, t, c, g, other or unknown
gtacactttgggatttattaagattctagaatttaaaaacaggaaaangtgccattagtaaaaactccatcactaacattttggtaccactcgtanagcgtcacataaatattcagaccatgataactcantgcaggaatgttatcaaatatttccatgcaatctggaactangaccacagctggcaattgggggtctgaaagcccgacatcccttacgctgcttcctacatcttgacaacaggaagccaagtgatactangtnntgcactacaacagtgaacataacccccctctgtttttttgccnngtttttttaacnaccaaccnaaac

SEQ ID NO: 9935 - DNA, 585 bp, Homo sapiens
  misc_feature (280)..(280): "n" may be a, t, c, g, other or unknown
  misc_feature (293)..(293): "n" may be a, t, c, g, other or unknown
  misc_feature (331)..(331): "n" may be a, t, c, g, other or unknown
  misc_feature (355)..(355): "n" may be a, t, c, g, other or unknown
  misc_feature (357)..(357): "n" may be a, t, c, g, other or unknown
  misc_feature (452)..(452): "n" may be a, t, c, g, other or unknown
  misc_feature (541)..(541): "n" may be a, t, c, g, other or unknown
  misc_feature (547)..(547): "n" may be a, t, c, g, other or unknown
  misc_feature (549)..(549): "n" may be a, t, c, g, other or unknown
  misc_feature (563)..(564): "n" may be a, t, c, g, other or unknown
  misc_feature (570)..(571): "n" may be a, t, c, g, other or unknown
ctagttcctgtaacaaatgtattaaatattcattctgagaattaatgatactggcactagatggtgctatcccatcaggtaagtcaattcctttaaaaacaacattcgatccttctgattgtcgtaaaagactagtttctttttcaagatggtctatctttaaattagcttttgccaactgctgtgaataatttatagcctctttccgagattccctgagcccctgtcttaattcttcatttcttccggtaagctgatcaacttgggctttcaaatgcanactcgcatcaaanattccttctgcattctttgattctatagcattaactantctttcgaggctagggataattananatgtttctcctcctttaacatcaggatctttctgcatttccttaattgcttgcaatatttctttcataccttcttcaagttgcttattttcttcnactaattcttttaatttattctgaaatttgggtatcactgtcctactcctttctaaatctctttctttttcaattaattctcttgaaanaaatcncnccttgaaaggtgcnncccccnntttttgaagggcca

SEQ ID NO: 9936 - DNA, 389 bp, Homo sapiens
  misc_feature (257)..(257): "n" may be a, t, c, g, other or unknown
  misc_feature (353)..(353): "n" may be a, t, c, g, other or unknown
  misc_feature (359)..(359): "n" may be a, t, c, g, other or unknown
  misc_feature (361)..(361): "n" may be a, t, c, g, other or unknown
  misc_feature (366)..(366): "n" may be a, t, c, g, other or unknown
  misc_feature (377)..(377): "n" may be a, t, c, g, other or unknown
  misc_feature (383)..(383): "n" may be a, t, c, g, other or unknown
  misc_feature (388)..(388): "n" may be a, t, c, g, other or unknown
cagtagacaagcaacttttagtttttacaagttatagaaaacgcaaattttcatagcatcaattttagaaaagaaagattaaggttcccatctgcggtgctttttccaatccgcccatcacccgtccctctgaagaagcacgcacactccagatgtctccttcattgatcacatttctctctggctgtctctattcctaagtcagagttactcttgctgctgctgctgctgctgctgctgctgctgctgctgctacngtggtggcggcggcggtggtggcggtggctgcccaagcctcatggttgtcagctccatgcctcctgaacttcactccactgaaatctggttgggtntgaaananacccngtggaatgaangacaanaaaanc

SEQ ID NO: 9937 - DNA, 514 bp, Homo sapiens
  misc_feature (30)..(30): "n" may be a, t, c, g, other or unknown
  misc_feature (191)..(191): "n" may be a, t, c, g, other or unknown
  misc_feature (194)..(194): "n" may be a, t, c, g, other or unknown
  misc_feature (277)..(277): "n" may be a, t, c, g, other or unknown
  misc_feature (361)..(361): "n" may be a, t, c, g, other or unknown
  misc_feature (373)..(373): "n" may be a, t, c, g, other or unknown
  misc_feature (403)..(403): "n" may be a, t, c, g, other or unknown
  misc_feature (430)..(430): "n" may be a, t, c, g, other or unknown
  misc_feature (436)..(436): "n" may be a, t, c, g, other or unknown
  misc_feature (454)..(454): "n" may be a, t, c, g, other or unknown
  misc_feature (457)..(457): "n" may be a, t, c, g, other or unknown
  misc_feature (461)..(461): "n" may be a, t, c, g, other or unknown
  misc_feature (495)..(495): "n" may be a, t, c, g, other or unknown
  misc_feature (504)..(504): "n" may be a, t, c, g, other or unknown
gattgtttggaatttattctcttaaataanaatgtaacatttgttaaaaaaaaaattaaaagcacgacaacttggtttcacagtaaacggcaaaaacaaagttacacaattaaataaaaactcacaaagaaacacaccaagaactcacaagagcacaagttaaaaacaaaggcaaaaatggaagtggaganaangcgggcagtaaacaggcagcagtggcgtgttccttggcacagctaatcctctcctgttgggctctcgtaccgccgccgggaanccggctggctgtccgcccctcccgcaggcaccccaagctgaatggctccggaaaaaaattgaaaccccttgggtgccctgctcngaaccttaaaanggctatggtggaaactccttttggggacancctaagaaatgttccattttcttgccnaaaaanaactgaaagatgccctanccncccnaaaaataagaattgggctcaaacggctaactccnttggaaccnaacaggaaac

SEQ ID NO: 9938 - DNA, 466 bp, Homo sapiens
  misc_feature (77)..(77): "n" may be a, t, c, g, other or unknown
  misc_feature (276)..(276): "n" may be a, t, c, g, other or unknown
  misc_feature (305)..(305): "n" may be a, t, c, g, other or unknown
  misc_feature (323)..(323): "n" may be a, t, c, g, other or unknown
  misc_feature (353)..(353): "n" may be a, t, c, g, other or unknown
  misc_feature (380)..(380): "n" may be a, t, c, g, other or unknown
  misc_feature (406)..(406): "n" may be a, t, c, g, other or unknown
  misc_feature (410)..(410): "n" may be a, t, c, g, other or unknown
  misc_feature (425)..(425): "n" may be a, t, c, g, other or unknown
  misc_feature (430)..(430): "n" may be a, t, c, g, other or unknown
  misc_feature (454)..(454): "n" may be a, t, c, g, other or unknown
  misc_feature (457)..(457): "n" may be a, t, c, g, other or unknown
ctgaattgaatgctgcatttattatagtgtttttattaacaaactttcaccagaaagttccgagtgtgttaatacancaggcacattggcttccatgtttggcatttgacagtccacagaattgcacttcactctcacaattctgccacaactttgtgaattatttgggcaagacctacaaccagcctcccccattaaatgattaaataggacttttggttcattctgattgaaatgttctgagttcacacttgcatccgtctgtgacaagctcanctccactttccctcctgccttgttttcantccctccactgcctccanattggtcacgtctctatttttacagaagtnccctttttttattctccggggtcgcanacactttttgaattacgaatccaatngctnctgccaaacaaaatnacaanaggctctgccacctttgggaaaangcnctcctatgc

SEQ ID NO: 9939 - DNA, 482 bp, Homo sapiens
  misc_feature (388)..(388): "n" may be a, t, c, g, other or unknown
  misc_feature (404)..(404): "n" may be a, t, c, g, other or unknown
  misc_feature (432)..(432): "n" may be a, t, c, g, other or unknown
  misc_feature (438)..(438): "n" may be a, t, c, g, other or unknown
  misc_feature (463)..(463): "n" may be a, t, c, g, other or unknown
  misc_feature (469)..(469): "n" may be a, t, c, g, other or unknown
  misc_feature (471)..(471): "n" may be a, t, c, g, other or unknown
atcacttaacatttaataattgcaaatatatttattacaatttacagattaattatgttatatacacaaatataattttaactataaaatcccaactagttacatttaaattattgatctgtagaagccaatttagagtcttctagtcccctaactttaccttccttaaattatacaaaaataaaatctgatagttttgatttcaagttaaagatgaagaagtgttacatttcatcactcagaaatggaacttttacctgtctgtacaaagccttttacatgctacattgacacttaaagcaccattaacaagactttaaatgttataaaatgtttaattaaaacctcccaagaatttctctttaagattacggggggtttgaacttngttctaactagaaatngggatgaaaacaaaaatttggctttttnctcctncagtccaactttaaaatagtccttnctgtcntnctaatccctcc

SEQ ID NO: 9940 - DNA, 430 bp, Homo sapiens
  misc_feature (199)..(199): "n" may be a, t, c, g, other or unknown
  misc_feature (293)..(293): "n" may be a, t, c, g, other or unknown
  misc_feature (358)..(359): "n" may be a, t, c, g, other or unknown
  misc_feature (364)..(364): "n" may be a, t, c, g, other or unknown
  misc_feature (370)..(370): "n" may be a, t, c, g, other or unknown
  misc_feature (410)..(410): "n" may be a, t, c, g, other or unknown
  misc_feature (420)..(420): "n" may be a, t, c, g, other or unknown
  misc_feature (429)..(429): "n" may be a, t, c, g, other or unknown
atggtattaaatataagtcttagcacctttggcatttttgtccaaacagacttcgacatatgaagtggggacataaccctcttcatcttcatttctccgaatgcgggtccagccatcgcctttgtcttcctctatgacatacaatgtttctccttcaactacggaaatcgttccttcattctgaccttcaaatgtgtanagagctttgcacgtccctatggcagggaggggctcctcatcatcaaactcgtcgtcaaaatccgtggccagcaccttcatctcactctcctgantctgctcctctgtgttacttgccatctggggctctcacgggtccttggggggcaattgttgaatnntgggntgggtnctgggctgttcttaaaatcccgcctctgccggggcgcccngctctttgcnttttggganc

SEQ ID NO: 9941 - DNA, 441 bp, Homo sapiens
  misc_feature (1)..(441): "n" may be a, t, c, g, other or unknown
nnnnnnnnnnnnnnnnnnnnnnnnnnnnnnnnnnnnnnnnnnnnnnnnnnnnnnnnnnnnnnnnnnnnnnnnnnnnnnnnnnnnnnnnnnnnnnnnnnnnnnnnnnnnnnnnnnnnnnnnnnnnnnnnnnnnnnnnnnnnnnnnnnnnnnnnnnnnnnnnnnnnnnnnnnnnnnnnnnnnnnnnnnnnnnnnnnnnnnnnnnnnnnnnnnnnnnnnnnnnnnnnnnnnnnnnnnnnnnnnnnnnnnnnnnnnnnnnnnnnnnnnnnnnnnnnnnnnnnnnnnnnnnnnnnnnnnnnnnnnnnnnnnnnnnnnnnnnnnnnnnnnnnnnnnnnnnnnnnnnnnnnnnnnnnnnnnnnnnnnnnnnnnnnnnnnnnnnnnnnnnnnnnnnnnnnnnnnnnnnnnnnnnnnnnnnnnnnnnnnnnnnnnnnnnnnnnnnnnnnn

SEQ ID NO: 9942 - DNA, 395 bp, Homo sapiens
  misc_feature (57)..(57): "n" may be a, t, c, g, other or unknown
  misc_feature (130)..(130): "n" may be a, t, c, g, other or unknown
  misc_feature (154)..(154): "n" may be a, t, c, g, other or unknown
  misc_feature (156)..(156): "n" may be a, t, c, g, other or unknown
  misc_feature (183)..(183): "n" may be a, t, c, g, other or unknown
  misc_feature (205)..(205): "n" may be a, t, c, g, other or unknown
  misc_feature (237)..(237): "n" may be a, t, c, g, other or unknown
  misc_feature (271)..(271): "n" may be a, t, c, g, other or unknown
  misc_feature (319)..(319): "n" may be a, t, c, g, other or unknown
  misc_feature (334)..(334): "n" may be a, t, c, g, other or unknown
  misc_feature (337)..(337): "n" may be a, t, c, g, other or unknown
  misc_feature (347)..(347): "n" may be a, t, c, g, other or unknown
  misc_feature (353)..(353): "n" may be a, t, c, g, other or unknown
  misc_feature (360)..(360): "n" may be a, t, c, g, other or unknown
  misc_feature (374)..(374): "n" may be a, t, c, g, other or unknown
cacattctagcactttattggaacttggttgtgtacatcaatgagatcacatcaaantaaaagcagcattttcacacaataatatcccgatatctgtgctatcttcttacataatttaataaatcccaanatgctcctgattttggtatcgaanancttgagtggtccagaaatatctctacntaaatataaatcatcacatctnaaataaccatcattgttttagtaggtcccaanagtcctgggaacacctcttaaaatataattgccntaggctggctgcataactggtgggaaggaattaaaggggtacacatgnacctaattacagcanganctgggcaganggacanacacaangggatggggggcanaaatcctaaactgggcaggga

SEQ ID NO: 9943 - DNA, 292 bp, Homo sapiens
  misc_feature (45)..(45): "n" may be a, t, c, g, other or unknown
  misc_feature (117)..(118): "n" may be a, t, c, g, other or unknown
  misc_feature (213)..(213): "n" may be a, t, c, g, other or unknown
  misc_feature (226)..(226): "n" may be a, t, c, g, other or unknown
  misc_feature (234)..(234): "n" may be a, t, c, g, other or unknown
  misc_feature (257)..(257): "n" may be a, t, c, g, other or unknown
  misc_feature (260)..(260): "n" may be a, t, c, g, other or unknown
  misc_feature (278)..(278): "n" may be a, t, c, g, other or unknown
  misc_feature (286)..(286): "n" may be a, t, c, g, other or unknown
gtcattttattcttttaataagaaacttttgcttacaaaaacaangtgtaaaaagatttacaaaaatcataaaaacatgatttatatttcacacttgagagacaaaaacaagccccnnaacatggattttaatggaggtggtttgcttcattttaaaagggaaaaaaaaaaaaggaagctgtaaccatacattgatgttaacatagcatgaantttattcttgaanaatttacnttgttgagcgatattaggggaanaanccatttggtgttgcatancattttantgccca

SEQ ID NO: 9944 - DNA, 535 bp, Homo sapiens
  misc_feature (175)..(175): "n" may be a, t, c, g, other or unknown
  misc_feature (194)..(194): "n" may be a, t, c, g, other or unknown
  misc_feature (334)..(334): "n" may be a, t, c, g, other or unknown
  misc_feature (354)..(354): "n" may be a, t, c, g, other or unknown
  misc_feature (377)..(377): "n" may be a, t, c, g, other or unknown
  misc_feature (445)..(445): "n" may be a, t, c, g, other or unknown
  misc_feature (482)..(482): "n" may be a, t, c, g, other or unknown
  misc_feature (505)..(505): "n" may be a, t, c, g, other or unknown
  misc_feature (512)..(512): "n" may be a, t, c, g, other or unknown
  misc_feature (515)..(515): "n" may be a, t, c, g, other or unknown
  misc_feature (527)..(527): "n" may be a, t, c, g, other or unknown
  misc_feature (534)..(534): "n" may be a, t, c, g, other or unknown
gagacggagtctcgctctgtcgcccaggctggagtgcagtggcgggatctcggctcactgcaagctccgcctcccgggttcacgccattctcctgcctcagcctcccaagtagctgggactacaggcgcccgccactacgcccggctaattttttgtatttttagtaaaaatgangtttcaccatgttggccangatggtctcaaacttctgatctcaagtgatccacccgcctcggcctcccaaagtgctgcgattacaggcatgagccaccacgcctggtcaattttctttaactccatttttatccaactaatcttcaaaacactttaaanatttagttataccaaccccnaagttacatctatatttgtgttntgcaaatcctcaaaaaaaatgccatccatgccaaaaaatgaaaaacatttttccccatttaaccttcnaaaacctttttaaaaaaacaaccctatatttccccanttcaaattttacccaaaacttcnttaaaanttntaaaaaaaaaanccctgcng

SEQ ID NO: 9945 - DNA, 588 bp, Homo sapiens
  misc_feature (3)..(3): "n" may be a, t, c, g, other or unknown
  misc_feature (9)..(9): "n" may be a, t, c, g, other or unknown
  misc_feature (23)..(23): "n" may be a, t, c, g, other or unknown
  misc_feature (100)..(100): "n" may be a, t, c, g, other or unknown
  misc_feature (208)..(208): "n" may be a, t, c, g, other or unknown
  misc_feature (323)..(323): "n" may be a, t, c, g, other or unknown
  misc_feature (328)..(328): "n" may be a, t, c, g, other or unknown
  misc_feature (369)..(369): "n" may be a, t, c, g, other or unknown
  misc_feature (399)..(400): "n" may be a, t, c, g, other or unknown
  misc_feature (439)..(439): "n" may be a, t, c, g, other or unknown
  misc_feature (442)..(442): "n" may be a, t, c, g, other or unknown
  misc_feature (456)..(456): "n" may be a, t, c, g, other or unknown
  misc_feature (504)..(504): "n" may be a, t, c, g, other or unknown
  misc_feature (548)..(548): "n" may be a, t, c, g, other or unknown
  misc_feature (551)..(551): "n" may be a, t, c, g, other or unknown
  misc_feature (554)..(554): "n" may be a, t, c, g, other or unknown
  misc_feature (559)..(559): "n" may be a, t, c, g, other or unknown
  misc_feature (580)..(580): "n" may be a, t, c, g, other or unknown
  misc_feature (587)..(587): "n" may be a, t, c, g, other or unknown
atntttttnttttttttagtggncaaaaaaactttattagcttagtctccacccttttaaatgtactctaggtacaaaataaacattatacacatataanatcagtctttccaactttagaatgtataaataagaatgacattttaaaataaaatagtttagtcacagtcacacaaaactaccttctaaggaaaactgtccagtgaanccgttaaatttgtgctttcagctatgaaaaattaaacttaaaatgcattcattcttcttttaatgaaaaataacctacccttggaaacagcataagcattgttatggtagtctanctccnaaatgaaaatgtggactgagttacagtttactggttgttancccacctaaaaacccttgaaaaattaccanncgatcaaagtatttacataatttcaaccctttttcttanganaaaaggtaacacanttccttaacctcttttaaaaggaactttgaaattaaaccttatggtcncaactttcattcaaaaatgttgcttaaatatcaaatttctctcncanacnccatnttcatttcctccgaaacctcnctggttnc

SEQ ID NO: 9946 - DNA, 444 bp, Homo sapiens
  misc_feature (201)..(201): "n" may be a, t, c, g, other or unknown
  misc_feature (222)..(222): "n" may be a, t, c, g, other or unknown
  misc_feature (242)..(242): "n" may be a, t, c, g, other or unknown
  misc_feature (319)..(319): "n" may be a, t, c, g, other or unknown
  misc_feature (376)..(376): "n" may be a, t, c, g, other or unknown
  misc_feature (382)..(382): "n" may be a, t, c, g, other or unknown
  misc_feature (401)..(401): "n" may be a, t, c, g, other or unknown
  misc_feature (408)..(408): "n" may be a, t, c, g, other or unknown
  misc_feature (416)..(416): "n" may be a, t, c, g, other or unknown
  misc_feature (422)..(422): "n" may be a, t, c, g, other or unknown
  misc_feature (443)..(443): "n" may be a, t, c, g, other or unknown
actaggttcacacaaatctttattaattaaaataggaaccattacaatcaacacatttttgccaatgaagaaataagtttgtttactcctgtagcataaaaatccatgcttccaaatttgacgaactcttggaaagcattttctgtgtcctgctagttgtggaagcaatttccctgcaaaacgttgctgagatgcctaaanaagtggtagtttgttggcaanaggtcaggtgaatatggcanatgaggcaaaacttcatagcccaattagttcaattttcgaaacgttggttgtgcaacgtgcggcccaatttttgtcntaaaaaaaattgggccctttctggtggccaatgccggctgcaggcattgcatttttnggtgcnctcattaatttgctgaacntacttancaaatttntggttncccctgaaattcaaaaacctnt

SEQ ID NO: 9947 - DNA, 589 bp, Homo sapiens
  misc_feature (36)..(36): "n" may be a, t, c, g, other or unknown
  misc_feature (217)..(217): "n" may be a, t, c, g, other or unknown
  misc_feature (518)..(518): "n" may be a, t, c, g, other or unknown
  misc_feature (533)..(533): "n" may be a, t, c, g, other or unknown
  misc_feature (537)..(537): "n" may be a, t, c, g, other or unknown
  misc_feature (542)..(542): "n" may be a, t, c, g, other or unknown
aggtttgttaacattaacacatgctttattcaaganataatattcaaagagttaaatcctaagagttatccaccctacagtaaaaaggggaagtgggtaccacttatgacatgtacataaattccacttttatatttctgaataaagctgcaattgcttctttgatagagccatttcttaaaacttttgctaataaggctatgtgaactgtgttcanaaactttgacaacatgcacactcactcctctcaaagtcagtacccaggattttcactccaggctgagtacctattaagtaactaggacttcagactgcatgttactatatgaattcaatttgactcacctccagtatgtttatctaccacaactattgtttaaaataatcagatgaatgtttatcataactttataactcccccaaattatacttcagtatttaacatggtagtttcaaaaaataaatattcaagggcccagttttaaattttcctcccatgttatccacaaaagttgaanaatacatgtttggancccnactcncaaataatgttaccttcctttaaaattacttgttgccataaaaatta

SEQ ID NO: 9948 - DNA, 295 bp, Homo sapiens
  misc_feature (198)..(198): "n" may be a, t, c, g, other or unknown
  misc_feature (238)..(238): "n" may be a, t, c, g, other or unknown
  misc_feature (245)..(245): "n" may be a, t, c, g, other or unknown
  misc_feature (255)..(255): "n" may be a, t, c, g, other or unknown
  misc_feature (269)..(269): "n" may be a, t, c, g, other or unknown
  misc_feature (285)..(285): "n" may be a, t, c, g, other or unknown
  misc_feature (288)..(288): "n" may be a, t, c, g, other or unknown
aaaatgctgactggtgacctactaaatggatttcataacccactgtgtcttgactcccggacagtgtgaaaacctacatacaagctcggcttccagagcctgatgctccaggctggaccctcgtcggctcaggcaagctgctctaaccaggccccactccagctccagctccccaagatgggggttagaaaaacgtcnacatgcagggagggccacaaacaggctgggctggcatgangtatgangtatgaaccncatggctgagcaanaacctgggccaggtcntanactccca

SEQ ID NO: 9949 - DNA, 213 bp, Homo sapiens
  misc_feature (197)..(197): "n" may be a, t, c, g, other or unknown
  misc_feature (199)..(199): "n" may be a, t, c, g, other or unknown
  misc_feature (201)..(201): "n" may be a, t, c, g, other or unknown
  misc_feature (204)..(204): "n" may be a, t, c, g, other or unknown
  misc_feature (206)..(207): "n" may be a, t, c, g, other or unknown
  misc_feature (213)..(213): "n" may be a, t, c, g, other or unknown
aagatttttctttttcttcaaactttagacctggctcacggcgagccttagaaaagcagtgagtgccacagacactgcagggtgaggccgagggtgccccgcacggcccagcaggtcctgcctggcagtttctgctcaaaaggctgggacacacaggatggggcgcgttaacacaggggaggggggggcggatttancncnccntnnaccctn

SEQ ID NO: 9950 - DNA, 554 bp, Homo sapiens; identical to SEQ ID NO: 5801
  misc_feature (1)..(554): "n" may be a, t, c, g, other or unknown

SEQ ID NO: 9951 - DNA, 593 bp, Homo sapiens
  misc_feature (135)..(135): "n" may be a, t, c, g, other or unknown
  misc_feature (173)..(173): "n" may be a, t, c, g, other or unknown
  misc_feature (176)..(176): "n" may be a, t, c, g, other or unknown
  misc_feature (349)..(349): "n" may be a, t, c, g, other or unknown
  misc_feature (476)..(476): "n" may be a, t, c, g, other or unknown
  misc_feature (481)..(481): "n" may be a, t, c, g, other or unknown
  misc_feature (523)..(523): "n" may be a, t, c, g, other or unknown
  misc_feature (527)..(527): "n" may be a, t, c, g, other or unknown
  misc_feature (571)..(571): "n" may be a, t, c, g, other or unknown
  misc_feature (575)..(575): "n" may be a, t, c, g, other or unknown
  misc_feature (582)..(582): "n" may be a, t, c, g, other or unknown
  misc_feature (587)..(587): "n" may be a, t, c, g, other or unknown
  misc_feature (591)..(591): "n" may be a, t, c, g, other or unknown
cttcccagcttgagttttattataaagaataatacatacagttaactattggtaagaaacgtatattaaacaaggtgtctgtagataaaaacacataaaacaaaaatatgtattggttggatgacaaaaatgtantgatcagaggcgtggaagctaaccctgtatttctccangancagtggttcagtatgggctaatagtgttcacagtatctttagagaacatactccagcactcaccaaggccatgcttcttgcatcacagctatgcttcctgcacccaccaaggccatgactcttccaggtaaacccaaataagggagaaaggaggcaataacaggagcggggangagtccctgaaatcccctccttttccagaatacctaatgagcattccacccccttattaaaaaaacatccgggctgggcgcggtggctcacacctgtaatcccaccactttgggaagataagcagcnaatcnggaagtccggaaatcaaaaacacccggctaacacggtgaaancctntccctctaaaaattaaaattttcccccggtttgttgccggcccntttncccctcnccggnggtnag

SEQ ID NO: 9952 - DNA, 403 bp, Homo sapiens
  misc_feature (7)..(7): "n" may be a, t, c, g, other or unknown
  misc_feature (34)..(34): "n" may be a, t, c, g, other or unknown
  misc_feature (46)..(46): "n" may be a, t, c, g, other or unknown
  misc_feature (263)..(263): "n" may be a, t, c, g, other or unknown
  misc_feature (296)..(296): "n" may be a, t, c, g, other or unknown
  misc_feature (340)..(340): "n" may be a, t, c, g, other or unknown
  misc_feature (342)..(342): "n" may be a, t, c, g, other or unknown
  misc_feature (351)..(351): "n" may be a, t, c, g, other or unknown
  misc_feature (358)..(359): "n" may be a, t, c, g, other or unknown
  misc_feature (393)..(393): "n" may be a, t, c, g, other or unknown
  misc_feature (397)..(397): "n" may be a, t, c, g, other or unknown
gagacanagtctcactctgtcgcccagcctggantgcagtggcganatcttggctcactgcaaactctgcttcccaggttcaagtgatcttccagcctcaacctcccaagtagctgggactttaggtgtgtgccaccacacctggctgttttgtatttttagtacagatgaaatttcaccatgttggccaggctggtctcaaactcctgacctcaactgacccacctgccttggactcccaaagtgctgggattacaggcgtnagccccaagctgggctgcccttgaggaactgantgtggctctcaggtcattccccatattcacatcatgaatgaaananttgtcagangcaagtnncatgttaggtaatggggcgacagcacactgggancaangtccca

SEQ ID NO: 9953 - DNA, 572 bp, Homo sapiens
  misc_feature (20)..(20): "n" may be a, t, c, g, other or unknown
  misc_feature (22)..(22): "n" may be a, t, c, g, other or unknown
  misc_feature (54)..(54): "n" may be a, t, c, g, other or unknown
  misc_feature (78)..(78): "n" may be a, t, c, g, other or unknown
  misc_feature (88)..(88): "n" may be a, t, c, g, other or unknown
  misc_feature (166)..(166): "n" may be a, t, c, g, other or unknown
  misc_feature (330)..(330): "n" may be a, t, c, g, other or unknown
  misc_feature (359)..(359): "n" may be a, t, c, g, other or unknown
  misc_feature (393)..(393): "n" may be a, t, c, g, other or unknown
  misc_feature (451)..(451): "n" may be a, t, c, g, other or unknown
  misc_feature (461)..(461): "n" may be a, t, c, g, other or unknown
  misc_feature (466)..(466): "n" may be a, t, c, g, other or unknown
  misc_feature (516)..(516): "n" may be a, t, c, g, other or unknown
  misc_feature (520)..(520): "n" may be a, t, c, g, other or unknown
  misc_feature (530)..(530): "n" may be a, t, c, g, other or unknown
  misc_feature (557)..(557): "n" may be a, t, c, g, other or unknown
acaaatttcaatctatatanantttaatttgtgcatttggggaaaatttatgantgcaaaaaacacttgttttcttanaatgacatantgaaagggacatttcatttgaatgcatagtgtacattctaaaatatcctaatttctttacaaagtgcttgagcagtcncatacacatacagtaatagcaaaatatatttacactctataaagcttaaaattttaaatctgactaaaatatatatatattttaaactacaaaaaattagtgctttcttcagcttaattgtgtaaatagaccctgccttctaatttttttagtgattgacttcnattaaaaaaaaaattctgtacactgtgtngttacaaaatgctgtcagtttttaatgctaagancctattttagacattactttctttgctatttgagaacccaaaaagtgagcagactgtnctccaaaatntttangggtttaatttaatgttgttttaccccgtttaatttaaaccccaaaaatnagcnaaattccccnatgttccttggccaggaaataactggncttttaaaaacttta

SEQ ID NO: 9954 - DNA, 591 bp, Homo sapiens
  misc_feature (343)..(343): "n" may be a, t, c, g, other or unknown
  misc_feature (376)..(376): "n" may be a, t, c, g, other or unknown
  misc_feature (426)..(426): "n" may be a, t, c, g, other or unknown
  misc_feature (450)..(450): "n" may be a, t, c, g, other or unknown
  misc_feature (470)..(470): "n" may be a, t, c, g, other or unknown
  misc_feature (477)..(477): "n" may be a, t, c, g, other or unknown
  misc_feature (497)..(497): "n" may be a, t, c, g, other or unknown
  misc_feature (528)..(528): "n" may be a, t, c, g, other or unknown
  misc_feature (544)..(544): "n" may be a, t, c, g, other or unknown
  misc_feature (565)..(565): "n" may be a, t, c, g, other or unknown
  misc_feature (569)..(569): "n" may be a, t, c, g, other or unknown
  misc_feature (574)..(574): "n" may be a, t, c, g, other or unknown
  misc_feature (588)..(588): "n" may be a, t, c, g, other or unknown
ctgttcctaacacaaatgtgaatttattggttgatttgatatttaaaatagtacttttacaaaatcatctcagaaaatatactacatttattaaaattcctacaaaccattgcagaaaatattaaaccctctaaccaacctaacactcgctttcagaggcacttgtgatgattttcacagcttccatagttgcaaagaacaaagaaatcatcttccaacaggggtggaattagataagaataatccaaaaaatatttatttctttacagactcacagattgcttgatgtttaggggctcttacctaggatacctaattattcaaggttttcctaatttagtanactttttcattgcctacaatctacaatattcancaaagtattaagggaaaatgaacccaagaaaccttaaccacctcaaatanttttatggatatactaaactgtcnagttcaatctttatcttaanacttganaactggaatgccggaaaacnaactttgggtggaattctggaattaaaaaanttaaacctgggcgaantaaggtgtggcaccttgtttntttnttccnaaaacccaaccctngac

SEQ ID NO: 9955 - DNA, 585 bp, Homo sapiens
  misc_feature (86)..(86): "n" may be a, t, c, g, other or unknown
  misc_feature (412)..(412): "n" may be a, t, c, g, other or unknown
  misc_feature (446)..(446): "n" may be a, t, c, g, other or unknown
  misc_feature (476)..(476): "n" may be a, t, c, g, other or unknown
  misc_feature (478)..(478): "n" may be a, t, c, g, other or unknown
  misc_feature (526)..(526): "n" may be a, t, c, g, other or unknown
  misc_feature (548)..(548): "n" may be a, t, c, g, other or unknown
  misc_feature (553)..(553): "n" may be a, t, c, g, other or unknown
  misc_feature (567)..(567): "n" may be a, t, c, g, other or unknown
  misc_feature (576)..(576): "n" may be a, t, c, g, other or unknown
gagacggactctcgctctgtcacccaggctggagtgcagtggtgccatctcggctcactgcaagctctgcctcccaggttcaaganattctcctgcctcagcctcccgagtagctggaactacaggcacccgccaccacgcccggctaattttttgtatttttaatggagacgggtttcaccgtgttagccaggatggtctctatctcctgacctcgtgatctgcccacctcggccttccaaagtgctgggattacaggcgtgagccactgcgcctggcctcaaggtatttctttaaaaatggaaattaatatcaaaaagtaagcttttcagaaaacacattcctaactttaataaagacaaaagaagccatttccaacaaaaagtaacacttaatattctaagactccccncaactttcagattttaatttcaaccttcctgggnaagctccctgcttcttagcctttccatgtnanaatcatctgtggatcctttcccaatacacatacattaaattagggctnggggaagggaaattttctttanaatcngcctcctttggtcntgatttcancaatttaaa

SEQ ID NO: 9956 - DNA, 501 bp, Homo sapiens
  misc_feature (28)..(28): "n" may be a, t, c, g, other or unknown
  misc_feature (73)..(73): "n" may be a, t, c, g, other or unknown
  misc_feature (198)..(198): "n" may be a, t, c, g, other or unknown
  misc_feature (441)..(441): "n" may be a, t, c, g, other or unknown
  misc_feature (461)..(461): "n" may be a, t, c, g, other or unknown
  misc_feature (471)..(471): "n" may be a, t, c, g, other or unknown
  misc_feature (483)..(483): "n" may be a, t, c, g, other or unknown
  misc_feature (486)..(486): "n" may be a, t, c, g, other or unknown
  misc_feature (492)..(492): "n" may be a, t, c, g, other or unknown
  misc_feature (499)..(499): "n" may be a, t, c, g, other or unknown
gagaacacattcgtattttttgacccanaccaaaaacttttggtcctttttaacggtacattcctacattaanaaaataattagtgataaatatattctctttttgtacaaattcaattccagtttttaacaccctaattcacaaaattcatgccaatgtatgcgctgataggctgaagccaagctgtgaaacttcanaacacagttaagggcagcaatcaagcccgttccaggctgacgcgcagggcgttcttacatcacatcccggggtgccagctcaaccccggcacgtcagcacctgggtgaagggagtgccgggcactgatgggatcaatacaagacacagaccccttccgtcgggagctggctaatctctacagtgccccacaccactgatttctatcaggctccaagggctcccattgaagaaaaaggctttgnccctctgaatcctgggggantttttttccnggcaaaggcccnttnttttcncaaaccncc

SEQ ID NO: 9957 - DNA, 553 bp, Homo sapiens
  misc_feature (106)..(106): "n" may be a, t, c, g, other or unknown
  misc_feature (332)..(332): "n" may be a, t, c, g, other or unknown
  misc_feature (458)..(458): "n" may be a, t, c, g, other or unknown
  misc_feature (476)..(476): "n" may be a, t, c, g, other or unknown
  misc_feature (481)..(481): "n" may be a, t, c, g, other or unknown
  misc_feature (487)..(487): "n" may be a, t, c, g, other or unknown
  misc_feature (508)..(509): "n" may be a, t, c, g, other or unknown
  misc_feature (518)..(518): "n" may be a, t, c, g, other or unknown
aatatagagaactgattatgttcacttgtaacctgtcattccaaaattcttcaggatgtttaatgttcaagtgtccatattcccagtcccactggatgcctggcangatgcaaccatctgaatgagtggaagtataatgtttgcaccaggtattatattaggagccttgaacccagaatatgtctgattaagtcttttagcccaataatttgccactgatgccaagtctggtaattttgaaggagaaagttcaaccataacggggtgatacagggcacccccgtactcaaaaaactttcaaagtgctttctaaacaagtttctctttctccntgaatacaacgtcagtcacaactgatggcagtacaatcgatccatccatacactgctctaagaacatcttgatgggtataatatgctgtcttcatgctctacctgctactaatttaatttggtccngttactcttccctggganaaacnaattcntcttaaatccaattccttttnnaccaaaaanaaatgatttcccccctgggcctccctttaaccaac

SEQ ID NO: 9958 - DNA, 436 bp, Homo sapiens
  misc_feature (61)..(61): "n" may be a, t, c, g, other or unknown
  misc_feature (188)..(188): "n" may be a, t, c, g, other or unknown
  misc_feature (347)..(347): "n" may be a, t, c, g, other or unknown
  misc_feature (349)..(349): "n" may be a, t, c, g, other or unknown
  misc_feature (359)..(359): "n" may be a, t, c, g, other or unknown
  misc_feature (405)..(405): "n" may be a, t, c, g, other or unknown
  misc_feature (420)..(420): "n" may be a, t, c, g, other or unknown
  misc_feature (422)..(422): "n" may be a, t, c, g, other or unknown
  misc_feature (431)..(431): "n" may be a, t, c, g, other or unknown
ctgtgtcatgatttataattgtatgcatgctttgatctttctcatcacaggcagcactganaagtgaaggaatatttgggaggatcagaagcttggtcctgattttgccatcaacaggaacttgatgacttcaagggagtccccaaaccctgggtttctgttttctcaactctaacatgaggggctanatgcatctggtttagttagtctccatgatggtttagttcgtctccatgatcctgtgaatttcagatgttgaaaatctttggaaaagccctgaaagatgaacaggtaggagttattgtctatattttacccatgaggaaactaaggacctgggaatctananggctcattancttttgaaccagtactagcaatgaattcatctgaattctggtcccnaactcctagcatgananaaatttganctttc

SEQ ID NO: 9959 - DNA, 526 bp, Homo sapiens
  misc_feature (52)..(52): "n" may be a, t, c, g, other or unknown
  misc_feature (158)..(158): "n" may be a, t, c, g, other or unknown
  misc_feature (204)..(204): "n" may be a, t, c, g, other or unknown
  misc_feature (215)..(215): "n" may be a, t, c, g, other or unknown
  misc_feature (412)..(412): "n" may be a, t, c, g, other or unknown
  misc_feature (454)..(454): "n" may be a, t, c, g, other or unknown
  misc_feature (490)..(490): "n" may be a, t, c, g, other or unknown
  misc_feature (506)..(506): "n" may be a, t, c, g, other or unknown
  misc_feature (513)..(513): "n" may be a, t, c, g, other or unknown
  misc_feature (515)..(516): "n" may be a, t, c, g, other or unknown
  misc_feature (525)..(525): "n" may be a, t, c, g, other or unknown
gggcacattataatatttaatattctgtagtttaattttctgaacctttggnttataaatttttctcaacttacatttaaaaatgtatcaatgcaccttcttcagtagtaccacatgaaaatataaacctcgttcttccatatcttctacgcaggaanagtgaatgaatagtaccctaaatatcccgcaaagttactttgtgtncttgacggaanattagggaaaaacaatccacctccatatcttgagcagtagttaactagtcttctacctcatcttcccaaatatcgtcgtcaacatccacagcataaaacagccggttaaaacatggtgaacagggtcattgaaatgtttgtaagggtttgctctacaaaaaaaaccatgcaaatccccagaaatattgcatacaccngtacatgtctcctgttacatcccgcctaattctctatgggantttccccacatggggggctctttgaattctccctanccacccctaatttcanccttccnanngcctcccgna

SEQ ID NO: 9960 - DNA, 558 bp, Homo sapiens
  misc_feature (301)..(301): "n" may be a, t, c, g, other or unknown
  misc_feature (307)..(307): "n" may be a, t, c, g, other or unknown
  misc_feature (338)..(338): "n" may be a, t, c, g, other or unknown
  misc_feature (384)..(384): "n" may be a, t, c, g, other or unknown
  misc_feature (449)..(450): "n" may be a, t, c, g, other or unknown
  misc_feature (480)..(480): "n" may be a, t, c, g, other or unknown
  misc_feature (506)..(506): "n" may be a, t, c, g, other or unknown
  misc_feature (515)..(515): "n" may be a, t, c, g, other or unknown
  misc_feature (527)..(527): "n" may be a, t, c, g, other or unknown
  misc_feature (552)..(554): "n" may be a, t, c, g, other or unknown
gtgctaaattaatcatagagcctttaatccactagtaatttggagtgaattttattaagaagaattaattgtaagtacatgttaactttcgtgtcaggataaattgcatcttttaaagctaagtgatctgtgtacattgtgatagggcctttcactttggttgaaatcttaggtttgaaactgtgcctggtttacagtaactaaaattaactctagctgtgtggtcctttatatagttgttatcatcccaatcagatatatctcatctgatgtcaacttctgagtccaataatcagactanctccanaaagcacagggaaagtggtgtggacctctanggactgccctctgctttgtggaaaggcttggttaattttccattanagattcaaccaaccaccgacccaacctggaatttaataacaagctttttgttgataagtttatcnntgaaactagctatctgttctaagggactgnatcctcctttgaaacaccccggcttnaaaaatccnctgaaataaccnttggggaaaacttgtttaaaaaggnnntttt

SEQ ID NO: 9961 - DNA, 583 bp, Homo sapiens
  misc_feature (28)..(28): "n" may be a, t, c, g, other or unknown
  misc_feature (36)..(36): "n" may be a, t, c, g, other or unknown
  misc_feature (47)..(47): "n" may be a, t, c, g, other or unknown
  misc_feature (159)..(159): "n" may be a, t, c, g, other or unknown
  misc_feature (465)..(465): "n" may be a, t, c, g, other or unknown
  misc_feature (469)..(469): "n" may be a, t, c, g, other or unknown
  misc_feature (512)..(512): "n" may be a, t, c, g, other or unknown
  misc_feature (539)..(539): "n" may be a, t, c, g, other or unknown
  misc_feature (542)..(542): "n" may be a, t, c, g, other or unknown
  misc_feature (544)..(544): "n" may be a, t, c, g, other or unknown
  misc_feature (567)..(568): "n" may be a, t, c, g, other or unknown
  misc_feature (572)..(572): "n" may be a, t, c, g, other or unknown
aagaaacaggtctcactctgtgggccangctgggantgcaatggganaatcatagcccactgtaaattcaaattcctggggccaagcaatcccccctcagcctctgggagtagctacatgtgcgaacatgcccgctaatttatcttaattttttagaanttaggtcttgctatgttgcccaggccggtcctgaagtcctggcctcaagcgatcctcctgcgtcagccacccaaagtgcttggagtagaagtctgagctaccacgcctggccctgaaagctattttatggaagaatttaaactaaagatctccaaatattattcataattacatacccatgttggtatctatgtttacttatctaccatttttataggatttacaatatgacaatataaaataatcgtctgtttcccccaaatagagcataagaaaaagactaaaatttgttttatttatggtacnaaantttgttctcccaaatattttaaataaaatattgaatatgctcnttatttccgaaaatctaacaccgggtnatncnaaatccaaaatttttcctactcnnttgnaaattgaattt

SEQ ID NO: 9962 - DNA, 477 bp, Homo sapiens
  misc_feature (235)..(235): "n" may be a, t, c, g, other or unknown
  misc_feature (387)..(387): "n" may be a, t, c, g, other or unknown
  misc_feature (395)..(395): "n" may be a, t, c, g, other or unknown
  misc_feature (398)..(398): "n" may be a, t, c, g, other or unknown
  misc_feature (405)..(405): "n" may be a, t, c, g, other or unknown
  misc_feature (454)..(454): "n" may be a, t, c, g, other or unknown
  misc_feature (474)..(474): "n" may be a, t, c, g, other or unknown
  misc_feature (476)..(476): "n" may be a, t, c, g, other or unknown
cacaggatgacaaactatatttcaaaactgaaaaaaagcaaaatgtttatatctcactcctgaaacaaaaattaacatcagacttaagaaaataaggcagatactagtagtactaagttttcttgaaactgtaaaatatatataaaaatgaaaagataccgaatgtggacagctccacattgatcaacaaatgttaacattctcaatctctttcattgactttaaaaactatgtnatagaaacagaaaatgaactaatacacaaatgaagtacaaatatcataattttcagaaggtttgatttttcgagtaccataaaaaaactgaaatataaatattttggaaatagttctaagaaataaatatgaaaatattttgtttggtgtcntaacacanaanctatccnttttccccaaatgttagggatccattattttatgaattaatttgggggnccttgttttatccatattgncnt

SEQ ID NO: 9963 - DNA, 528 bp, Homo sapiens
  misc_feature (106)..(106): "n" may be a, t, c, g, other or unknown
  misc_feature (209)..(209): "n" may be a, t, c, g, other or unknown
  misc_feature (223)..(223): "n" may be a, t, c, g, other or unknown
  misc_feature (234)..(234): "n" may be a, t, c, g, other or unknown
  misc_feature (268)..(269): "n" may be a, t, c, g, other or unknown
  misc_feature (282)..(282): "n" may be a, t, c, g, other or unknown
  misc_feature (313)..(313): "n" may be a, t, c, g, other or unknown
  misc_feature (315)..(315): "n" may be a, t, c, g, other or unknown
  misc_feature (328)..(328): "n" may be a, t, c, g, other or unknown
  misc_feature (344)..(344): "n" may be a, t, c, g, other or unknown
  misc_feature (376)..(376): "n" may be a, t, c, g, other or unknown
  misc_feature (398)..(398): "n" may be a, t, c, g, other or unknown
  misc_feature (448)..(448): "n" may be a, t, c, g, other or unknown
  misc_feature (451)..(451): "n" may be a, t, c, g, other or unknown
  misc_feature (462)..(462): "n" may be a, t, c, g, other or unknown
  misc_feature (476)..(476): "n" may be a, t, c, g, other or unknown
  misc_feature (481)..(481): "n" may be a, t, c, g, other or unknown
  misc_feature (513)..(513): "n" may be a, t, c, g, other or unknown
  misc_feature (515)..(515): "n" may be a, t, c, g, other or unknown
caaggtgagcctgatcacagcctcggtagtatttattttgaaataaaagttcccatcccttgtaggcctcgctgtgaggcacaacgtcttcgaggggaagttgaantggggtcttcttattcactggtccctaaaccgcaccttctggtatcttctaaggcaattctggtaccgcactgtgtctgggttggcctatttaaatgtctganccagctgttccagnatttcaatgantttctcctcttcggccggtgaggaagaccctgtnncgaaaggcaagtntgtaaaaactggcttccgatctaaaagtgananggaacgcaaaaangtgtgagctgctgcancgtggctgggtccatgtccctgtgctgctcangccttgaacgaccctgctggantggcagcaccctacagctgttaaaccccatccctgctgtcaaaagtcccncanggatcaggcancatggattgatatnttaantgcatttgggaactgggaagctgcacccaggntngacaggaaaacac

SEQ ID NO: 9964 - DNA, 581 bp, Homo sapiens
  misc_feature (460)..(460): "n" may be a, t, c, g, other or unknown
  misc_feature (539)..(539): "n" may be a, t, c, g, other or unknown
  misc_feature (549)..(549): "n" may be a, t, c, g, other or unknown
  misc_feature (553)..(553): "n" may be a, t, c, g, other or unknown
  misc_feature (566)..(566): "n" may be a, t, c, g, other or unknown
aagaaattagacttttatcaatacacaaataattttacttaaaatcaacccagttacatatttttaaaaaattgcagaacctctccacaccaatgtccacagcctagaacaggttcatgtgaaacctgcagtcctaccccggagcatcagttaagtgatggtccaggtactcactgacacgtttctcttgacactgagatggtcgcaaacaaaacaccgttcttgcctggatgaagcaagagttcacataaaagagctttataaaatgtctatgaaggagaattgataatatcagaagagctccagcacttcaattgaatataatcctctattattcttttcttgatttaatttctgtagctcccgaaaacttacttcaatcttgttgagctcagaataaacagatatctgagattttacaagcttgttaagatttatcagtagcctctttgcttccggnatcattacacaacagttaaattcgctccagaagttgactttcccatccataatctggtccagggagggggtgtttcccngaaaatcttnttcntttcgcacctccnggtcggaaatcaatc

SEQ ID NO: 9965 - DNA, 589 bp, Homo sapiens
  misc_feature (189)..(189): "n" may be a, t, c, g, other or unknown
  misc_feature (195)..(195): "n" may be a, t, c, g, other or unknown
  misc_feature (266)..(266): "n" may be a, t, c, g, other or unknown
  misc_feature (269)..(269): "n" may be a, t, c, g, other or unknown
  misc_feature (283)..(283): "n" may be a, t, c, g, other or unknown
  misc_feature (291)..(291): "n" may be a, t, c, g, other or unknown
  misc_feature (319)..(319): "n" may be a, t, c, g, other or unknown
  misc_feature (346)..(346): "n" may be a, t, c, g, other or unknown
  misc_feature (372)..(372): "n" may be a, t, c, g, other or unknown
  misc_feature (464)..(464): "n" may be a, t, c, g, other or unknown
  misc_feature (474)..(474): "n" may be a, t, c, g, other or unknown
  misc_feature (484)..(484): "n" may be a, t, c, g, other or unknown
  misc_feature (488)..(488): "n" may be a, t, c, g, other or unknown
  misc_feature (510)..(510): "n" may be a, t, c, g, other or unknown
  misc_feature (540)..(540): "n" may be a, t, c, g, other or unknown
  misc_feature (554)..(554): "n" may be a, t, c, g, other or unknown
  misc_feature (573)..(573): "n" may be a, t, c, g, other or unknown
  misc_feature (581)..(581): "n" may be a, t, c, g, other or unknown
aactttttggtaattttattgttttggaatatagttattttcataaaagtgttattcatgtcaaaatacaatggttttgtactgttattttaaaataccttaaaatcttatttcaatttcgaatatgacaaatattaacagctataacccatataacagaagttctctggatctttaataattttcaanaatgtnaaggggtactgtttgaaaacttcaggtgaggaggcagaatctgcaagacttgctgactaactagacaaganaanaaaggctggaggangaactcangatggctcttggatggtacttgaaatangcaatacaggaaatgaaaacagtttangttgaagggattggaaaaagaagggntaaaaaaatttggtttaatttgaagtggtgagtcctacatgaaatttatgaaaaatctggaattccaaaaattggtctattctaaaaatacnaaatggcatnttttgtttcntttnaactgggggaaaagattacctnaaacccctattttgaacccccctttgtttnataaaaaagtctcncacaaaatttattaattcntcctttanggcccaat

SEQ ID NO: 9966 - DNA, 571 bp, Homo sapiens
  misc_feature (227)..(227): "n" may be a, t, c, g, other or unknown
  misc_feature (404)..(404): "n" may be a, t, c, g, other or unknown
  misc_feature (413)..(413): "n" may be a, t, c, g, other or unknown
  misc_feature (443)..(443): "n" may be a, t, c, g, other or unknown
  misc_feature (464)..(464): "n" may be a, t, c, g, other or unknown
  misc_feature (480)..(480): "n" may be a, t, c, g, other or unknown
  misc_feature (489)..(489): "n" may be a, t, c, g, other or unknown
  misc_feature (519)..(519): "n" may be a, t, c, g, other or unknown
  misc_feature (526)..(527): "n" may be a, t, c, g, other or unknown
  misc_feature (550)..(550): "n" may be a, t, c, g, other or unknown
  misc_feature (566)..(566): "n" may be a, t, c, g, other or unknown
atatttgtaggcacaatttattttaaaatccacacaagaaacccagaaatgcagcattatcttcagacatcacattctagctctgtttaaataccacatatgctaaaaaccgacgccaggacattctctaaatgagttacaaatcagtttctgggaaaggaatgctccatgaaaagcttatagcaagataactcaggctttcaggtggcgtatggcacgtgaattanccttacagtaattgtgtacatagtatgtttagtcattattgaatcaaaagtttcaggaagtaccttttttaatgcatacgctgagagaaccgtcaatatgcctttgttcctgctgagggatctgccattctggaggtacaaatactgcagatagaatatcaccgcaggactacgtcnagttcagantgttcaggatcatttctatataaaactacnattagctgaactatggccaangtccttgaacataaanccttcttcntttcattgcatcttaataagttaaaagccnctaccgnnaatgccgcctatccgttttttantcccctttaattttgnatttc

SEQ ID NO: 9967 - DNA, 588 bp, Homo sapiens
  misc_feature (81)..(81): "n" may be a, t, c, g, other or unknown
  misc_feature (147)..(147): "n" may be a, t, c, g, other or unknown
  misc_feature (155)..(155): "n" may be a, t, c, g, other or unknown
  misc_feature (158)..(158): "n" may be a, t, c, g, other or unknown
  misc_feature (202)..(202): "n" may be a, t, c, g, other or unknown
  misc_feature (213)..(213): "n" may be a, t, c, g, other or unknown
  misc_feature (249)..(249): "n" may be a, t, c, g, other or unknown
  misc_feature (308)..(308): "n" may be a, t, c, g, other or unknown
  misc_feature (310)..(310): "n" may be a, t, c, g, other or unknown
  misc_feature (340)..(340): "n" may be a, t, c, g, other or unknown
  misc_feature (344)..(344): "n" may be a, t, c, g, other or unknown
  misc_feature (352)..(352): "n" may be a, t, c, g, other or unknown
  misc_feature (400)..(400): "n" may be a, t, c, g, other or unknown
  misc_feature (415)..(415): "n" may be a, t, c, g, other or unknown
  misc_feature (429)..(429): "n" may be a, t, c, g, other or unknown
  misc_feature (438)..(438): "n" may be a, t, c, g, other or unknown
  misc_feature (503)..(503): "n" may be a, t, c, g, other or unknown
  misc_feature (515)..(515): "n" may be a, t, c, g, other or unknown
  misc_feature (518)..(518): "n" may be a, t, c, g, other or unknown
  misc_feature (549)..(549): "n" may be a, t, c, g, other or unknown
  misc_feature (567)..(567): "n" may be a, t, c, g, other or unknown
  misc_feature (580)..(580): "n" may be a, t, c, g, other or unknown
gttttttatttaaaataattttttaatcggctgatagttttaaaattatttaaaaacactatggggggggggatgacccancaatataaactgatatttattaatttaaaaagccaattaggcatgtcctgttatcccagtggaaanatataaantanctatgataatgaatgtgggctttgaattttaaaaaactttcaantcttggctatntcactagccaacaattctgtttcctcaactgcaaantaagaataataataatgatcctacaaggttgataaaaggatcaaatggaaaaaacagtntnttgtggataaaggtacaaataaaattatanatantctcttcnttccaaaaaggggggaaagtatttcttttcaaacttgccaagggggangaatgtaaatgctanctcattcttcctantaacaaatnaagtaatggtttcaaaggtactgctcagtccaaaacccaaattccccattaggatcccctttaancctaaatccccntantcctttttttaaaaaaaaattattaaacttnaacccccactttccaacntgaatcttaactntaaaaaaa

SEQ ID NO: 9968 - DNA, 267 bp, Homo sapiens
  misc_feature (43)..(43): "n" may be a, t, c, g, other or unknown
  misc_feature (155)..(155): "n" may be a, t, c, g, other or unknown
  misc_feature (196)..(196): "n" may be a, t, c, g, other or unknown
  misc_feature (198)..(198): "n" may be a, t, c, g, other or unknown
  misc_feature (240)..(240): "n" may be a, t, c, g, other or unknown
  misc_feature (247)..(248): "n" may be a, t, c, g, other or unknown
  misc_feature (255)..(255): "n" may be a, t, c, g, other or unknown
  misc_feature (258)..(258): "n" may be a, t, c, g, other or unknown
ggaagggaccactgcctttattgcctctgtgctggggtcccancctggggttcaaaagcctctgggggcaataggtgaccctggacccaaattattgctacttggctaggtcaccttggggcttcccatactgccctgaaaatgggtgggatganggcatgcaaacaatatgcaaatgacatgcaaaccaacccanangcctctggcacatccatgggtgctggaaaaatcaaaacctantggcctnngaaggcnacngggcaccca

SEQ ID NO: 9969 - DNA, 449 bp, Homo sapiens
  misc_feature (163)..(163): "n" may be a, t, c, g, other or unknown
  misc_feature (328)..(328): "n" may be a, t, c, g, other or unknown
  misc_feature (331)..(331): "n" may be a, t, c, g, other or unknown
  misc_feature (372)..(372): "n" may be a, t, c, g, other or unknown
  misc_feature (374)..(374): "n" may be a, t, c, g, other or unknown
  misc_feature (394)..(394): "n" may be a, t, c, g, other or unknown
  misc_feature (418)..(418): "n" may be a, t, c, g, other or unknown
  misc_feature (421)..(421): "n" may be a, t, c, g, other or unknown
  misc_feature (433)..(433): "n" may be a, t, c, g, other or unknown
  misc_feature (441)..(441): "n" may be a, t, c, g, other or unknown
aattatactttaagttctagggtacatgtgcacaatgtgcaggttagttacatatgtatacatgtgccatgctggtgtgctgcacccatttaattcatttagcattaggtatatctcctaatgctatccctctcccctccccccaccccacaacagtccccanagtgtgatgttccccttcctgtgtccatgtgttctcattgttaaagtgctaaacatggtggctgactgcttctgagctggaagtgaactgagttgaaagttattgggagacagatacactattgtataaagtggaaactgaggaattattcatgcttccatggtncantattctcatgttcccttcctccaccttccacaagcttaaananaaacatgccttgaaaagggncaagggtgggtctttatcaaaaanccnccccaccaaacnctaaggcnaccatttt

SEQ ID NO: 9970 - DNA, 582 bp, Homo sapiens
  misc_feature (34)..(34): "n" may be a, t, c, g, other or unknown
  misc_feature (482)..(482): "n" may be a, t, c, g, other or unknown
  misc_feature (484)..(484): "n" may be a, t, c, g, other or unknown
  misc_feature (495)..(495): "n" may be a, t, c, g, other or unknown
  misc_feature (527)..(527): "n" may be a, t, c, g, other or unknown
  misc_feature (531)..(531): "n" may be a, t, c, g, other or unknown
  misc_feature (561)..(561): "n" may be a, t, c, g, other or unknown
  misc_feature (581)..(581): "n" may be a, t, c, g, other or unknown
ggtagtcaacttgtaccaagtttagcagcaagangatacttccttagagactttcagtggacttaaactcagtttccgctggtgctatgtaaagcatccacaatggttttattgtactctgcaatctgcttggtcacatttttcttaattggctggtaatcactctcttgactcttggttgctatgaattctttcatcgcaaaattattttgctcaaggtgttgccactttctctccaaatttgtaagctgagaatgtgtctcattttcttgcaattgtgtttttagtgcctcatactctatgttttgcttctccattattttcttaaaggcatttctgtgggttgataatatcattctctcctgatgtaatttctttatcttttcttcacctgatgattttaaagctggcaaatcattatatatctccagatcagttgtcatttgcttaattttgctttttaaaaaaagctgttcctccancntcctaatttcnaaaaaccccatttctgcaaatcaactgcaaantttnaattctaaatcaatctgaaccgtcttgttnattccgccctccataaattna

SEQ ID NO: 9971 - DNA, 596 bp, Homo sapiens
  misc_feature (577)..(577): "n" may be a, t, c, g, other or unknown
  misc_feature (580)..(580): "n" may be a, t, c, g, other or unknown
  misc_feature (596)..(596): "n" may be a, t, c, g, other or unknown
atttaataacattgtttaataaaaaactacatatttaacagaaaagttgttaaagctacaaggtaaaggcacattgaaagagaatgctttttaaatccaattttcagggaattcactttacatgtaaataaagcagaaaatgcaggaaaattattttgaagtttttcatcacttaacaatttctgggaaacaaagttcatcctattttcccatagaggacccctgttaaaatataagattatattcccctatactaggattcagcattcaaataaatcactagtccaacttcaatgtcgtagaacccaaaaaaaatataactatcctaaaaatatataatttaaaatataatttatagttatactaaatgggaataaacatatggcacacattaattacaaaggatacttcatgttactagaaagtgccctgtaagaaaattaataaatgacctaaaactaaagcatttaggataacaaacatccttttacttgctatcttttaaaatgctgcctagggaaatccaatggcccttaaaaaaaattgttccaatattccacttttttggaaacttttnccngaaataattgaaggcn

SEQ ID NO: 9972 - DNA, 424 bp, Homo sapiens
  misc_feature (243)..(243): "n" may be a, t, c, g, other or unknown
  misc_feature (293)..(293): "n" may be a, t, c, g, other or unknown
  misc_feature (383)..(383): "n" may be a, t, c, g, other or unknown
  misc_feature (385)..(385): "n" may be a, t, c, g, other or unknown
  misc_feature (388)..(388): "n" may be a, t, c, g, other or unknown
  misc_feature (397)..(397): "n" may be a, t, c, g, other or unknown
  misc_feature (405)..(405): "n" may be a, t, c, g, other or unknown
  misc_feature (414)..(414): "n" may be a, t, c, g, other or unknown
  misc_feature (419)..(419): "n" may be a, t, c, g, other or unknown
gtatgtaacagaacacatttcagattgtatttaatttaaatatttgtatataagagcaaatgtctgaatgtggcctgaatcaagtttaaatattgttggctcatactgattatggtgcctaagagagctatatatatacacatgtaaagtccattgtttttattgtcctgagttgtcttaaacctgcaaaatatacactacccattttttttttccattggtttcagacttggttcaattaanattggttggggatttttctcttttccttattaaccatgttctggtatcanaatggtgttccttctccatcagaggctgggaaacgtattataattagtttttctcccccataccttcccccaagaacaatgaaaaataantnaanggtggaacnttcctccnttaaaattnttgcntaacc

SEQ ID NO: 9973 - DNA, 550 bp, Homo sapiens
  misc_feature (60)..(60): "n" may be a, t, c, g, other or unknown
  misc_feature (150)..(150): "n" may be a, t, c, g, other or unknown
  misc_feature (423)..(423): "n" may be a, t, c, g, other or unknown
  misc_feature (479)..(479): "n" may be a, t, c, g, other or unknown
  misc_feature (487)..(487): "n" may be a, t, c, g, other or unknown
  misc_feature (501)..(501): "n" may be a, t, c, g, other or unknown
  misc_feature (505)..(505): "n" may be a, t, c, g, other or unknown
  misc_feature (515)..(515): "n" may be a, t, c, g, other or unknown
  misc_feature (521)..(521): "n" may be a, t, c, g, other or unknown
  misc_feature (533)..(533): "n" may be a, t, c, g, other or unknown
gaccttctcaatgactaaaacattgggaggggggaaaaaagaccaagtgttacacaaaanaattttagtgaaattattgtttttattgcttttaatcccttgacgccgggagttgggatttcccggcacacttccattgccggcaatganacgcaccgtgaccgccagcgccaaggggttaacatatacttgtaaaaccatataactcttaatttgtacccgtgtctttactcttattgatatataaaattatatatacatatgaaccatatagctacataaaacttagcaacaataaaaataacacacattaatacaattcaaagaaaaattaaccctttatgctggataaatctcatttctgtttttttattgtcttttatgttaaactttctacaaaaggatgtataaacgggtaagtanaaaatctctatctacaaaatgttttctcttttaagtattacattacttggtgttcntttaatanactgacatttttancccnttaaaatccntttacnttataccccgcnaaatactttaaaccccc

SEQ ID NO: 9974 - DNA, 201 bp, Homo sapiens
  misc_feature (191)..(191): "n" may be a, t, c, g, other or unknown
  misc_feature (194)..(197): "n" may be a, t, c, g, other or unknown
  misc_feature (200)..(201): "n" may be a, t, c, g, other or unknown
cacacagcaggagcagcaggatgctccagatgtctttattggggctcgagcacagcatgacagttggaggcatgcagacagggcacagggcccagcctgggcatgccccagacacacacgaggggacagctttagaaaaggactgaccaacaccagggaggagcagggagggagggcccagggaggggcanccnnnnctnn

SEQ ID NO: 9975 - DNA, 460 bp, Homo sapiens
  misc_feature (381)..(381): "n" may be a, t, c, g, other or unknown
  misc_feature (394)..(394): "n" may be a, t, c, g, other or unknown
  misc_feature (401)..(401): "n" may be a, t, c, g, other or unknown
  misc_feature (418)..(418): "n" may be a, t, c, g, other or unknown
  misc_feature (425)..(425): "n" may be a, t, c, g, other or unknown
  misc_feature (448)..(448): "n" may be a, t, c, g, other or unknown
  misc_feature (453)..(453): "n" may be a, t, c, g, other or unknown
gtaaataaacaattttattgttcatcttcacatatgtgaaagacatcactacagcatccattactctcaagttacaaagttataaaacaagattttaaaacttaatatcttgataaggtgcttaacttctaaacaaggaaaaattaacattgtttttaaaacttactgagttattatgcatctaatgcaagttttatccaaaagtaaatataacatgacatatccctaatacaattaaataatctataattaataagctgagaattggggttcaagaccacagtttgaatttttaaaaaatataaataagtccattagcacagtaagttttgactacaggcctgttatcaatctatgtcatgaagtgacattactttaacncattaggaaacanaggttantaacaatcaatacctcncctttangtctattgctgataccaattganatgtntttaaaa

SEQ ID NO: 9976 - DNA, 308 bp, Homo sapiens
  misc_feature (83)..(83): "n" may be a, t, c, g, other or unknown
  misc_feature (234)..(234): "n" may be a, t, c, g, other or unknown
  misc_feature (260)..(260): "n" may be a, t, c, g, other or unknown
  misc_feature (288)..(288): "n" may be a, t, c, g, other or unknown
  misc_feature (293)..(293): "n" may be a, t, c, g, other or unknown
  misc_feature (300)..(300): "n" may be a, t, c, g, other or unknown
  misc_feature (304)..(304): "n" may be a, t, c, g, other or unknown
  misc_feature (306)..(306): "n" may be a, t, c, g, other or unknown
gtttttctttcacagacacttttctgaatcaattctctacagactctctcccattcagaatcagttgggtggactgatgaggnaaaaaataaattccttttaaaaaacaaaactggagcctatttacaaaacatgcaaagggagaattttaagcaggtgttactgcagaactgctcagacgtgaatacagctgagtgacagaatatacctttacttctacaaatataggtcctncctccagactttctggaagaaatacnttttcagggtgtggactataaaatggcntacantgctaanaccnanac

SEQ ID NO: 9977 - DNA, 600 bp, Homo sapiens
  misc_feature (1)..(600): "n" may be a, t, c, g, other or unknown
nnnnnnnnnnnnnnnnnnnnnnnnnnnnnnnnnnnnnnnnnnnnnnnnnnnnnnnnnnnnnnnnnnnnnnnnnnnnnnnnnnnnnnnnnnnnnnnnnnnnnnnnnnnnnnnnnnnnnnnnnnnnnnnnnnnnnnnnnnnnnnnnnnnnnnnnnnnnnnnnnnnnnnnnnnnnnnnnnnnnnnnnnnnnnnnnnnnnnnnnnnnnnnnnnnnnnnnnnnnnnnnnnnnnnnnnnnnnnnnnnnnnnnnnnnnnnnnnnnnnnnnnnnnnnnnnnnnnnnnnnnnnnnnnnnnnnnnnnnnnnnnnnnnnnnnnnnnnnnnnnnnnnnnnnnnnnnnnnnnnnnnnnnnnnnnnnnnnnnnnnnnnnnnnnnnnnnnnnnnnnnnnnnnnnnnnnnnnnnnnnnnnnnnnnnnnnnnnnnnnnnnnnnnnnnnnnnnnnnnnnnnnnnnnnnnnnnnnnnnnnnnnnnnnnnnnnnnnnnnnnnnnnnnnnnnnnnnnnnnnnnnnnnnnnnnnnnnnnnnnnnnnnnnnnnnnnnnnnnnnnnnnnnnnnnnnnnnnnnnnnnnnnnnnnnnnnnnnnnnnnnnnnnnnnnnnnnnnnnnn

SEQ ID NO: 9978 - DNA, 598 bp, Homo sapiens
  misc_feature (55)..(55): "n" may be a, t, c, g, other or unknown
  misc_feature (168)..(168): "n" may be a, t, c, g, other or unknown
  misc_feature (347)..(347): "n" may be a, t, c, g, other or unknown
  misc_feature (365)..(365): "n" may be a, t, c, g, other or unknown
  misc_feature (367)..(367): "n" may be a, t, c, g, other or unknown
  misc_feature (392)..(392): "n" may be a, t, c, g, other or unknown
  misc_feature (403)..(403): "n" may be a, t, c, g, other or unknown
  misc_feature (507)..(507): "n" may be a, t, c, g, other or unknown
  misc_feature (545)..(545): "n" may be a, t, c, g, other or unknown
  misc_feature (562)..(562): "n" may be a, t, c, g, other or unknown
  misc_feature (565)..(566): "n" may be a, t, c, g, other or unknown
  misc_feature (579)..(579): "n" may be a, t, c, g, other or unknown
  misc_feature (585)..(585): "n" may be a, t, c, g, other or unknown
gagacaaagtttcactcttgttacttagactggagtgcagtgactcgatctcggntcactgcaacctctgcctccccagttcaagtgattctcgtctcagcctcccgagtagctgggactacaggtgcatgccaccatgcccagctaatttttgtatttttagtaganatgggatttcaccatgttggccaggatggtctcaatctcttgacctcatgatgcacccacctcggcctcccaaagtgctggggttacaggtgtgagccaccacgcccggcctactatttctttctgtatgttcttgtgggcctgttgtttagctcccacttataagtgagaacatgtantatttgtggggaaaagananatcggattgttactgtgtctgtgtngaaagaagtanacataggagtctccattttgttctgtactaagaaaaattcttctgccttgaaatgctgttaatctatgaacttaccccaaccccgtgctctctgaaaacatgtnctgtgtcactccagggtttaattggattaagggctatncaaaatttcttttgttnacnnaatcctgaattcncatgcnctttaaaaatctc

SEQ ID NO: 9979 - DNA, 526 bp, Homo sapiens
  misc_feature (81)..(81): "n" may be a, t, c, g, other or unknown
  misc_feature (89)..(89): "n" may be a, t, c, g, other or unknown
  misc_feature (248)..(248): "n" may be a, t, c, g, other or unknown
  misc_feature (250)..(250): "n" may be a, t, c, g, other or unknown
  misc_feature (271)..(271): "n" may be a, t, c, g, other or unknown
  misc_feature (332)..(332): "n" may be a, t, c, g, other or unknown
  misc_feature (337)..(337): "n" may be a, t, c, g, other or unknown
  misc_feature (367)..(367): "n" may be a, t, c, g, other or unknown
  misc_feature (403)..(403): "n" may be a, t, c, g, other or unknown
  misc_feature (411)..(411): "n" may be a, t, c, g, other or unknown
  misc_feature (464)..(464): "n" may be a, t, c, g, other or unknown
  misc_feature (467)..(467): "n" may be a, t, c, g, other or unknown
  misc_feature (496)..(496): "n" may be a, t, c, g, other or unknown
  misc_feature (503)..(503): "n" may be a, t, c, g, other or unknown
  misc_feature (510)..(510): "n" may be a, t, c, g, other or unknown
  misc_feature (517)..(517): "n" may be a, t, c, g, other or unknown
  misc_feature (525)..(525): "n" may be a, t, c, g, other or unknown
ggcaggccaatgcaagtttctttactgaaaggtgggtccgtttcaaaaggacagtttggacacagaatagacaaacattanagtttganagttttcccttgagttttgcaaaacaaaacatctagtaacttcagtattcaccaggaaaaattccccagtgcctctccctccagccctttctcctgcctgccttcaggatcaccccttgtctcataggttttcatttttcagttctccttcttggatanantctatcctgcccgcaggtganccctctcttcccatgccaaatttccatctaacccttggtctgaaacaggtgcaggcttcanccaantggaaaactgctggggtgggtgctgcctancctttgacggttgggtaaggaaaaaacgggttaaanttagggtnatgggctccattctgttggccaaggttaaacctggcttctctcattcaatttnccncattggcaaaaaatgtaaccctgccattnctttatnaaaaatntataaanttggcccnc

SEQ ID NO: 9980 - DNA, 515 bp, Homo sapiens
  misc_feature (245)..(245): "n" may be a, t, c, g, other or unknown
  misc_feature (418)..(418): "n" may be a, t, c, g, other or unknown
  misc_feature (453)..(453): "n" may be a, t, c, g, other or unknown
  misc_feature (474)..(474): "n" may be a, t, c, g, other or unknown
  misc_feature (486)..(486): "n" may be a, t, c, g, other or unknown
  misc_feature (502)..(502): "n" may be a, t, c, g, other or unknown
  misc_feature (509)..(509): "n" may be a, t, c, g, other or unknown
  misc_feature (511)..(511): "n" may be a, t, c, g, other or unknown
aatgaaagaaagttgataatttaggaaaaccaatggtatgacatgttttactagaattacaattcaccaaatcttattgaggggtggggtaagaagaaaacctgaaggcaggcaatgcattaaaagcatcaataaagatttctggtgctaataaagttcactgacaataagaactttactttcttccacctaaagaagtttccttaagtactaacttttaaaagtccattctgtcatgatatgancctgttcactgaaccgtgaggaacaaggatgaaaaataagaatagaaagagtatggttcagcctgagtctaagtggtctggtgttttatgatgactctaccaaatgtttaatttaaagtcttaatttcttatttttaattataatgttgccaactgtctgactgaccttgaangatcagggatttttccacgactctaactgaacacnagatccttctcaaacgggganaatgaaatgacnccgtgttctatctgcnccatttntncact

SEQ ID NO: 9981 - DNA, 488 bp, Homo sapiens
  misc_feature (9)..(9): "n" may be a, t, c, g, other or unknown
  misc_feature (29)..(29): "n" may be a, t, c, g, other or unknown
  misc_feature (34)..(34): "n" may be a, t, c, g, other or unknown
  misc_feature (167)..(167): "n" may be a, t, c, g, other or unknown
  misc_feature (169)..(169): "n" may be a, t, c, g, other or unknown
  misc_feature (259)..(259): "n" may be a, t, c, g, other or unknown
  misc_feature (394)..(395): "n" may be a, t, c, g, other or unknown
  misc_feature (439)..(439): "n" may be a, t, c, g, other or unknown
  misc_feature (453)..(453): "n" may be a, t, c, g, other or unknown
  misc_feature (456)..(456): "n" may be a, t, c, g, other or unknown
  misc_feature (469)..(469): "n" may be a, t, c, g, other or unknown
  misc_feature (480)..(480): "n" may be a, t, c, g, other or unknown
gagacagantctcactctgtcaccaaagntggantgcagtggtgtgatctcagctcgctgaaaactcccacctcctgggctcaggtgattctcctgcctcagcctcccaaagtagctggggattacaggcaggtgccaccatgcctggctaatttttgttttagtananatggggtttcaccatgttggccagggtggtctcaaactccagtgatccacccacctcagcctcccaaagtgctgagattacaggcatganccaccacgcctggccccaaactgactcttgaccaaagaatctgatttggcaaaccaaatcttagtgcagtgttcgctcctcgtccccttacccagaacatgattcagatcctaacataaacacaaaaacaggtcnnggaaccaaaacactgtggtcttgtctattatacaaaatattganataatgttcacaantcnttctgttttccancaattgtgacnattttgaa

SEQ ID NO: 9982 - DNA, 547 bp, Homo sapiens
  misc_feature (27)..(27): "n" may be a, t, c, g, other or unknown
  misc_feature (71)..(71): "n" may be a, t, c, g, other or unknown
  misc_feature (128)..(128): "n" may be a, t, c, g, other or unknown
  misc_feature (231)..(231): "n" may be a, t, c, g, other or unknown
  misc_feature (450)..(450): "n" may be a, t, c, g, other or unknown
  misc_feature (471)..(471): "n" may be a, t, c, g, other or unknown
  misc_feature (491)..(491): "n" may be a, t, c, g, other or unknown
  misc_feature (504)..(504): "n" may be a, t, c, g, other or unknown
  misc_feature (509)..(509): "n" may be a, t, c, g, other or unknown
  misc_feature (520)..(520): "n" may be a, t, c, g, other or unknown
  misc_feature (529)..(529): "n" may be a, t, c, g, other or unknown
gactattgcatatcatttttagttgangtcaaaattattaaagccctatttccccaattaaaagcaagganttctattagtatgtcttcttcatttatatcccagattaatataaacccagtctagangtatcacttctttccaaacttaacttcatttcagcagcatacatggaatattgacacttttcaaagtttttatcccagacccattagatctacaagatactanaaagaattagagcaaagtgagtgggcctgggtttgtaggatcctcacaaacttctcttggattcttcttttacaaagtttctctaccatacaaacatacgttttaaaagccaacactattgaggttaggtatgcccttcaggggtgttgcctaaaatggttaaatcccattcagcttaaaggaagctaataatcatggtgtggaatttctccataccancagcatggctaacgtttgttnttttaaggttatgttctganactccaggttaantttgncctgacccttnaaccttaancccaaatggaaaagaaaa

SEQ ID NO: 9983 - DNA, 589 bp, Homo sapiens
  misc_feature (122)..(122): "n" may be a, t, c, g, other or unknown
  misc_feature (434)..(434): "n" may be a, t, c, g, other or unknown
  misc_feature (446)..(446): "n" may be a, t, c, g, other or unknown
  misc_feature (464)..(464): "n" may be a, t, c, g, other or unknown
  misc_feature (506)..(507): "n" may be a, t, c, g, other or unknown
  misc_feature (524)..(524): "n" may be a, t, c, g, other or unknown
  misc_feature (531)..(531): "n" may be a, t, c, g, other or unknown
  misc_feature (535)..(535): "n" may be a, t, c, g, other or unknown
  misc_feature (579)..(579): "n" may be a, t, c, g, other or unknown
  misc_feature (588)..(588): "n" may be a, t, c, g, other or unknown
aagctaatcagctatcattagtgttagtgtactttatgcgtggcctgagacaattcttattcttccagtatggcccaggggaagccaaaagattggacatccctgatttatgcagtctccanaggaaaaattcctgactcacctaaatcacactgaagaatatatcaatacaatggtcttattaccttaaaattaacctgttaaattttctttccatgttctctaacctttcctagtcaaactggaaaatatccaataaaattagtgtagagaaaccatactcaattctataacgaataatctctcatcttctcacgaatttcctggaagtaatgagtgtggactgaagaagcagacatatagcacacagactgggtcccaagttacaagcacactgacgttatctagcttcaaaggcatactgcctttcagantctaaaacagancgatgtgcatcataaganatagcctatcagattcctagggcccaaatgttccaaaggtcnntttcctaaaggcatgtntattttnaacnaatataatttgggttctaatctgacccccatttaatgatcactngggaggaant

SEQ ID NO: 9984 - DNA, 591 bp, Homo sapiens
  misc_feature (22)..(22): "n" may be a, t, c, g, other or unknown
  misc_feature (25)..(25): "n" may be a, t, c, g, other or unknown
  misc_feature (35)..(35): "n" may be a, t, c, g, other or unknown
  misc_feature (260)..(260): "n" may be a, t, c, g, other or unknown
  misc_feature (308)..(308): "n" may be a, t, c, g, other or unknown
  misc_feature (329)..(329): "n" may be a, t, c, g, other or unknown
  misc_feature (341)..(341): "n" may be a, t, c, g, other or unknown
  misc_feature (410)..(410): "n" may be a, t, c, g, other or unknown
  misc_feature (421)..(421): "n" may be a, t, c, g, other or unknown
  misc_feature (434)..(434): "n" may be a, t, c, g, other or unknown
  misc_feature (487)..(487): "n" may be a, t, c, g, other or unknown
  misc_feature (534)..(534): "n" may be a, t, c, g, other or unknown
  misc_feature (553)..(553): "n" may be a, t, c, g, other or unknown
  misc_feature (562)..(562): "n" may be a, t, c, g, other or unknown
  misc_feature (582)..(582): "n" may be a, t, c, g, other or unknown
  misc_feature (590)..(590): "n" may be a, t, c, g, other or unknown
cttttttttttttttttttttnttntttttttttntttgaaaaaattaatttattttaagttaaggatctctacgtaaatttattttggtatcaaacaactgcaattagtgatggggggataaaagcatccctaattgtggaaggatggtaatttatttacaaaaactatacaaaattagattaattataacaacaacttatcaaaggttcctgaaattaattttgcttttgaaaaagtatcaaaagtcttcaaatccanaatgatagcattttattatttctgattcatggaattatagcacatcanatctttaagcaactacatcanataaaatcctanataataaaatattcttcatttcctgacagcttggaatgtaaatgaaaacttgttccatttttattaaanaaaaaacctanaataatgcatccnatggtatcaaatacctgttaaaatggcgtgtctgctataattaaacatgggcnattaattctacataattaaaaatggcctaaattaatccccccttaanaaaaaatttttccccatcnttccaattnctttttttcccggttttaantaagaaant

SEQ ID NO: 9985 - DNA, 529 bp, Homo sapiens
  misc_feature (436)..(436): "n" may be a, t, c, g, other or unknown
  misc_feature (440)..(440): "n" may be a, t, c, g, other or unknown
  misc_feature (447)..(447): "n" may be a, t, c, g, other or unknown
  misc_feature (457)..(457): "n" may be a, t, c, g, other or unknown
  misc_feature (474)..(474): "n" may be a, t, c, g, other or unknown
  misc_feature (496)..(496): "n" may be a, t, c, g, other or unknown
  misc_feature (506)..(506): "n" may be a, t, c, g, other or unknown
gagcattcaccaacaatttctttatttaataagtgtatcttatatagacaatcttttaaaaaataaaatgccttatttgtgttgcatacatttattccgagggagcctccctacaagtcaagagtattctcttagccagaaatacttctattgctagaaacatttttagaacagaacagatttttcctgttatcatggctgcatcaaatgttaccctgcattttaactaaaatggccaaacattttcaaagtcatcatgcactacaagaatctaaggcagtgtgtctaaaatgccaaacccagtacatttagttaaatatctggtcaattcaaaaagcaaaataaattgattcaattgtttaatcagttaaaccatctggccaacatagagtgaatcctcaaaagggcaacatgtcctaataaaaacgtgtgacangatngtccaancacaccccanggccacacagaaaaaangccattttatcttcctgaagangtctggttanaatccgttttggcaaaaattttc

SEQ ID NO: 9986 - DNA, 479 bp, Homo sapiens
  misc_feature (171)..(171): "n" may be a, t, c, g, other or unknown
  misc_feature (307)..(307): "n" may be a, t, c, g, other or unknown
  misc_feature (387)..(387): "n" may be a, t, c, g, other or unknown
  misc_feature (391)..(391): "n" may be a, t, c, g, other or unknown
  misc_feature (398)..(398): "n" may be a, t, c, g, other or unknown
  misc_feature (406)..(407): "n" may be a, t, c, g, other or unknown
  misc_feature (427)..(427): "n" may be a, t, c, g, other or unknown
  misc_feature (446)..(446): "n" may be a, t, c, g, other or unknown
ctgagatggagtgccactcttgttgcccaggctggagtgcaatggcgcgatctcagctcacttcaacctctgcctcccgggttcaagcaattctcctgcctcagcctcccgagtagctgggattacaggcatgcaccactacgcatggctaattttgtatttttagtaganacaggatttcaccatgttggtcaggctggtctcgaactcccaacctcatgtaattcacccgtctcagcctcccaaagtgctgggattacaggtgtgagccaccgcacccagccagaattatcttatgtctggtaanaattgaggacttgttgaaggctttgccatattcttcacactcatagggttcctcttcagtatgaatgttcttatgtttantaanaattcangacggttnnaagctttgccacaatcttcncatttgtaggttctctccnctatgaattactttgttccataaaggttgaaga

SEQ ID NO: 9987 - DNA, 601 bp, Homo sapiens
  misc_feature (71)..(71): "n" may be a, t, c, g, other or unknown
  misc_feature (102)..(103): "n" may be a, t, c, g, other or unknown
  misc_feature (121)..(121): "n" may be a, t, c, g, other or unknown
  misc_feature (252)..(252): "n" may be a, t, c, g, other or unknown
  misc_feature (282)..(282): "n" may be a, t, c, g, other or unknown
  misc_feature (298)..(298): "n" may be a, t, c, g, other or unknown
  misc_feature (314)..(314): "n" may be a, t, c, g, other or unknown
  misc_feature (324)..(324): "n" may be a, t, c, g, other or unknown
  misc_feature (327)..(327): "n" may be a, t, c, g, other or unknown
  misc_feature (392)..(392): "n" may be a, t, c, g, other or unknown
  misc_feature (401)..(401): "n" may be a, t, c, g, other or unknown
  misc_feature (409)..(409): "n" may be a, t, c, g, other or unknown
  misc_feature (441)..(441): "n" may be a, t, c, g, other or unknown
  misc_feature (487)..(487): "n" may be a, t, c, g, other or unknown
  misc_feature (489)..(489): "n" may be a, t, c, g, other or unknown
  misc_feature (529)..(529): "n" may be a, t, c, g, other or unknown
  misc_feature (534)..(534): "n" may be a, t, c, g, other or unknown
  misc_feature (553)..(553): "n" may be a, t, c, g, other or unknown
  misc_feature (573)..(573): "n" may be a, t, c, g, other or unknown
  misc_feature (575)..(575): "n" may be a, t, c, g, other or unknown
aagagttttttcctcttttattaagtccgctatactaactagaaagagaatctgtggttttcgcctggtanaccacagggccaatcaccacagcttcttgtnnagaacatggagagtgccnagatcaccatcaggtgccgcttccttcctgtggctttccatcttccagtcagcctggtcttttgccttgaagggcccaaaacaacagccctgggctatcatcttcatcccaaaagcggaaaaaataggcangcaaaaacaccgaagggtgtctcaaaaaangttcccatcaggttcncagggcgcccgctgtncctcttgganatntcacttcaatcaccttctgcggctccttggtcttctccattacaggtccccttaggcccaaaacncctgctccncaattgcncctggtgcttctgcaccatcactctttcttcnaagccagcactgggaatggcttcacttttggtggaagaattcatcncncggtcccatacctgggtgagggcccgatttttaacaggtntttcncttaaaaaaggttaacttnccatccaatttccccccttnanccctgttacctcttcccttttgtttg

SEQ ID NO: 9988 - DNA, 446 bp, Homo sapiens
  misc_feature (269)..(269): "n" may be a, t, c, g, other or unknown
  misc_feature (377)..(377): "n" may be a, t, c, g, other or unknown
  misc_feature (386)..(386): "n" may be a, t, c, g, other or unknown
  misc_feature (390)..(390): "n" may be a, t, c, g, other or unknown
  misc_feature (398)..(398): "n" may be a, t, c, g, other or unknown
  misc_feature (411)..(411): "n" may be a, t, c, g, other or unknown
  misc_feature (428)..(428): "n" may be a, t, c, g, other or unknown
  misc_feature (437)..(437): "n" may be a, t, c, g, other or unknown
ctaaccacacctttaagttttattggccatcctcttgataagctgaaaagtcacactagcttctgtgtcagcatcttagatacgtactgtttctagtttattggaatcttccattttccttttttacaaaaatatcctggcaggatctgaaactgtttctccaaatgtctaaaatatatctgtcacacaaaatgacccccaaagagaatcctgggaagaaaacaatttctcctcctccatcatccaattaagtatttattaaacagtcnctatacttaaaatacctttccagggtaccacctactaagttaacagactactggttcaaacaccgcaaagaaaagcctgaaactagatagaaacaagaaaaacctccnttttttttngtgnaccttttngtttgtttttacntgagaaaaagaaaacanaactgaggnaaaaaaaat

SEQ ID NO: 9989 - DNA, 559 bp, Homo sapiens
  misc_feature (467)..(467): "n" may be a, t, c, g, other or unknown
  misc_feature (509)..(510): "n" may be a, t, c, g, other or unknown
  misc_feature (515)..(515): "n" may be a, t, c, g, other or unknown
  misc_feature (530)..(530): "n" may be a, t, c, g, other or unknown
  misc_feature (537)..(537): "n" may be a, t, c, g, other or unknown
  misc_feature (559)..(559): "n" may be a, t, c, g, other or unknown
aatgtactgttcttctagaaaattagcacaagatactatggaacaaacatgttttgaccaatgctgagctaagggagcttcacatgaaagcctacaaatatgaggaggaaaaacctagccacggcacatttccaacaatttcttaataattcctcttttcttaaccacagaaataaatcagagcctttaaaagttaccttacagataccagcttctcagaaattattttgcagttatgtgagagtatgtgccttcacaatgtcagcaccaacatctttagtattttaagaggaaaagtcaagtccactgaaggaatttaacagatttttccagaaacacttaagacatctataattaggttttaaaaggagtgacagaatgtcttgaatcacaaattaatctgaattcaggacaataataactttaactcttacccacttttataagccattattcccattaatggntgacaatctatatttccccatttccatgcccaaatgaactgnnctccnttcctttgaagaagnaaacccnaatgactccggaaagggtttgn

SEQ ID NO: 9990 - DNA, 533 bp, Homo sapiens
  misc_feature (204)..(204): "n" may be a, t, c, g, other or unknown
  misc_feature (216)..(216): "n" may be a, t, c, g, other or unknown
  misc_feature (297)..(297): "n" may be a, t, c, g, other or unknown
  misc_feature (313)..(313): "n" may be a, t, c, g, other or unknown
  misc_feature (350)..(350): "n" may be a, t, c, g, other or unknown
  misc_feature (390)..(390): "n" may be a, t, c, g, other or unknown
  misc_feature (442)..(442): "n" may be a, t, c, g, other or unknown
  misc_feature (445)..(445): "n" may be a, t, c, g, other or unknown
  misc_feature (462)..(462): "n" may be a, t, c, g, other or unknown
  misc_feature (470)..(470): "n" may be a, t, c, g, other or unknown
  misc_feature (477)..(477): "n" may be a, t, c, g, other or unknown
  misc_feature (479)..(479): "n" may be a, t, c, g, other or unknown
  misc_feature (525)..(525): "n" may be a, t, c, g, other or unknown
cagtaaagacggagtttcaccctattggccaggctgatctcgaactcccgacctcaggtgatccacctgcctcggtctcccaaagtgctgggattacaggcgtgaaccaccgcacctggccaaatccttgttttaacccatatactccataaaataaccctgccaaggtgggactgtcctggccccctgtctctaggtgagganactgaggcaganaggctaagggacctgctgcaggtcacgcaggtgctgagcggcagtgcctcggtattagctccatgacccaagctgttgacntctgcccgggctgaantcaccacttccccagggctccctccgcccagtcgganctgttctccgctcacctcagaatggacggcaaacgtccanctgttctgggtcttcctctcctgggcctggttacatcaagggctggttgcangtnacacccactccatccanggtttctncaccacnanggaaccccctgcttgctgccctggttctccggccacaaccctcctngttttggg

SEQ ID NO: 9991 - DNA, 495 bp, Homo sapiens
  misc_feature (13)..(13): "n" may be a, t, c, g, other or unknown
  misc_feature (44)..(44): "n" may be a, t, c, g, other or unknown
  misc_feature (96)..(96): "n" may be a, t, c, g, other or unknown
  misc_feature (150)..(150): "n" may be a, t, c, g, other or unknown
  misc_feature (172)..(172): "n" may be a, t, c, g, other or unknown
  misc_feature (174)..(174): "n" may be a, t, c, g, other or unknown
  misc_feature (181)..(181): "n" may be a, t, c, g, other or unknown
  misc_feature (317)..(317): "n" may be a, t, c, g, other or unknown
  misc_feature (350)..(350): "n" may be a, t, c, g, other or unknown
  misc_feature (392)..(392): "n" may be a, t, c, g, other or unknown
  misc_feature (403)..(403): "n" may be a, t, c, g, other or unknown
  misc_feature (461)..(461): "n" may be a, t, c, g, other or unknown
  misc_feature (477)..(478): "n" may be a, t, c, g, other or unknown
  misc_feature (480)..(480): "n" may be a, t, c, g, other or unknown
  misc_feature (485)..(485): "n" may be a, t, c, g, other or unknown
  misc_feature (493)..(493): "n" may be a, t, c, g, other or unknown
cctgccgcatganattattttattaaaaaactcaaaggaagcanagtgtggagcggtatctgtcctgcgtgacgtctcacatcggagttggctcanaccctggctgtgcatccatcaaaaagtgcaaggcccaggccatgagctggggangaagcctgacagcttggacccnancacaganggacgtgcagggtggctcatactcatactggaaggcagaaccatcacgatgcctctttgggggttcccagacagaacaaggctcctgggctcccctggtatctccggtcctgggaaaaagcggccgattcttgcanggcaacccctaccaactcccttgaaactcccanctaagtttcttggggcctggtccccaaaaaacctgtttttgnattgggggacntggcttccggggttaaaaaactgggaatttcccctcctggaattgggaacttgggggnttcggttggccttttnngnacctnggggttcngg

SEQ ID NO: 9992 - DNA, 553 bp, Homo sapiens
  misc_feature (105)..(105): "n" may be a, t, c, g, other or unknown
  misc_feature (325)..(325): "n" may be a, t, c, g, other or unknown
  misc_feature (383)..(383): "n" may be a, t, c, g, other or unknown
  misc_feature (414)..(414): "n" may be a, t, c, g, other or unknown
  misc_feature (438)..(438): "n" may be a, t, c, g, other or unknown
  misc_feature (450)..(450): "n" may be a, t, c, g, other or unknown
  misc_feature (468)..(468): "n" may be a, t, c, g, other or unknown
  misc_feature (470)..(470): "n" may be a, t, c, g, other or unknown
  misc_feature (528)..(528): "n" may be a, t, c, g, other or unknown
  misc_feature (540)..(540): "n" may be a, t, c, g, other or unknown
  misc_feature (550)..(550): "n" may be a, t, c, g, other or unknown
  misc_feature (552)..(552): "n" may be a, t, c, g, other or unknown
actaaagacagggtttctccatgttggtcaagctggtctcaaactcccgaccttaggtgatccgcccgcctcggcctcccaaagtgctgggattacaggcatgangcactgcgcctggccccactgacacctcttgtcaaggtctccagtgaccactatgttactgaatgccaaggccaagtcttggtcctcaagggatttgacccagtcagcatcatgtgtcaccgaagccccctctctgcctcctcctcaggaacactttctgcagttggcttctgaacaccagtctcctgctttccccctaccttcctggaaaagtctttcnaagtttctgctggtgctccctcatctcctccaactcctaatgctggaatctctggggntcaggctttgggcccccgctcttctcttaanttacttgcttggtatctcacccantctcataacttntaaacaccatcttttatntntacaactctcaaaaaaaacctaaacttcttttctgaaatcccgaattttattctcccnaatttaaatggnctaatggccncnc

SEQ ID NO: 9993 - DNA, 399 bp, Homo sapiens
  misc_feature (264)..(264): "n" may be a, t, c, g, other or unknown
  misc_feature (288)..(288): "n" may be a, t, c, g, other or unknown
  misc_feature (313)..(313): "n" may be a, t, c, g, other or unknown
  misc_feature (329)..(329): "n" may be a, t, c, g, other or unknown
  misc_feature (346)..(347): "n" may be a, t, c, g, other or unknown
  misc_feature (372)..(372): "n" may be a, t, c, g, other or unknown
  misc_feature (385)..(385): "n" may be a, t, c, g, other or unknown
  misc_feature (390)..(390): "n" may be a, t, c, g, other or unknown
aaaagtggcttagaacaaacaatttactgagcacttactatgcacccatcaggtatattccttttataatgtaatcttcaaaatgagctgtcaaactattggcccattttgtgaatgaggaaaatgaaaattaagttatataatcatgagtggcagagctgggaaatgaactcaagtctgtgactctgaagacatgaaaaagttacacatttcagatgaatgcataaactatctttatgggtatgacatgaaaagtaactgtanaatgttaccttaattacatttccnaatgcatgatgtggacagacattanaaaagtttggactccnttggaaaaacaaatccnncagttaaaaaagtcctttacttgcnatccccacccctngctancccggaacc

SEQ ID NO: 9994 - DNA, 542 bp, Homo sapiens
  misc_feature (120)..(120): "n" may be a, t, c, g, other or unknown
  misc_feature (132)..(132): "n" may be a, t, c, g, other or unknown
  misc_feature (161)..(161): "n" may be a, t, c, g, other or unknown
  misc_feature (242)..(242): "n" may be a, t, c, g, other or unknown
  misc_feature (430)..(430): "n" may be a, t, c, g, other or unknown
  misc_feature (440)..(440): "n" may be a, t, c, g, other or unknown
  misc_feature (442)..(442): "n" may be a, t, c, g, other or unknown
  misc_feature (444)..(444): "n" may be a, t, c, g, other or unknown
  misc_feature (470)..(470): "n" may be a, t, c, g, other or unknown
  misc_feature (499)..(499): "n" may be a, t, c, g, other or unknown
  misc_feature (526)..(526): "n" may be a, t, c, g, other or unknown
  misc_feature (531)..(531): "n" may be a, t, c, g, other or unknown
  misc_feature (542)..(542): "n" may be a, t, c, g, other or unknown
acgtaaacacaaagtctcatttatttttgtctgaagcgcacaggagctcactcagcacaataacagtaagcgaatcatacaaatattgagaaaaaatgttcctatgaatacatacatgtntattcttaagantagcgatcaggagtttaacaacaaatgtnaagtggttttctctaaagaatgctttctgacaggcttttgggttggaaatggacaggtaaatcactgtcacataacaggtnagctaagaataacttctgttacccaagtcatttgaaccctgtggactgtgaaagccctcttggaatttacatttaattccatcattggtctggttgacttccacatttcactaaatttggacaagatccacaaagtaactcctcaactctcagtctttcacactcaggtctgtgggaaagaaaggcantgaaaccagntntnaacacatgccccgaaaacaattttangatttctacagtttcctccgtttccgccntcccaaattctacctaactggctattnttctnaaatgctaccn

SEQ ID NO: 9995 - DNA, 529 bp, Homo sapiens
  misc_feature (117)..(117): "n" may be a, t, c, g, other or unknown
  misc_feature (130)..(130): "n" may be a, t, c, g, other or unknown
  misc_feature (281)..(281): "n" may be a, t, c, g, other or unknown
  misc_feature (289)..(289): "n" may be a, t, c, g, other or unknown
  misc_feature (298)..(298): "n" may be a, t, c, g, other or unknown
  misc_feature (300)..(300): "n" may be a, t, c, g, other or unknown
  misc_feature (314)..(314): "n" may be a, t, c, g, other or unknown
  misc_feature (354)..(354): "n" may be a, t, c, g, other or unknown
  misc_feature (394)..(394): "n" may be a, t, c, g, other or unknown
  misc_feature (436)..(437): "n" may be a, t, c, g, other or unknown
  misc_feature (460)..(460): "n" may be a, t, c, g, other or unknown
  misc_feature (463)..(463): "n" may be a, t, c, g, other or unknown
  misc_feature (503)..(503): "n" may be a, t, c, g, other or unknown
  misc_feature (508)..(508): "n" may be a, t, c, g, other or unknown
ggctgaattttctctccctttattctgaaaactctaccccctcacatccctaatccctgttctgtccctgccacatacacacacagacgtctgacctgcacctccaagttcccaaanatattgtacgtanaaaaaacaaacctttttttattgacattcacactcaacactgaacactccttgccaccaactgtgtgggttttctcccacactggccaattctccaataccaactggatatcatacaattcaattctggcattaatcggcattaagtgcanatccccancaggttaananctcagtcccataanatctcccccaacttcagacaccagtcacaagcagtaggtnccaaagttactcacatcttctatctgacgtggctacaaancaaaagttcccatgatttccctctcagattcaccatttgctnnaattactcccaaaatccggaaanggnttatttactatccccctctattataaaataatatactccnaaacncccaatggaggcccggaaaag

SEQ ID NO: 9996 - DNA, 536 bp, Homo sapiens
  misc_feature (113)..(113): "n" may be a, t, c, g, other or unknown
  misc_feature (157)..(157): "n" may be a, t, c, g, other or unknown
  misc_feature (347)..(347): "n" may be a, t, c, g, other or unknown
  misc_feature (349)..(349): "n" may be a, t, c, g, other or unknown
  misc_feature (380)..(380): "n" may be a, t, c, g, other or unknown
  misc_feature (399)..(399): "n" may be a, t, c, g, other or unknown
  misc_feature (418)..(418): "n" may be a, t, c, g, other or unknown
  misc_feature (420)..(420): "n" may be a, t, c, g, other or unknown
  misc_feature (458)..(458): "n" may be a, t, c, g, other or unknown
  misc_feature (481)..(481): "n" may be a, t, c, g, other or unknown
  misc_feature (486)..(486): "n" may be a, t, c, g, other or unknown
gttgttgttttggtaggctattaattactgcctcaatttcagagcttgttattggtctattcagggattcggctttttcctggtttagtcttggtagggtgtatgtgtccagnaatttatccatttcttctaaattttctagtttatttgcatcganttgtttatagtattctctgatggcagtttgtatttctgtggggtcagtggtgatatcccctttatcattttttattgtgtctatttgattcttctccctcttcttccttattagtctagctaatggtctatctattcgttaattttttcaaaaaaaaaacagctcctggaattcattgatttttttggangnatttttcacgtctctatcaccatcaattctnccctgatcttaattattanttacttgttttaattgctncnctgatcttagttatccacttaattagtgggttaatgcnggattttttcccttgttttttcnataanttttaagaattctgttttaaccccaaattaaaaaaattttttttaattta

SEQ ID NO: 9997 - DNA, 519 bp, Homo sapiens
  misc_feature (260)..(260): "n" may be a, t, c, g, other or unknown
  misc_feature (338)..(338): "n" may be a, t, c, g, other or unknown
  misc_feature (395)..(395): "n" may be a, t, c, g, other or unknown
  misc_feature (407)..(407): "n" may be a, t, c, g, other or unknown
  misc_feature (421)..(421): "n" may be a, t, c, g, other or unknown
  misc_feature (423)..(423): "n" may be a, t, c, g, other or unknown
  misc_feature (426)..(426): "n" may be a, t, c, g, other or unknown
  misc_feature (429)..(429): "n" may be a, t, c, g, other or unknown
  misc_feature (499)..(499): "n" may be a, t, c, g, other or unknown
  misc_feature (502)..(502): "n" may be a, t, c, g, other or unknown
  misc_feature (512)..(512): "n" may be a, t, c, g, other or unknown
agttttttatttctgtgtatacgaagcagtctaagaaagaatgttatctctagagacaaatattgaggaccccagaaaaattataaagatttttaaaaatccttaggaataatccgttgtaattcatcctgagaaaataatactctttgcactttacccttcatactcagcatatcatctgtcctatatagtcttcaattatataatagaaaatgttttctaccagttctctccaaaagctgaaattacttttttccccnccctcagttagtttttcctcttcaactccaaacaaactggtgtctatacataaatcctagatccaagattccaattcnagaaagaacatccaggaccccaatttatatatattctagctaccactaatttctgtngtgctacctgtngcacatgatatgananaantcncttggaaattgacgttggctttttggtcttcccaactctttccccatattttcccctgttgttggttccnttntaaaagcatngctgcca

SEQ ID NO: 9998 - DNA, 419 bp, Homo sapiens
  misc_feature (13)..(13): "n" may be a, t, c, g, other or unknown
  misc_feature (182)..(182): "n" may be a, t, c, g, other or unknown
  misc_feature (217)..(217): "n" may be a, t, c, g, other or unknown
  misc_feature (220)..(220): "n" may be a, t, c, g, other or unknown
  misc_feature (234)..(234): "n" may be a, t, c, g, other or unknown
  misc_feature (236)..(236): "n" may be a, t, c, g, other or unknown
  misc_feature (246)..(246): "n" may be a, t, c, g, other or unknown
  misc_feature (304)..(304): "n" may be a, t, c, g, other or unknown
  misc_feature (350)..(350): "n" may be a, t, c, g, other or unknown
  misc_feature (372)..(372): "n" may be a, t, c, g, other or unknown
  misc_feature (376)..(376): "n" may be a, t, c, g, other or unknown
  misc_feature (383)..(383): "n" may be a, t, c, g, other or unknown
  misc_feature (399)..(399): "n" may be a, t, c, g, other or unknown
  misc_feature (412)..(412): "n" may be a, t, c, g, other or unknown
  misc_feature (415)..(415): "n" may be a, t, c, g, other or unknown
gtatttttagtanagacgggatttcaccatgttggccatggtctcgaactcctgacctcgtgatctgcccacctcggcctcccaaagtgctgggactataggtgtgagccaccacgcccagccaatatatttttacctacatcattttacccactgtagaaaatgcatcagaaagggctccnaacattatgatatggtcaatcttactctcatggantantaacctaaggaaanantaaacttccngctgacttaagtatttgtgtctgtacctaagttcactaatgggttatgctttcatgantactagttttaatatttatctatgcaacttgtgttctgtctgaaanaaaaatacacttgtttcctganggcncactgcnaggaaacataccagtnatgatagacaaancangaat

SEQ ID NO: 9999 - DNA, 545 bp, Homo sapiens
  misc_feature (9)..(9): "n" may be a, t, c, g, other or unknown
  misc_feature (24)..(24): "n" may be a, t, c, g, other or unknown
  misc_feature (31)..(31): "n" may be a, t, c, g, other or unknown
  misc_feature (109)..(109): "n" may be a, t, c, g, other or unknown
  misc_feature (165)..(165): "n" may be a, t, c, g, other or unknown
  misc_feature (379)..(379): "n" may be a, t, c, g, other or unknown
  misc_feature (408)..(408): "n" may be a, t, c, g, other or unknown
  misc_feature (459)..(459): "n" may be a, t, c, g, other or unknown
  misc_feature (470)..(470): "n" may be a, t, c, g, other or unknown
  misc_feature (479)..(479): "n" may be a, t, c, g, other or unknown
  misc_feature (502)..(502): "n" may be a, t, c, g, other or unknown
  misc_feature (513)..(513): "n" may be a, t, c, g, other or unknown
  misc_feature (521)..(521): "n" may be a, t, c, g, other or unknown
  misc_feature (537)..(537): "n" may be a, t, c, g, other or unknown
gagacggantcttgctgttaccangctggantgtggtggcacaatcttggctcactgcaacctgcccctccttgcttcaagcaattccctgcctcagcctccggggtanttgggattataagcacccgcaaccatgcctggctaatttttgtatttttagtaaanacggggtttcaccatgttggccaggctggtcttgaactcctgtccttgtgatctacccgcctcagcctcccaaagtgctgggattacaggtgtgagccactgcacccagtcaaaaattttttagtgttagatttgcaacaacatttttttttttaatgcatgtgcatcagtaacttttatgtatacagttttcaaatatttcattgtttctcancatacttcaactcattaaatctttcccantcttcccctgggcatgcatacatgtcaacatcagttcaatttcctgtccanggtacacaatnaaccctgtntttgggaacctttgaaccggtcntaacttacaangggcaacncctgttaaaaggtganacaaaaaa

SEQ ID NO: 10000 - DNA, 543 bp, Homo sapiens
  misc_feature (10)..(10): "n" may be a, t, c, g, other or unknown
  misc_feature (194)..(194): "n" may be a, t, c, g, other or unknown
  misc_feature (254)..(254): "n" may be a, t, c, g, other or unknown
  misc_feature (377)..(377): "n" may be a, t, c, g, other or unknown
  misc_feature (409)..(409): "n" may be a, t, c, g, other or unknown
  misc_feature (416)..(416): "n" may be a, t, c, g, other or unknown
  misc_feature (476)..(476): "n" may be a, t, c, g, other or unknown
  misc_feature (482)..(482): "n" may be a, t, c, g, other or unknown
  misc_feature (542)..(543): "n" may be a, t, c, g, other or unknown
gttttgtcanctccatccatgttccgtccacagacatcttgttcttttttatggctgcatagtatttcatggtgtataagtgccacattttctttatccaatctgtcattgataggcatttaggttaattccatgtctttgcaattgtgaatagtgttgcaatgaacattcacatgcatgtgtctttatggtanaaacaccgtaaggtcaatttatattcctctgggtatatatccagtaatagaattgttgantcaactggtagttctgcttttagctctttgaggaatcaccatactgcttttcacaatagttggacaaatgtctactcctactaacagtgtataagtgttcccttttctccacaacctcaccancatctgttgttttttgactttttaataatggncattcanactggtatgaaatggtatctcattgtggttttgaattgcatttctcttatgaaaaatganattganctcttttccaatgctgtttgaacacatatatttcttgttttgaaaaattcgttcagtccnn

SEQ ID NO: 10001 - DNA, 396 bp, Homo sapiens
  misc_feature (4)..(4): "n" may be a, t, c, g, other or unknown
  misc_feature (147)..(147): "n" may be a, t, c, g, other or unknown
  misc_feature (262)..(262): "n" may be a, t, c, g, other or unknown
  misc_feature (316)..(316): "n" may be a, t, c, g, other or unknown
  misc_feature (333)..(333): "n" may be a, t, c, g, other or unknown
  misc_feature (347)..(347): "n" may be a, t, c, g, other or unknown
  misc_feature (365)..(365): "n" may be a, t, c, g, other or unknown
  misc_feature (373)..(373): "n" may be a, t, c, g, other or unknown
  misc_feature (376)..(376): "n" may be a, t, c, g, other or unknown
  misc_feature (393)..(393): "n" may be a, t, c, g, other or unknown
ctanagtttttttaatggtgctgacattctcttcaatatgtccatgcttagcttgggtttctgggggacagatgagtagctagtactacccatctaaaacacaatgttcattagttggaataatggtgtgatatgatagtcttcaanatgatgccctcaatttctttcctccctgcatgcacatgctgctgtttacattgacaggtagagtcgaatctcccatttcttgaatctgtgctggtcacaatgacttgcttttccnataggatggagcagaaatcgtactctaggacctccaaggctaggtcctaagaanctttgtagtatttgccngtgtgtcttggganaaactaccaccttgtgancactccangtnacattgaaaagtccganaag

SEQ ID NO: 10002 - DNA, 536 bp, Homo sapiens
  misc_feature (302)..(302): "n" may be a, t, c, g, other or unknown
  misc_feature (326)..(326): "n" may be a, t, c, g, other or unknown
  misc_feature (335)..(335): "n" may be a, t, c, g, other or unknown
  misc_feature (428)..(428): "n" may be a, t, c, g, other or unknown
  misc_feature (430)..(430): "n" may be a, t, c, g, other or unknown
  misc_feature (479)..(479): "n" may be a, t, c, g, other or unknown
  misc_feature (482)..(482): "n" may be a, t, c, g, other or unknown
  misc_feature (510)..(510): "n" may be a, t, c, g, other or unknown
  misc_feature (522)..(522): "n" may be a, t, c, g, other or unknown
  misc_feature (532)..(532): "n" may be a, t, c, g, other or unknown
  misc_feature (535)..(535): "n" may be a, t, c, g, other or unknown
ggtgtttcggtcttgttgcccaggctggagtgcaatggcacgatctcggctcaccgtaacctccgcctcctgggttcaagcaattctccctgcctcagcctcccaagtagctgggattacaggcacctaccaccatgcccggctaatttttgtattttttagtaaaaacagggttttgtcatgttggtcaggttggcctctaactcctggcctcaggtgatacgcctatctcgacctcccaaagcactgggattacaggcatgagccaccacatccggccagcattttaacagataatagancacattctccattgaactcttcanaaaaatgtnctggactctgcaaaccaatgactgaaatgccatgctgctcctcttttaattttgaaagatcttcttcatcattatctccttccccaagttttnantgtggttaatggaaattggctttgttggaattgcccccccccgaagccnccnccccaaaaaataagttccgcccaaaaanctttcaaaaaantttttttccncant

SEQ ID NO: 10003 - DNA, 522 bp, Homo sapiens
  misc_feature (446)..(446): "n" may be a, t, c, g, other or unknown
  misc_feature (452)..(452): "n" may be a, t, c, g, other or unknown
  misc_feature (471)..(471): "n" may be a, t, c, g, other or unknown
  misc_feature (486)..(486): "n" may be a, t, c, g, other or unknown
  misc_feature (490)..(490): "n" may be a, t, c, g, other or unknown
  misc_feature (511)..(511): "n" may be a, t, c, g, other or unknown
  misc_feature (521)..(521): "n" may be a, t, c, g, other or unknown
aagttgacaattaagcagactttatatcagcatctaacttttttaaaaaaaaggcaagttacaatataggaattttagagaattgatgcatttgagaaaagatgaagcagatagatatataattgttcacagtggtaaattataggtggttttctcacattttatgtcagtttcttgtatatcaaaaaatacattcatactatgagacacaggaatctttacatccaaaataatttgatacagatgccttaacattgctgaatgagacaactttggaaagattcttgttttgtgattcctttttaccctctaagcacagtgctttgttaacactgtgtgtgtagtaaatgtgtgtgctgcttaaggtaaagaattctagtaaactaaatgcccaaggtgactgcgtgattccatgccagacaggaaaaagcagtcatgctttttgnccctanctgaacgtttgtttccccncaaactatgttttcntccncagaaatatgaaatatgctanatccagttcna

SEQ ID NO: 10004 - DNA, 510 bp, Homo sapiens
  misc_feature (34)..(34): "n" may be a, t, c, g, other or unknown
  misc_feature (170)..(170): "n" may be a, t, c, g, other or unknown
  misc_feature (266)..(266): "n" may be a, t, c, g, other or unknown
  misc_feature (324)..(324): "n" may be a, t, c, g, other or unknown
  misc_feature (421)..(421): "n" may be a, t, c, g, other or unknown
  misc_feature (430)..(430): "n" may be a, t, c, g, other or unknown
  misc_feature (445)..(445): "n" may be a, t, c, g, other or unknown
  misc_feature (450)..(450): "n" may be a, t, c, g, other or unknown
  misc_feature (485)..(485): "n" may be a, t, c, g, other or unknown
  misc_feature (490)..(490): "n" may be a, t, c, g, other or unknown
  misc_feature (509)..(509): "n" may be a, t, c, g, other or unknown
gagatggagtctagctctgtcgcccaggctggantgcagtggcgccatcttggctcactgcaagctccgcctcccgggttcatgccattctcctgcctcagcctcccgagtagctgggactacaggcgcccgccaccacgcccagctaattttttgtatttttagtaaanacggggtttcactgtgttagccaggatggtctcgatctcctgaccttgtgatcctcccgccttggcctcccaaagtactgggaatacaggcatganccaccgcgcccggccaagtatatacatatttttattcataatgtggacagggtggtcnacagagaaaacagacttatacatgaaagatgaattaatgaatgagattaaaattgttttataatttttacatttaaatccttgaaaattaaaaagtnagaaatatnatagcttaaatatcntatcnttaaaaattaacttgccttatttaaattaaatganaaatntttccgtattttttgtttna

SEQ ID NO: 10005 - DNA, 550 bp, Homo sapiens
  misc_feature (48)..(48): "n" may be a, t, c, g, other or unknown
  misc_feature (58)..(58): "n" may be a, t, c, g, other or unknown
  misc_feature (392)..(392): "n" may be a, t, c, g, other or unknown
  misc_feature (467)..(467): "n" may be a, t, c, g, other or unknown
  misc_feature (487)..(487): "n" may be a, t, c, g, other or unknown
  misc_feature (505)..(505): "n" may be a, t, c, g, other or unknown
  misc_feature (516)..(516): "n" may be a, t, c, g, other or unknown
  misc_feature (539)..(539): "n" may be a, t, c, g, other or unknown
acaaagtcttaatacgaactgtttaattgttataacaagatttgagangcaggggtangtaagtaagtcaccaactggcgataagtcaccaactgttaatatgtgtctgcaagtttcttgtttttcacaatcactagatttacatacaattataggttaaggttctccgtgtacacatacagtgaaagacattttccaaataccttttgatgtagaatggaacctgagacaaaaaaatcacttaagaaatcaaatctcatataatggaaatactttaaccacagcattcacacatttgactgtggattccaaatgcttatctaaacagaggcaacgcaattaaactgccttcactcaaaatggtgtcagaaggcaactaccctatttactanccactgataagttatgacaacactatttcataacctgtcctatatttcttttaaccccccagccattaggattangattcccccaccctaagggnttatccccaatgccttantgccccaaccnttaaaaatccaaattgcatgccncttgaaaaact

SEQ ID NO: 10006 - DNA, 231 bp, Homo sapiens
  misc_feature (225)..(231): "n" may be a, t, c, g, other or unknown
agagttgaaatatattctttattttcaggatggaaataggatagggaaggaggaaagatacctttgttagttgccactgcagtaccatcgaaagaacatcctggggaaacaaagaggtatgtgtgctacaggaggggttggtgactagagacttaggtcccggaggcctggacaccagggtcaaaaaggtgtacagggcccagactcctggttctgagggaggannnnnnn

SEQ ID NO: 10007 - DNA, 487 bp, Homo sapiens
  misc_feature (155)..(155): "n" may be a, t, c, g, other or unknown
  misc_feature (205)..(205): "n" may be a, t, c, g, other or unknown
  misc_feature (367)..(367): "n" may be a, t, c, g, other or unknown
  misc_feature (397)..(397): "n" may be a, t, c, g, other or unknown
  misc_feature (439)..(440): "n" may be a, t, c, g, other or unknown
  misc_feature (455)..(455): "n" may be a, t, c, g, other or unknown
  misc_feature (457)..(457): "n" may be a, t, c, g, other or unknown
  misc_feature (465)..(465): "n" may be a, t, c, g, other or unknown
  misc_feature (477)..(477): "n" may be a, t, c, g, other or unknown
gtttgtatatttacttgtttattgcccatgcctccccccagcaagaatgtaacctccaagaggacaagtgttgtgtctcgcttactcacatctgtggcctcagtgccttgcattgccacccccacgcaccccaccgcccccagagtgccgcaaanagagtgcaaaataaatatttgttaaatgaatgatgaagggaatggtggangaggctgtctgggccctttatggaattacttcagctcagttatgtctatttcttttttttaatcctcctctctctgcccgtcagcttccattcattccccacctcccatctccagggaaggggtgaaaggatggagacagactgacgggttgcctggctgangcttgttttagggtgtggagcaacccccancccaactgaactgtctgggcttccgggaaggaagaaaaaccnntccgtcccaaaaccncnaaaattanttgtggggttcnaaaaaggcct

SEQ ID NO: 10008 - DNA, 543 bp, Homo sapiens
  misc_feature (372)..(372): "n" may be a, t, c, g, other or unknown
  misc_feature (458)..(458): "n" may be a, t, c, g, other or unknown
  misc_feature (463)..(463): "n" may be a, t, c, g, other or unknown
  misc_feature (480)..(480): "n" may be a, t, c, g, other or unknown
  misc_feature (521)..(521): "n" may be a, t, c, g, other or unknown
  misc_feature (533)..(533): "n" may be a, t, c, g, other or unknown
  misc_feature (536)..(536): "n" may be a, t, c, g, other or unknown
aattttctttacaatatttatttgaaaattccaacagtacagattgtatataaagactctaattgagattcttgtttcattgacaaattgttaaaattcttaactgccagtggtggtagctcacacttgtaattccagcactttgggacgctgaggctggcggattgcttgaatcccgaagttcaaaaccagactggacaacatggtaaaaccccatctctcatgtaaacccaattccaatttcatcaccatttcagaaagatgacgattttctaatttgagtgactccagctgatccaaaatctccttatgctctactgctttgtcttctgccttttgcatctctgctctgaagtcctttccgtgtctgangaaagaacctttggtggaagcaatagtgatatctcgctgatgttactcctgagttagatgggaaattccatcttcattccttctantgcanaactgttactttgttcncccgttaaatctgttcttccacttcttaaccctgccttgtntccctggtattnctnccccccc

SEQ ID NO: 10009 - DNA, 538 bp, Homo sapiens
  misc_feature (235)..(235): "n" may be a, t, c, g, other or unknown
  misc_feature (329)..(329): "n" may be a, t, c, g, other or unknown
  misc_feature (333)..(333): "n" may be a, t, c, g, other or unknown
  misc_feature (420)..(420): "n" may be a, t, c, g, other or unknown
  misc_feature (431)..(431): "n" may be a, t, c, g, other or unknown
  misc_feature (458)..(458): "n" may be a, t, c, g, other or unknown
  misc_feature (472)..(472): "n" may be a, t, c, g, other or unknown
  misc_feature (519)..(519): "n" may be a, t, c, g, other or unknown
gcgttttcatactctttattgccaacggtttaaaatggtcaacataaaaaaaaagacattttgataataaatactgctctttgggctgtaataaataaaaagtttattaacaaggaatgcacttttccagccacaagtatcttcaaaaattaatgaaaaaaaattatatatggccatagttcacagttacgcagccaaaagctgctccaattacagcctttaaacaacatgggancttcctcccttctccctccccttcaggaagtatattcacagttccaaagtcctctggctgaaatgctctcaccagaaaaaaatttagaaatcantgcncctttctgcaaaattgtctgaaaaaaccttttaaaacaggtttctcaaggaaaaactgcattctggtccctcttggattgtccaaantcaaaaatgtntgccttaacctgttctggttccaccantccaacaggcccangggaaatgttttcgtaccacacatttttctcttctccaaatactctnattatcctttgggtcccgt

SEQ ID NO: 10010 - DNA, 483 bp, Homo sapiens
  misc_feature (73)..(73): "n" may be a, t, c, g, other or unknown
  misc_feature (82)..(82): "n" may be a, t, c, g, other or unknown
  misc_feature (87)..(87): "n" may be a, t, c, g, other or unknown
  misc_feature (89)..(89): "n" may be a, t, c, g, other or unknown
  misc_feature (199)..(199): "n" may be a, t, c, g, other or unknown
  misc_feature (213)..(213): "n" may be a, t, c, g, other or unknown
  misc_feature (252)..(252): "n" may be a, t, c, g, other or unknown
  misc_feature (274)..(274): "n" may be a, t, c, g, other or unknown
  misc_feature (332)..(332): "n" may be a, t, c, g, other or unknown
  misc_feature (359)..(359): "n" may be a, t, c, g, other or unknown
  misc_feature (426)..(427): "n" may be a, t, c, g, other or unknown
  misc_feature (444)..(444): "n" may be a, t, c, g, other or unknown
  misc_feature (457)..(457): "n" may be a, t, c, g, other or unknown
  misc_feature (467)..(468): "n" may be a, t, c, g, other or unknown
  misc_feature (483)..(483): "n" may be a, t, c, g, other or unknown
gtttctctaaaatttagaatcttaaactaaatcctttatttcaaaaacaaacataaaataatttcccaggcanaaaaaaagnttgananggaaacgttcttgttagcagtcccttcctgcataaatggggttggagaaaaaagaaaaaaggaatggccaaaggtatggaaagctttcacaatgcatgccgagtgtgaantgaccccccagcanatggggtttatcatctttacttagtcacacaacatcaangactggttagttccaggggaanggctccatttcattacctgggtcagttctcttcccccgcatgctccacaatgcagtanaacaaacaacacattcatttacaatanaatgtttaaataacacctgtccaataactgcccttacttctttgtgctgtccggaaaagaaaaaacnnaaagccattaaaccccnaccctttggccancccacccgtnnctattctcctggggn

SEQ ID NO: 10011 - DNA, 569 bp, Homo sapiens
  misc_feature (91)..(91): "n" may be a, t, c, g, other or unknown
  misc_feature (400)..(400): "n" may be a, t, c, g, other or unknown
  misc_feature (450)..(450): "n" may be a, t, c, g, other or unknown
  misc_feature (455)..(455): "n" may be a, t, c, g, other or unknown
  misc_feature (467)..(467): "n" may be a, t, c, g, other or unknown
  misc_feature (484)..(484): "n" may be a, t, c, g, other or unknown
  misc_feature (495)..(495): "n" may be a, t, c, g, other or unknown
  misc_feature (516)..(516): "n" may be a, t, c, g, other or unknown
  misc_feature (527)..(527): "n" may be a, t, c, g, other or unknown
  misc_feature (557)..(557): "n" may be a, t, c, g, other or unknown
  misc_feature (565)..(565): "n" may be a, t, c, g, other or unknown
  misc_feature (569)..(569): "n" may be a, t, c, g, other or unknown
atagagagccgaaatattttattttgattaaatacataatagttatggtcttggtattgcaaataacatgtcttggaaatgtttagatgtngagggagaaataaacaaagtcacaaggtcgaggctttaacataccactctaagaaataagtacacatagccaaaaacaacatactattacagtattatacagtattctgacacagctaggtttcagaaatcattatacttgacaaaaaggataatttacattctttttaaaatcccatgtaacaattacaaaaatctctttagtaacaaagaaaatctctagaaattctcaaaagtagtcttttaatgcatggcattttctgaacacaataaaacactagttgatagaaaaaagacagaaaaaggaatntaacaagcctcctaatttgaaataagcacttttctacattactccgattnaaganaaaaccccaacntaccaaatttttagaanaatatttcttnttttactttccaaaaaacttnttttccaattnccaccattatatttggtggatacttaattnctttaccncccn

SEQ ID NO: 10012 - DNA, 565 bp, Homo sapiens
  misc_feature (158)..(158): "n" may be a, t, c, g, other or unknown
  misc_feature (290)..(290): "n" may be a, t, c, g, other or unknown
  misc_feature (326)..(326): "n" may be a, t, c, g, other or unknown
  misc_feature (392)..(392): "n" may be a, t, c, g, other or unknown
  misc_feature (468)..(468): "n" may be a, t, c, g, other or unknown
  misc_feature (489)..(489): "n" may be a, t, c, g, other or unknown
  misc_feature (522)..(522): "n" may be a, t, c, g, other or unknown
  misc_feature (538)..(538): "n" may be a, t, c, g, other or unknown
  misc_feature (542)..(542): "n" may be a, t, c, g, other or unknown
  misc_feature (559)..(559): "n" may be a, t, c, g, other or unknown
atgatagcacaaagtagtttttaataaaatctgctttttacttatatttaaataaattgcccagttactgaatcagaagcatttcttacaaagcaaacaaaataagcatcccttctatgttaataacatgttaatagtatgttggcaagttgatttanaacaacttgccaacaatacaaacagaaaaaggagtgggtcaaagaaatctagtttggctttattttcaatagatcatactgtctgttgaaaaaggaataaataattatggagcctatctaataatatactcnatagtttgaaattattgagtgcttcctatataatangctccaggctaagtatttcatttgcattctataattatgtttatattaacatgaaggaaacagaanttaagtactaagttcttagcatgcagataacttatatctatttatgacaaactttgtccctacacatgtggctgantaatttcatatctctgggtcntaagaatctttgaacataatggacttaattccntaacctttaactggcnccgntatatctgttcaattcnaaaatg

SEQ ID NO: 10013 - DNA, 589 bp, Homo sapiens
  misc_feature (11)..(11): "n" may be a, t, c, g, other or unknown
  misc_feature (31)..(31): "n" may be a, t, c, g, other or unknown
  misc_feature (79)..(79): "n" may be a, t, c, g, other or unknown
  misc_feature (86)..(86): "n" may be a, t, c, g, other or unknown
  misc_feature (269)..(269): "n" may be a, t, c, g, other or unknown
  misc_feature (358)..(359): "n" may be a, t, c, g, other or unknown
  misc_feature (404)..(404): "n" may be a, t, c, g, other or unknown
  misc_feature (419)..(419): "n" may be a, t, c, g, other or unknown
  misc_feature (437)..(437): "n" may be a, t, c, g, other or unknown
  misc_feature (444)..(444): "n" may be a, t, c, g, other or unknown
  misc_feature (465)..(465): "n" may be a, t, c, g, other or unknown
  misc_feature (500)..(500): "n" may be a, t, c, g, other or unknown
  misc_feature (522)..(522): "n" may be a, t, c, g, other or unknown
  misc_feature (529)..(529): "n" may be a, t, c, g, other or unknown
  misc_feature (542)..(542): "n" may be a, t, c, g, other or unknown
  misc_feature (558)..(558): "n" may be a, t, c, g, other or unknown
  misc_feature (566)..(566): "n" may be a, t, c, g, other or unknown
  misc_feature (589)..(589): "n" may be a, t, c, g, other or unknown
gaaaaacatanattttttttttcctccagantagtagctaattttgttttttttttgacagtctcactctgttgcccanacaggantgcagtggtgcaatcttggcccactgcaacctccacctcctgggttcaggtgattctcctccatcagcctcccaagtatctgggattacaggtgcccgccatcactcctggctaatttttctattttagtaaaaatgggtttttgtcatgttggccacgctggtttcaaacccttgacctcangtgattctctggcctcagcctcccaaagtccaggggattacaggtgtgagccaccacacctggcttcttttaactctgcaaaggggccnngtctggcatacagtttgaaatttgctgccacaatcccattttgcnaaccccaaattcctngtggaaaaaaggggggtnttccatnggcccactaacccattgggcnaattaaactcctttgctccccaaactgtttgccanaaaaccttaaaaggaaggcccncccattntggaaacaaattntttttcccctttttantaaaaaanataacccttttttaaaaatcttn

SEQ ID NO: 10014 - DNA, 541 bp, Homo sapiens
  misc_feature (118)..(118): "n" may be a, t, c, g, other or unknown
  misc_feature (353)..(353): "n" may be a, t, c, g, other or unknown
  misc_feature (377)..(377): "n" may be a, t, c, g, other or unknown
  misc_feature (429)..(429): "n" may be a, t, c, g, other or unknown
  misc_feature (461)..(462): "n" may be a, t, c, g, other or unknown
  misc_feature (467)..(467): "n" may be a, t, c, g, other or unknown
  misc_feature (484)..(484): "n" may be a, t, c, g, other or unknown
  misc_feature (489)..(489): "n" may be a, t, c, g, other or unknown
  misc_feature (514)..(514): "n" may be a, t, c, g, other or unknown
  misc_feature (535)..(535): "n" may be a, t, c, g, other or unknown
ctgtgtttgattggttttattttatactcagctttattttatatcacaaaactgtaattcaggtataaggttatttcacactttaagggcattctgtctctttctccagacctgaaanagatgtttcaaggatcattcacctggctaatccacaatatatcaaaatgctgacagacctacaaaatcattatgccaaacaaactcctccaagtcgtacattgcacagtctccaactgttaaacaaattagccaatttatctctgaaccattgttttgtgctttccttagctttcatatatacactctggcactttgtcattgctgggagaatgctgattagtttgaaatggaanaaaccaacgccattcttgcttganatgggggcagttttctctcaatgttgcaaaatatgcccaaatcatttaaganacagaaatctctcttggtaatggtggattatnnatganaatgaaaaaaaaccccnacttntggatgttttaataatctatttganacctaaaaaaatggtgccaanccacat

SEQ ID NO: 10015 - DNA, 559 bp, Homo sapiens
  misc_feature (361)..(361): "n" may be a, t, c, g, other or unknown
  misc_feature (510)..(510): "n" may be a, t, c, g, other or unknown
  misc_feature (518)..(518): "n" may be a, t, c, g, other or unknown
  misc_feature (539)..(539): "n" may be a, t, c, g, other or unknown
  misc_feature (550)..(550): "n" may be a, t, c, g, other or unknown
  misc_feature (559)..(559): "n" may be a, t, c, g, other or unknown
gcattttttttattgccaccagtgtagtcccaacctccatcctctctcacctggatcacagtaagcctctgcccctgccaatccattctccacaaagcagagtgatctctaggaaagcaactcaggttgtgtcccactcttaggtaaaaccctccaacagtttctcatgcctcagaatgaaatctaatctccttatcctggactctaacaaccccctcgatttagcccctacctgccctatctcttgcactctttccttgctcactcaatttcagccactggtgtccttccatgctttcattcattcatcctcaggcctttgagcatgttattccttctgctttacacagcctctctctgntctttgcctggttatctcctacttgtctggttctctgtgtgtcacttttcccacacaggtcttctctgacttcctaatactaaattaggatcataagtctcagtttcctcatttctgaaataaggtattctgcggattaaatgagaacnttcatgtnaaggttgttggccaagtactngcccacagtgnggaccttan

SEQ ID NO: 10016 - DNA, 561 bp, Homo sapiens
  misc_feature (446)..(446): "n" may be a, t, c, g, other or unknown
  misc_feature (453)..(453): "n" may be a, t, c, g, other or unknown
  misc_feature (510)..(510): "n" may be a, t, c, g, other or unknown
  misc_feature (522)..(522): "n" may be a, t, c, g, other or unknown
  misc_feature (531)..(531): "n" may be a, t, c, g, other or unknown
  misc_feature (549)..(549): "n" may be a, t, c, g, other or unknown
agagtaaaaaaggagtttatatatttataaatgccaaataaataccagaggccacccaacgccccctcccagacagggctgtctcccccagccctaggcttctagggtgtgagacatcttggccccaagctatagcccaagagcagctgtcagtctgtgctaccagggaactgagtgaggatgatctgtccagccaagtttcactccccctgagtgaggggcccccatagccacaggcctgggtccctgtataggaccctaagggtgaaagactcagggggagaaggtggccatctcgagtgagacccgctgccacagctccttggtctgtttgctgcgcttgaggttctgtaggatgtcgttgaactgcatcatgcccatgggcgtcaggcagaaggcgctgcgggcactccggatcgcattcacaaagtcgtcgtagtccgcangagtcangtgaatcaagctgtggtggatgtactgcatgtatgcctgctggcaacgcttgaccanttggtggaaggnccgggcacncaggtgggtgtgggcctnaaccggactaac

SEQ ID NO: 10017 - DNA, 524 bp, Homo sapiens
  misc_feature (57)..(57): "n" may be a, t, c, g, other or unknown
  misc_feature (60)..(60): "n" may be a, t, c, g, other or unknown
  misc_feature (193)..(193): "n" may be a, t, c, g, other or unknown
  misc_feature (395)..(395): "n" may be a, t, c, g, other or unknown
  misc_feature (446)..(446): "n" may be a, t, c, g, other or unknown
  misc_feature (450)..(450): "n" may be a, t, c, g, other or unknown
  misc_feature (461)..(461): "n" may be a, t, c, g, other or unknown
  misc_feature (468)..(468): "n" may be a, t, c, g, other or unknown
  misc_feature (476)..(476): "n" may be a, t, c, g, other or unknown
  misc_feature (483)..(483): "n" may be a, t, c, g, other or unknown
  misc_feature (514)..(514): "n" may be a, t, c, g, other or unknown
ggcaggtttccttttattggttctagacagtttgtggaaggaagagatgaggccatntanaggccggcaggctcgcccagtgccccaaacactgccaccctgaagtagtgttggaagctgctccagggatgttgcagccctaagcacagtgacaggtgggggcaggagcagcaggggtccccgaggtgttganaggctggtgagggcacagagaagggacctcctggggctgaggcccctggtggccctatgtgttggagcacgctggcgcttgtctgtccggcctccagtcacgccaaggcctcctgccctgaccaccagcaatgctggcctcaatgtggctgaagctggacgtgtgactttgaccccgtgagggggtcctgggaagggctcanttgctgccgttgcttgtcgtcactgtccaggtatgcacccagttggctcangganggaccccccangcgttangggtttanggtcggnctccttcctggtctggggggcttctggggtngggggcccct

SEQ ID NO: 10018 - DNA, 553 bp, Homo sapiens
  misc_feature (504)..(504): "n" may be a, t, c, g, other or unknown
  misc_feature (516)..(516): "n" may be a, t, c, g, other or unknown
  misc_feature (521)..(521): "n" may be a, t, c, g, other or unknown
  misc_feature (529)..(529): "n" may be a, t, c, g, other or unknown
  misc_feature (531)..(531): "n" may be a, t, c, g, other or unknown
  misc_feature (533)..(533): "n" may be a, t, c, g, other or unknown
  misc_feature (546)..(546): "n" may be a, t, c, g, other or unknown
aatgctttaaaaactgtatttgtacaacaggataaaaacagtttttctttcggatgccagttgcaagtttccatgtaacgtatcttaatctacattcccaaagtaattgtgtctcaggtaacctttgccctgcccaaaagatgaacaaaaataaccagaaaggtaaaaatctgtctttggagttgggggaatcactggccacttgcaaactgccacttcactgccaacttttatccaagaaaaccggtttctaaaaacctgcaaaagggacatttaagaggaagctgttccctgaacgaagactgagcaggacaagccaaaagcggtgccaggggacaatgccagatggggaaagtaggagccgggttgtgagacggaaacacacacgccaagaacagccagggagcaaagcgaggagttctggcttctcgtaactcatgaaggatgaatgctcatcggttaaatttagacgataaagctgatgatgacggccccgggggccgnttttggaacccncttanttccagtncncnagaaaagaaaatnttggagg

SEQ ID NO: 10019 - DNA, 559 bp, Homo sapiens
  misc_feature (422)..(422): "n" may be a, t, c, g, other or unknown
  misc_feature (509)..(509): "n" may be a, t, c, g, other or unknown
  misc_feature (518)..(518): "n" may be a, t, c, g, other or unknown
gagatggagtctcaccctgttgcccaggctggagtgcagtggtgcgatctcagctcattgcaacctccgcctcctgggttcaagagattctcctgactcagtctcccaaatagctgggattacaggcacccaccaccatgcccagccaacttttcatatttttagtagagatggggtttcaccgtgttggccaggctggtctcgaactcctgacctcaactgatctgcccgcctcagcctcccaaagtgctgggattacaggcatgagccaccgcacccagccttcaagtattttttctcccctccccctacaatcgccccctcttcagggactctacttacatgtatattgggctgttggaagctatcttgcagctcactgactgatgttcttttaaaaagaattctttttttttctctgngtttcactcaggatagtttctattgagacttctctgagttcactattactttataacatttaatctacccttgatctcatcctgggnatccgcatnttaaaacactgggggtttcatcactgggaagtttgaatttg

SEQ ID NO: 10020 - DNA, 562 bp, Homo sapiens
  misc_feature (482)..(482): "n" may be a, t, c, g, other or unknown
  misc_feature (525)..(525): "n" may be a, t, c, g, other or unknown
  misc_feature (527)..(527): "n" may be a, t, c, g, other or unknown
  misc_feature (542)..(542): "n" may be a, t, c, g, other or unknown
aaacaagtgaacagttttattaagaattaaatgagggtatggaatgtgatacagtacaagtaagacactgaagatgggtataatagtactacttgcacaaaaagttaaatttcacttcaaaaaaaaaaatcacaagacaaaagaaaaagcaattccatcattataaagtaagctatttcatgcaacgtactaatactccccctccccccaaaaccccaacttcccaacaaacaaaaagctatctgaaaatgctgccatgctaacatatgaaccacggtatattcattcatggaaaaacacactcattaagcaatggattagataaaataacacagtttgcagtattgtaaactcatagaccacaatgatttcacatgaaaagcaattccagattcactcatagggtgagtaatatgggctacatagttgagagataatgtaaatataaaccccattaattctctcattatcttctaattatnaaacctggaagcttagataatctggaaaattcatataaaattngnatacttcacttgggntccaagaaatgactttcggt

SEQ ID NO: 10021 - DNA, 514 bp, Homo sapiens
  misc_feature (3)..(3): "n" may be a, t, c, g, other or unknown
  misc_feature (13)..(13): "n" may be a, t, c, g, other or unknown
  misc_feature (41)..(41): "n" may be a, t, c, g, other or unknown
  misc_feature (167)..(167): "n" may be a, t, c, g, other or unknown
  misc_feature (169)..(169): "n" may be a, t, c, g, other or unknown
  misc_feature (245)..(245): "n" may be a, t, c, g, other or unknown
  misc_feature (453)..(454): "n" may be a, t, c, g, other or unknown
  misc_feature (476)..(476): "n" may be a, t, c, g, other or unknown
  misc_feature (480)..(480): "n" may be a, t, c, g, other or unknown
  misc_feature (488)..(488): "n" may be a, t, c, g, other or unknown
  misc_feature (490)..(490): "n" may be a, t, c, g, other or unknown
  misc_feature (509)..(509): "n" may be a, t, c, g, other or unknown
ganacggaattgngctgttgttactccggctggagtgcagnggcgtgatcttggctcaccacaacctccgcctcccgggttcaagcgattctcctgcctcagcctcccgagtagctgggattacaggcgtccaccaccacgcctggctaattttgtatttttaatananatggggtttcaccatgttggtcaggatggtctcgatctcctgacctcgtgatctacctgcctcagcctcccaaagngctgggatgacaggcgtgagccaccacacccggactgctggattttttcttatatcagcttaaacaaactaagatgattattcccacagaggaatcgtttttatccttaaggcggggttaggaggaattcacaagagagacctgctgatggacagacagtacattgcgtgtcgacaggagtccacaccaatgccacctgcaaatcaanngcctgacattcccatgggggcncaanaaaaaggntnaatagatccgtttcctttntatgc

SEQ ID NO: 10022 - DNA, 556 bp, Homo sapiens
  misc_feature (480)..(480): "n" may be a, t, c, g, other or unknown
  misc_feature (503)..(503): "n" may be a, t, c, g, other or unknown
  misc_feature (555)..(555): "n" may be a, t, c, g, other or unknown
agtagagacggggtttcaccatgttagccaggatggtctcgatctcctgacctcatgatctgcctacctccgcctcccaaagtgctgggattacaggcgtgagccaccgtgcccagccagcaaaacaattttctacacaaatgtccttatgaaatgccatgaaccccaagtacacttgggcagaatgaacctattacttcattttccccacagccaatcacccttccccatgccttagaccatcccacttccctcagccataaatatccctaaggcttatcttgaggaggtggatttaatataagttgccaggaccagcagaccctgaaactccccacccctgcccttcctatattctgcttaaaatttggtggatgaacctcattctccctttaattgcagaacagaaatgtgtgacactccctgagtgtcaatgaatgcctgatccctgcctaactcaggaaattcttggcatctttncaaggtgctcccctaaaaatggngctccggggaatgatcttacagaacttaaggctttaccatttatgggatcgna

SEQ ID NO: 10023 - DNA, 555 bp, Homo sapiens
  misc_feature (498)..(498): "n" may be a, t, c, g, other or unknown
  misc_feature (511)..(511): "n" may be a, t, c, g, other or unknown
  misc_feature (515)..(515): "n" may be a, t, c, g, other or unknown
  misc_feature (525)..(525): "n" may be a, t, c, g, other or unknown
  misc_feature (549)..(549): "n" may be a, t, c, g, other or unknown
  misc_feature (551)..(551): "n" may be a, t, c, g, other or unknown
gtagcctcgctctgtcaccaggctggagtgctgtggcacgatctcagctcactgcaacctccgcctcctgggttcaagcaattctcctgcctcagcctcccaagtagctgggactacaggcacgtaccaccatgcccaggtaatttttgtatttttagtacagacgggtttcaccacgttggccaggatggtcttgatctcttgaccttgtgatctgccggtctcggcctcccaaagtgctgggattacaggcgtgagccaccgcacctggcctgggcctgccctattaaacagacttattaccataatcaggaccatgtggttttagcacagagaacaactaacggatacctatgcacacagggaaactatgatgacagacagatactgcagagtaaattattatttaataaactttgctgggataatgggtgtccataaggaaagaactgaaaacggacccactggttactcaatacccaaactcaattagaaaangggattaaaaagnttcnaaagaacacntttttttttttttttttccttgananaggg

SEQ ID NO: 10024 - DNA, 558 bp, Homo sapiens
  misc_feature (31)..(31): "n" may be a, t, c, g, other or unknown
  misc_feature (443)..(443): "n" may be a, t, c, g, other or unknown
  misc_feature (471)..(471): "n" may be a, t, c, g, other or unknown
  misc_feature (491)..(491): "n" may be a, t, c, g, other or unknown
  misc_feature (513)..(513): "n" may be a, t, c, g, other or unknown
  misc_feature (542)..(542): "n" may be a, t, c, g, other or unknown
  misc_feature (546)..(546): "n" may be a, t, c, g, other or unknown
  misc_feature (553)..(553): "n" may be a, t, c, g, other or unknown
ctttctttcttctttttttttttttttttanacggagtctcattctgttgctccggctggagtgcagtggtgtgatcttggctcactgcaacctccgccccccgggttcaagcgattctcctacttcagcctccccagctgagattacaagtgcacaccaccacaccttgctaatttttgtatttttagtagagatggagttttgccatgttggccaggctggtctggaactcctaacctcaagtgatctgcccgcctccgcctcccaaagtgctgggattacaggcatgagccactgtgcctggcccccaaatatatctttcttatgctctattgatgtcagaggttctaagatatcaccaaatcacctatttgaatatttaagctctaacttgatcatcctctgtccctttagttaagagttggggctgaaggcagcctgncttttctttcccactgggggatataggncattttcaaccttttcctgnttcaatacttggctactggggngacattcttttaaaatttcatggcatctntttnaaaaagncccta

SEQ ID NO: 10025 - DNA, 559 bp, Homo sapiens
  misc_feature (519)..(519): "n" may be a, t, c, g, other or unknown
  misc_feature (528)..(528): "n" may be a, t, c, g, other or unknown
  misc_feature (549)..(549): "n" may be a, t, c, g, other or unknown
  misc_feature (555)..(555): "n" may be a, t, c, g, other or unknown
aatacagacgaggtctccctctgttgcccaggctggtctccaactcctgcctccatcctctggcctcagcctcccaaagagttgggattacacaaaacaaaacaaagcaaaacaaaaccaggccacacagtgttgggttacaggcttgagccactgcgcctggccatgaatcctttatcacaccccaggggcctcaggtaccaatcacagggcccatgtgctccatcttgggaaagtaacattcatccatagccagtaaaaagcaggggtttggtgcggtgcctcaggcccatcacaggggatgctgaggggggcccagcgctctgcccacactgcctgccattgaacccccactctcagaagctacgatgtgagagaggtgtgtttagaattgaggaaagaagccacccttgtcaaagatccctccacaggcccaagagaaagtgaaaagaccatttttacgcccgctttgctgacttttttgatcttttataaaacaagccacacctttccctaagnagggaagtnctaagggaatttcaaacaagnttggtngggc

SEQ ID NO: 10026 - DNA, 550 bp, Homo sapiens
  misc_feature (468)..(468): "n" may be a, t, c, g, other or unknown
  misc_feature (476)..(476): "n" may be a, t, c, g, other or unknown
  misc_feature (492)..(492): "n" may be a, t, c, g, other or unknown
  misc_feature (501)..(501): "n" may be a, t, c, g, other or unknown
  misc_feature (536)..(537): "n" may be a, t, c, g, other or unknown
  misc_feature (545)..(545): "n" may be a, t, c, g, other or unknown
ccgaagagtggtgaggagggcaggacaatttctagaggcaggggaatctgaaagtttcatgccaggggaatggagctcagtttatcttcgaagcccttctccccatcccaggggggccccttacccacgcctgcattattgaacatgccgggaagcaccagcatgatgtggttgggccagtacttgcggtacagaggcatctcatactctttgaccaccaggaggtgaaggtggctgatgccctccatggcgtggaaaaggtttaggagtccgtgctcatgtcgaccactggaaggagtgaaaatagggctcttgactgcattcaaattcttgtctgaaaccaggggcagccgcatgctctccaggtgcttgccctgcttgctgaagacaaaatgactctctttggatttgggaatgatgaaatatagctgaacctcttctcccagcatagaagaagagaatgtgaangcatgaanggtggagtcagacatntggaagcanaagtgaaatccatgtactggcggacttgttacaannggtgaaanggggt

SEQ ID NO: 10027 - DNA, 545 bp, Homo sapiens
  misc_feature (285)..(285): "n" may be a, t, c, g, other or unknown
  misc_feature (413)..(413): "n" may be a, t, c, g, other or unknown
  misc_feature (424)..(424): "n" may be a, t, c, g, other or unknown
  misc_feature (459)..(459): "n" may be a, t, c, g, other or unknown
  misc_feature (469)..(469): "n" may be a, t, c, g, other or unknown
  misc_feature (473)..(473): "n" may be a, t, c, g, other or unknown
  misc_feature (505)..(505): "n" may be a, t, c, g, other or unknown
  misc_feature (522)..(522): "n" may be a, t, c, g, other or unknown
  misc_feature (524)..(524): "n" may be a, t, c, g, other or unknown
gagacggattctcgctctgttgccaggctggagtgcagtggcatgatcttggcggctcactgcaacctctgcctcctgggctcaagtgattctcctgcctcagcctcctgagtagctgggactacaggtgcacgccaccacacccagctaatttttgtatttgtagtaaagacggggtttcaccgtgttggccagcatggttttgatctcttgacctcgtgatctacccgccttgacctcccaaagtgacggaattacaggcgtgagccaccgcgcctggccganagtgtgattttaaaatacaaaccaaccagtctggggtctgtactgccaaccacctgccttattgggctcttgcactccaagccactatctttctgccctaatcaccccaaggccaggtgtcaggccgntaggcagcctntatgccccagagcccacaaaatgcttcatatctgnccatctgaanctgnttggctggccttgcccttttttcccatccaanccttattaaaagctttngnccaaagtccctcatgaatttt

SEQ ID NO: 10028 - DNA, 570 bp, Homo sapiens
  misc_feature (467)..(467): "n" may be a, t, c, g, other or unknown
  misc_feature (491)..(491): "n" may be a, t, c, g, other or unknown
  misc_feature (501)..(501): "n" may be a, t, c, g, other or unknown
  misc_feature (533)..(533): "n" may be a, t, c, g, other or unknown
  misc_feature (544)..(544): "n" may be a, t, c, g, other or unknown
  misc_feature (561)..(561): "n" may be a, t, c, g, other or unknown
ctttttttttttttttttttttacaggaaagccatttactcctggtgaattcctcagggtcccaggttcaacactttccgtgatgtcagagtactcagtcagggatgatggggacagggtgtcagaacagtcttgatggtcttgccagcaacagctttttcttattttccataatttggtcttagtcgttctccagttgtcttcatgtaaataaagtggcccatggcaatcatgattctgtaattgttatagtgcctttgtaagttgacagtttccaaatccccttactcatacgacccctgtgaaggggggtgtgaaggggttggtgggcttgtgcatatgagggaatgtgaacgatttcattatgaccgaattatgctttactcaataagcactcaaacactaccatctcacttgtagtagaagtgctagggatgcaaccaagaaactggttgaataatgggaangttaaatgcctgagtattttaatngaaaaaaatnttaaaaaccaacccaaactcgttgggaaagangcttttgctanggcctcctttttacaangggttggcc

SEQ ID NO: 10029 - DNA, 549 bp, Homo sapiens
  misc_feature (416)..(416): "n" may be a, t, c, g, other or unknown
  misc_feature (427)..(427): "n" may be a, t, c, g, other or unknown
  misc_feature (433)..(433): "n" may be a, t, c, g, other or unknown
  misc_feature (476)..(476): "n" may be a, t, c, g, other or unknown
  misc_feature (482)..(482): "n" may be a, t, c, g, other or unknown
  misc_feature (497)..(497): "n" may be a, t, c, g, other or unknown
  misc_feature (500)..(500): "n" may be a, t, c, g, other or unknown
  misc_feature (523)..(523): "n" may be a, t, c, g, other or unknown
  misc_feature (538)..(538): "n" may be a, t, c, g, other or unknown
  misc_feature (545)..(545): "n" may be a, t, c, g, other or unknown
ctttgggagacagagtttcgttcttgttgcccaggttggagtgcagtggcgcggtctcggctcactgcaacctccacctcctgggttcaagcaattctcctgcctcagtctccctagtagctgggattacaggtgcccaccaccacacccaggtgatttttgtatttttagtagagatggggtttcgccatgttggccaggctggtcttgaactcctgacctcaggtgatccacccacattggcctcccaaagtgctgggattacaggcgtgagccactgcacctggccaagtgtacattcttaagaacaacgtacatagattggggaaaagtatctcgttttcattctgagagctaatacaactgagagtgtacgaagaggtcaaacacagggactgctgggtggaacacactgncactccacctncccctncccctctgtgccacacacctgatgtggccccacccaacacagncacganccttctaccccccancanctgccaagggccctgagtttaanccaaaaaaggagcangggcatncttt

SEQ ID NO: 10030 - DNA, 553 bp, Homo sapiens
  misc_feature (469)..(469): "n" may be a, t, c, g, other or unknown
  misc_feature (528)..(528): "n" may be a, t, c, g, other or unknown
  misc_feature (537)..(537): "n" may be a, t, c, g, other or unknown
gagacatagtctcactgtgtcgcccaggctgcagtggcatgatctcagctcactgcaacctccgcctcctgggttgaagtgattctcatgcctcagcctcccaagtagctgcgatcacaggcacacgccaccacgcccagctaatttttgtatttttagtagagacggggcttcaccatgttggtcaggatggtctcgacctcttgactttgtgatccgcccacctcggcatcccaaagtgttgggattacaggcgtgagccaccacgcccggcctcaactcttaatatatgtcagcccctcctttgcaaccagctctgcgtgctgctgctgacaagcagcatggtgtggaggcatgggatgtcctagagtccagccaacctgagctctgtgatcttgggcaagttatttcccttctttgagtgtcaagttttcttcatctattaaatggggtcatcactttcacttgncctgaaaagtatccagataatacacagttagcacagtgcctggcccacagtaaaccttngaatggtgnagcttcatgaaaaaaa

SEQ ID NO: 10031 - DNA, 561 bp, Homo sapiens
  misc_feature (496)..(496): "n" may be a, t, c, g, other or unknown
  misc_feature (508)..(508): "n" may be a, t, c, g, other or unknown
  misc_feature (514)..(514): "n" may be a, t, c, g, other or unknown
  misc_feature (516)..(516): "n" may be a, t, c, g, other or unknown
  misc_feature (530)..(530): "n" may be a, t, c, g, other or unknown
  misc_feature (547)..(547): "n" may be a, t, c, g, other or unknown
attgcagttcactttattgcacgtcaagatattgcctttttttttttaaacaaattgaaggttcggggtaactccagagtcaagcaagtctattggcaacattttcccacgagcatgtgcccactttgtatctgtgtgtcacactttcgcaattcttgcaatatttcaaacttcttccttattatatctgttgtgaagctggttctcccagacgttccctgcaggctgtttatgcagcgcccatccgagatgaacccacaggacactcaggatcccagactgcaggagtcgtctgggatcacaggcggggcagagcaatttgtcaatgtctatgaggagtcctccttggcagcccagtctttatcctcactcacgtggaaatgagattcgacctctcctaatcacctggtgcccgaggagcaggtaggcgcctgtcccaagcctgagtttcctgggaaatctacatttcagcacagatgggttcccagcagcttantgctctggctgnccttangncactgaatcatttnacccctaggtttttggntggtggtttgaaaa

SEQ ID NO: 10032 - DNA, 563 bp, Homo sapiens
  misc_feature (528)..(528): "n" may be a, t, c, g, other or unknown
  misc_feature (552)..(552): "n" may be a, t, c, g, other or unknown
  misc_feature (563)..(563): "n" may be a, t, c, g, other or unknown
cattgtacaatgctaatgttactttatcttgaaaacaatcttgagaagtaggaattattgtcctctttcacaagacaggaaaaatgaggccaagggttagtgacttgctgagggtcacacagtgacagagtggtatcctggtccctgtccctgacttcttccctagggctcctcctcctgggcatctcactcagaggaagcagggccatcagtggtactggtgccagctcttggggagctattttcccccaggtgggttaagttctctcctagtatacaacaggatggtggctacaccgtcatgatagggagaacagctatcttaggaggctgcttgctagacagagatgggtgtgtgtgcgtgtctgtctgtctgtctgtctgtctgtcctgggtccagagccgtcaattcttcagcctcagtcttccctctattgccctctcctggacatagggaagaagtgcctctccctgctgcccccaggattactccctggctttttcacttttcccacattcatcctgaantggccctttggctgtcaccaaggnccggctgggcn

SEQ ID NO: 10033 - DNA, 561 bp, Homo sapiens
  misc_feature (485)..(485): "n" may be a, t, c, g, other or unknown
  misc_feature (517)..(517): "n" may be a, t, c, g, other or unknown
  misc_feature (519)..(519): "n" may be a, t, c, g, other or unknown
  misc_feature (521)..(521): "n" may be a, t, c, g, other or unknown
  misc_feature (535)..(535): "n" may be a, t, c, g, other or unknown
  misc_feature (554)..(554): "n" may be a, t, c, g, other or unknown
  misc_feature (556)..(556): "n" may be a, t, c, g, other or unknown
ggtggaagaaacagatacatcagactagtccagcgtctcagtttccacacttcataacaatggggcaccgtgcacctagtgtctaacttaccacgctgcctttgggccacaaattccatactgtaacagccaattacccaaaacactaaatagggaatggctcaaaaaaggctgtttctgaaaaagcagcagcattttgatgagcaaaaatagtaagagaggattttttaaacttagaaaaacgaggaaagttgaacccagctaagaatatttctgagacaccccccaccccttgtgatttttctcccgctaggattttcccttgactcgcctctttagagactgctaaacacacacacacatacacacactcattttttaatcccaccaactctcctcgccccaaggccagaggcttggcggtgacagcttcgaacaatgacatcaccctaggtttgcctccttggcagggtcaccaatactgnttgcagtcaatttcctgtaaaggctctttaangnangaaactaatcctgngccctgaggccttccctgngntgaac

SEQ ID NO: 10034 - DNA, 556 bp, Homo sapiens
  misc_feature (95)..(95): "n" may be a, t, c, g, other or unknown
  misc_feature (198)..(198): "n" may be a, t, c, g, other or unknown
  misc_feature (255)..(255): "n" may be a, t, c, g, other or unknown
  misc_feature (268)..(268): "n" may be a, t, c, g, other or unknown
  misc_feature (403)..(403): "n" may be a, t, c, g, other or unknown
  misc_feature (496)..(496): "n" may be a, t, c, g, other or unknown
  misc_feature (522)..(522): "n" may be a, t, c, g, other or unknown
  misc_feature (544)..(544): "n" may be a, t, c, g, other or unknown
  misc_feature (550)..(550): "n" may be a, t, c, g, other or unknown
  misc_feature (555)..(555): "n" may be a, t, c, g, other or unknown
cgaccaatatggtttatttctgccccagccaagcttctttggaccctggctgggggaaaggcaccccaggcaccggcaagttccagtcattgcanatcctccaggtctaggtgtgactggtagtagcctgggcactgttgctggacgttgtattctccttccttcttccgccggcgggtggtcaccaggacaccgcanatcaggcatgtgatgagtcccaggagtcctgccaagccgatgaagatgacagcccanaagggaaggtcanaattcccagttaagggctcatttctgttgggagaatacccatccacaaggacactgctcctgtccagggtgaagttctgcagctgggtaccattccgggtcatccgcagaaattcctcatagatggcaactctgnctactctccgagccagtggcgaaaagttcacagggagtccaccccggtgtggtgcctgttggggacagacctgaatgttgaacttgacagtcngaaaaatactttggagctgctgtttnggaaaaaattgtttaacccatnctcaantttcnt

SEQ ID NO: 10035 - DNA, 544 bp, Homo sapiens
  misc_feature (339)..(339): "n" may be a, t, c, g, other or unknown
  misc_feature (493)..(493): "n" may be a, t, c, g, other or unknown
  misc_feature (501)..(501): "n" may be a, t, c, g, other or unknown
  misc_feature (520)..(520): "n" may be a, t, c, g, other or unknown
  misc_feature (528)..(528): "n" may be a, t, c, g, other or unknown
  misc_feature (534)..(534): "n" may be a, t, c, g, other or unknown
  misc_feature (536)..(536): "n" may be a, t, c, g, other or unknown
  misc_feature (538)..(538): "n" may be a, t, c, g, other or unknown
aagtaagaagacttgtcagctgcctaggtgctctagaggcaatgcaagtgcttccacagagaagaggcagaagaaacagaggcgggaaaaggtgcagggtgcagtctaggagactgctcttatcatgcttcaaggggcccactccactgcagtgggttctcaggacaatttttttttttccttttttctatagctaaatctgcaggatagatcttcagtatcttaaaatggttactttaaatttttagaagatttaggcttaactgtaagtcccttaaactcttaaagtctatgtctttagctacaaaatgaagaattaaagtaggctatctctaaggnctcttgcactctctaattcaatgagaaaactctcattaatttcatcacgtatgatgagtagaaaataatcaatgaacataaatgcatacttatgcaagggcatcttattttaaatttgatatggataaataagactacttatggatttactggnatcaaggngctggaaggattgagaaanacaagctnccctgnanancccccg

SEQ ID NO: 10036 - DNA, 561 bp, Homo sapiens
  misc_feature (445)..(445): "n" may be a, t, c, g, other or unknown
  misc_feature (489)..(489): "n" may be a, t, c, g, other or unknown
  misc_feature (491)..(491): "n" may be a, t, c, g, other or unknown
  misc_feature (524)..(524): "n" may be a, t, c, g, other or unknown
  misc_feature (534)..(534): "n" may be a, t, c, g, other or unknown
  misc_feature (550)..(550): "n" may be a, t, c, g, other or unknown
cttgagacggagccttaccctgttgcccaggctggagtgcaatggcgcgatctcggctcactgcaacctccgcctcccgggttcaagcaattctcctgcctcgaactcccaaatagttgcgattacaggtgagcgccaccatgcccagctgatttttttgtatctttagtagagacggggtttcaccacgttggccaggctggtctcaaactcctgaccttgtgatccgcatgccccggcctcccaaagtgctgagattacaggcatgagccaccgtgctcggccaaaaatgaagcatttcttattagtagaagaaagaagaccagctaaacaggaagcataatgaactcctagctaagctcagaggaatttgtctgcaaaacccttacagaacaccacacaatcaaattatttgctccatagcaactttacccccaaagtgcanatctgtttggcttattggcttgagggctacctgccaggatctangnccatggtggcttggcctctgagctctggctttncatttccacnggtttctggtgggggnccctaaattgg

SEQ ID NO: 10037 - DNA, 553 bp, Homo sapiens
  misc_feature (465)..(465): "n" may be a, t, c, g, other or unknown
  misc_feature (486)..(486): "n" may be a, t, c, g, other or unknown
  misc_feature (501)..(501): "n" may be a, t, c, g, other or unknown
  misc_feature (518)..(518): "n" may be a, t, c, g, other or unknown
  misc_feature (520)..(520): "n" may be a, t, c, g, other or unknown
  misc_feature (536)..(536): "n" may be a, t, c, g, other or unknown
  misc_feature (549)..(549): "n" may be a, t, c, g, other or unknown
gaaaagtatataacagatttctttattattatttacaatcaagttctgttggccaacataatgaaataaataaaagatgtgccctggcctgtgaatttcaactctccttgacttaagttctctgaagggcaaattggaaagcggtgatcaggcagggaagagagggcaggtggaggccaggaccatcggtgggaaggccgcctgactcctctctcaccagctctaacactcacatccccaaatgtccagagaacaagcatggaagaaaaaaaataaagtgcaaatttaaaagtgataaaaagggtgtttcgcacacccaatgaactaaaactttatacgtaggtaaaatagtaaagataaatgtttttccttggccttcatcacaacccctgaaacggaaagatggcgctgctgtgcttctgagcctaggcttcttacctaaagcaccaagggcatcgcacacangcttggcaaaagggccatggncagaatcccaccttnagacaagtatgttggangnctcgaaacccttgganccccaacatgcangggg

SEQ ID NO: 10038 - DNA, 541 bp, Homo sapiens
  misc_feature (2)..(2): "n" may be a, t, c, g, other or unknown
  misc_feature (38)..(38): "n" may be a, t, c, g, other or unknown
  misc_feature (41)..(41): "n" may be a, t, c, g, other or unknown
  misc_feature (43)..(43): "n" may be a, t, c, g, other or unknown
  misc_feature (65)..(65): "n" may be a, t, c, g, other or unknown
  misc_feature (83)..(83): "n" may be a, t, c, g, other or unknown
  misc_feature (99)..(99): "n" may be a, t, c, g, other or unknown
  misc_feature (166)..(166): "n" may be a, t, c, g, other or unknown
  misc_feature (168)..(168): "n" may be a, t, c, g, other or unknown
  misc_feature (198)..(198): "n" may be a, t, c, g, other or unknown
  misc_feature (244)..(244): "n" may be a, t, c, g, other or unknown
  misc_feature (259)..(259): "n" may be a, t, c, g, other or unknown
  misc_feature (287)..(287): "n" may be a, t, c, g, other or unknown
  misc_feature (355)..(355): "n" may be a, t, c, g, other or unknown
  misc_feature (454)..(454): "n" may be a, t, c, g, other or unknown
  misc_feature (487)..(487): "n" may be a, t, c, g, other or unknown
  misc_feature (494)..(494): "n" may be a, t, c, g, other or unknown
  misc_feature (518)..(518): "n" may be a, t, c, g, other or unknown
  misc_feature (531)..(531): "n" may be a, t, c, g, other or unknown
anacggagtcttgctctgtctccaggctggagtgcagnggngngatcttggctcattgcaacctntgcctcccaggttcaagngattctcttgcctaanactcccgagtagctgggattacagttgcatgccaccacacctggctaattttttgtatttttagtananatggagtttcaccatgttggccaggatggnctcaatctcctgacctcatgatccacccacctcagcctcccaaagngctgggattacaggngtgagccaccacacccggctgtcagtgnttttatacccattttggggagggaaaaactgagcatcccgagatgaagtaacttactcagggccgtanaaatgtgaccaaaatcaatcttattgactcattctaaaagcaactcattgcctcttaaatgaagaagaaagacatccttcagctggctcttgggttcanaccccctgggctaagtcaccttggctacatggntcatcanaatgcccactctttggacctttanggggccacaagtntttattggag

SEQ ID NO: 10039 - DNA, 566 bp, Homo sapiens
  misc_feature (459)..(459): "n" may be a, t, c, g, other or unknown
  misc_feature (503)..(503): "n" may be a, t, c, g, other or unknown
  misc_feature (536)..(536): "n" may be a, t, c, g, other or unknown
  misc_feature (539)..(539): "n" may be a, t, c, g, other or unknown
  misc_feature (558)..(558): "n" may be a, t, c, g, other or unknown
gggttgtgcaaagaaagctttttatttgagaacacctagatacttttggaaatgttcttgttggatcacaaacaacctaactgacagtctatcgccaacatccacaaacacagcaaacagtccagtcctgcagaccacacagggtacatctagagggttctacttgcatcacccacacttccactcctgtgaaacaactgtcttgggcatgagaagggccaggataggccaggtgaatggcaggctgcccaacaaccccaatcccaaaccaacctcccaggccatgggcccaagtccctgcaggaagatgctaataggtacaacaggtagaacatgtagacacaaacatctagtttattttttctgactgtaaccaaagtcagcaaaagaaacaacaaaacttcagtgccctagaaatcctcctggattcaatgacaacacatcaatggccgggcacanggttggattccttttatgaaatcaccttataatctctcatcatnccaggacagtggcttttgggactgcatgaatcnttnatagctcccccccaaattnttatcctt

SEQ ID NO: 10040 - DNA, 561 bp, Homo sapiens
  misc_feature (480)..(480): "n" may be a, t, c, g, other or unknown
  misc_feature (507)..(507): "n" may be a, t, c, g, other or unknown
  misc_feature (512)..(512): "n" may be a, t, c, g, other or unknown
  misc_feature (524)..(524): "n" may be a, t, c, g, other or unknown
  misc_feature (534)..(534): "n" may be a, t, c, g, other or unknown
  misc_feature (549)..(549): "n" may be a, t, c, g, other or unknown
  misc_feature (552)..(552): "n" may be a, t, c, g, other or unknown
gggcagctttcatctgtgtttattttttttcatataaaagttacatgtttgaaatgtctgcaggaagatgccaccatcagacaggttagctggggcatatatattacaatgtaaccctgtggaggtcgtggggccggagcgggaagatgctcccagtgagggcctggggatttgcctgggcacactggggccaggcacagggtctgttctgaattcagggaaggtgaagagaccccacctctatccagctcaagcccaagaacaaggcagacagagctgtggacagcacccgaccacagacacggttctgcctgctgctggagtgagaggcctggtttctgaggctgcagcatggcactggcattgcctgtgctacagatggggactcctgcgagtctcacaaatacagggagaatttcagttcacacaacccaagggccctgtgtgcaaagcgggccttaaacgcgcacaggaacattnaacaaaacttggcaaggggaagggganaaaanatcaaggtttgnaatgaagggnctttaaaaagaaggnccnacttaaaac

SEQ ID NO: 10041 - DNA, 561 bp, Homo sapiens
  misc_feature (532)..(532): "n" may be a, t, c, g, other or unknown
gatacagagtctcactgtgccacccaggctggagtgcagtggcgtgatcttggctcactgcaagctccgcctcctgggttcacgccattctcctgcctcagtctcctgagtagctgggactacaggcgcccgccaccaagcctggctaattctttttgtatttttagtagagacggggtttcaccgtgctagccaggatggtctcgatctcctgacctcgtgatccgcccgccttggcctcccaaagtactgggattacaggtgtgagccactgtgcccggcccaatttgttttttaagccctgatgttttctcagttgggtttgaactcagtccctctacaaagtcattctaaactattcctagactgatagaccattcttggattggaccattcctggattgggcaatggcaacactcttccagaaaccattagaatgactctaaagagagcagaagcactttttctctctgcctcttcctaaaggctgaatatatcctattggccatgggctggtcaattccttttgangtgagggattgactccttctcaactcccc

SEQ ID NO: 10042 - DNA, 505 bp, Homo sapiens
  misc_feature (382)..(382): "n" may be a, t, c, g, other or unknown
  misc_feature (414)..(414): "n" may be a, t, c, g, other or unknown
  misc_feature (456)..(456): "n" may be a, t, c, g, other or unknown
  misc_feature (463)..(464): "n" may be a, t, c, g, other or unknown
  misc_feature (496)..(496): "n" may be a, t, c, g, other or unknown
  misc_feature (498)..(498): "n" may be a, t, c, g, other or unknown
  misc_feature (503)..(503): "n" may be a, t, c, g, other or unknown
agatttaaaagcatttaatgacatagcatatatttaacagatagggcaaaagttgagaggtacaggtcgtacgactgagcaccaggcctgagcgaccacctccctgttcaggcccagcctctggagttcattcctatcaatgtcattttgattgtgcagtaagatgaaaatttgtcattacaatagttacagtgacagagaaatgcacactatgtatcaaatagcaaggaaatgaagcaaattataacacagtgtggcaacgcacgagcaagtaaccattagagtaacattactttgtccagtaaatgcttcagttccaccacttgtacacttaccaatgatttaaagggtttattatacatctagttttattatactttgnactagaattatctcaaacgtacaatataatgnatttcagcaaaaaaaaaaaaaattggaattaccgattatttnaaacagnntcaggtttctattccttcttggatactggcantnttaancg

SEQ ID NO: 10043 - DNA, 539 bp, Homo sapiens
  misc_feature (448)..(448): "n" may be a, t, c, g, other or unknown
  misc_feature (451)..(451): "n" may be a, t, c, g, other or unknown
  misc_feature (457)..(457): "n" may be a, t, c, g, other or unknown
  misc_feature (463)..(463): "n" may be a, t, c, g, other or unknown
  misc_feature (511)..(511): "n" may be a, t, c, g, other or unknown
  misc_feature (516)..(516): "n" may be a, t, c, g, other or unknown
  misc_feature (527)..(527): "n" may be a, t, c, g, other or unknown
aatctgcaaaccaagaacctggaaaggaatacaaattccttcctggaaaacatgtatcccttcctgccctccctccacgccctgataaataacatgagcatgcagcgattgccaacagcagctccaggcatgaggcacaacatctgttactgagacactggagagacagtggaaagcaagttggctgcctgccaaccctcagactccagatttttgctgacaaggctgtcaataaatgggcagatggcatcagctctgctggcagaagagttcagttaacccagtgcgggacattatttcaaattcatggtgcaccaggctgagccctttgttgggccattaaagccattccttgatggagaagggagagcaggactaggaaatcaggaggcactagcttcatttaattagattaactaagcctttccagtggcagccagaatcagantancccttnggaacnttgaaagctatggattttttttttggttttggaagggccgggaaaaancctanttccacattgnattttatgccat

SEQ ID NO: 10044 - DNA, 539 bp, Homo sapiens
  misc_feature (502)..(502): "n" may be a, t, c, g, other or unknown
  misc_feature (516)..(516): "n" may be a, t, c, g, other or unknown
  misc_feature (537)..(537): "n" may be a, t, c, g, other or unknown
  misc_feature (539)..(539): "n" may be a, t, c, g, other or unknown
gagatggagtcttgctcttgttgcccaggctagattgcaatggcgcgatcttggctcactgaaatctctgcctcctgggttcaagcgattttcctgcctcagcctcccgagtagcagggattaaaggcacatgccaccatgcctggctaattttttatatttttagtagagaaaggtgttcaccatgctggccaggctggtctcgaactcccaaccttaggtgatctgcctgtctcagcctcccaaagtgctgtgattacaggcgcctcttttccttaataatccctaattcttggctaggttgttgggtaaaagttatttcctgataaacaaggcgttaccttatatatattatcaataaaattatatgtataaatacatggaaatgcacgcatagtattgcattattcaataagaagttttacagctgaatatccctcttaagaattccttgagggccaagactctatttcctttttttccttttcctttttttttgaanccgggttcccaggntggaatcacagggggggaacntn

SEQ ID NO: 10045 - DNA, 543 bp, Homo sapiens
  misc_feature (448)..(448): "n" may be a, t, c, g, other or unknown
  misc_feature (472)..(472): "n" may be a, t, c, g, other or unknown
  misc_feature (494)..(494): "n" may be a, t, c, g, other or unknown
  misc_feature (496)..(496): "n" may be a, t, c, g, other or unknown
  misc_feature (507)..(507): "n" may be a, t, c, g, other or unknown
  misc_feature (526)..(526): "n" may be a, t, c, g, other or unknown
  misc_feature (543)..(543): "n" may be a, t, c, g, other or unknown
gagacggagtctcactctgtcaaccaggctggaatgcagtggcacgatcttagctcattgcaacccccgcctccccggtttaagcaattctccctgccttagcctcccaagtagctgggataacaggcgcccgccaccatgcctggctaatttttgtatttttagtaaagacagggtttcaccatgttggccaggctggtctcaaactcctgaccttaggtgatccgccctccttggcctcgcaaagtgctgggattataggcgtgagccaccatacctggcttgctgctaccttttaaatgtacatagtaatcaaactgatccacagaatgtccctttcagggacatgataactgaccccctgaaccagccagaaagaggagagggacttgccttaagcaagtattgtgggaagatcaccaaattactagacatggatcactatccntctggatccggccccaaacaaacnttaaaattaccttaccaaacangngtagaacaatntgaaatggaattaaaaggngccccaaactggattgn

SEQ ID NO: 10046 - DNA, 510 bp, Homo sapiens
  misc_feature (205)..(205): "n" may be a, t, c, g, other or unknown
  misc_feature (232)..(232): "n" may be a, t, c, g, other or unknown
  misc_feature (259)..(259): "n" may be a, t, c, g, other or unknown
  misc_feature (329)..(329): "n" may be a, t, c, g, other or unknown
  misc_feature (354)..(354): "n" may be a, t, c, g, other or unknown
  misc_feature (417)..(417): "n" may be a, t, c, g, other or unknown
  misc_feature (443)..(443): "n" may be a, t, c, g, other or unknown
  misc_feature (470)..(470): "n" may be a, t, c, g, other or unknown
  misc_feature (480)..(480): "n" may be a, t, c, g, other or unknown
  misc_feature (501)..(501): "n" may be a, t, c, g, other or unknown
  misc_feature (506)..(506): "n" may be a, t, c, g, other or unknown
  misc_feature (510)..(510): "n" may be a, t, c, g, other or unknown
gctcttgttgcccaggctggagggcagcggcgcgatctcagctcgtgcaacctcagcatccctggctcaagtgactctcctgcctcagcctcccgagtagctggaattacaggcgcgcaccacaacacccagccaattttctgtatttttagtagagacggggtttcatgttggtcagggtggtctcaaactcctgacctcaggngatccacccaccttggcctcccaaagnggtgggaatacaggcatgagccactgngctcaggccccaagcccccattctttctgtaacctcaagatggcatataagcttctgcaccccattgcanagtggggagtaatcaatcactctgnggttctccctgtgtgcgcattaataaatttgcatgccatttctgctattcatctgccttttgncagttgacttttcagtgaacctttanagggcaaaggggaaagtttcccttggntttcataccntcaaacctttttcaccaggcngaaanaagn

SEQ ID NO: 10047 - DNA, 423 bp, Homo sapiens
  misc_feature (373)..(373): "n" may be a, t, c, g, other or unknown
  misc_feature (393)..(393): "n" may be a, t, c, g, other or unknown
  misc_feature (400)..(400): "n" may be a, t, c, g, other or unknown
  misc_feature (407)..(407): "n" may be a, t, c, g, other or unknown
  misc_feature (415)..(415): "n" may be a, t, c, g, other or unknown
  misc_feature (419)..(419): "n" may be a, t, c, g, other or unknown
  misc_feature (423)..(423): "n" may be a, t, c, g, other or unknown
gcttagaaaattcagctttaatggccccagcccttctgtctgagtctagtagtccagggcacagatgagggccacaccacgctttatccagtgtcgctggggctgatgggtggggatctccacagcaatgacatagttggtagagtgtcctgtggttgatagtgttccagcacgagtcagtgtcttgtagatggggcacaggtaaaagtcctggtcctgggccttgcggttgggtgttggcaagagccagataacggccatctctgtgtacagctccttgggctgagactcagccagctggaaggcctctggatcccagcgggcaccttccaggaataatccatggatatagcaccctacttggggtctttgngttaactctgatggtgcctnaaacatnaccttgnaatcaaangganatgn

SEQ ID NO: 10048 - DNA, 540 bp, Homo sapiens
  misc_feature (221)..(221): "n" may be a, t, c, g, other or unknown
  misc_feature (407)..(407): "n" may be a, t, c, g, other or unknown
  misc_feature (499)..(499): "n" may be a, t, c, g, other or unknown
  misc_feature (504)..(504): "n" may be a, t, c, g, other or unknown
  misc_feature (517)..(517): "n" may be a, t, c, g, other or unknown
gagacggagtcttgctctgtcacccgggctggagtgcagtggcgcgatcatggctcactgcaagctccgcctcctgggttcacaccattctccagcctcagcctcccaagctgctgggactacaggcgcccaccaccacgccaagcgaattttttgtatttttttagtagagacagggtttcactgtgttagccaggatggtctcaatctcccaaccttgngatccacccacctcggcctcccaaagtgctgggattacaggcgtgagccactgtgcctggactaaaacaatgctttctaaagcgcattctgcagcctgatgtgcctgtgaggtgagaggtgtgggagggacagaagctttgttcaaagaggtttgggagaggctggatacttagctcccttcttgnaagtttgccacacacattggcatattaaagggtctgagaaagcattcagggcactggtctggttaaggggcccccaataacttggccccatnacggntaattctgggaanttagttaataacctagggttcgg

SEQ ID NO: 10049 - DNA, 497 bp, Homo sapiens
  misc_feature (303)..(303): "n" may be a, t, c, g, other or unknown
  misc_feature (462)..(462): "n" may be a, t, c, g, other or unknown
  misc_feature (467)..(467): "n" may be a, t, c, g, other or unknown
  misc_feature (479)..(480): "n" may be a, t, c, g, other or unknown
  misc_feature (489)..(490): "n" may be a, t, c, g, other or unknown
  misc_feature (493)..(493): "n" may be a, t, c, g, other or unknown
aaagacagagttttgctctgttgcccaagctggggtgcagtggcacgatctcagctcactacaacctctgcctcctgggttcaagcgattctcctgcctcagcgtctcgagtagctgagattacaggtgtgcaccaccacgcccagcaaatttttgtatttttagtagagacaggttttcaccacattggccaggctggtcctgaactcctgacctcaagtgatccacctgtcttggcctcccaaagtgctgggattacatgcttgagccactgcacctggccccatatagagtttttattgncattattcccatattacagatgaagggactaaggctcaaagggtaaataagtctgttcttaaatagtgacttcctgagacacaggagatgtttaagaacagtactggtaggtgggaagtggcattttggagcaggagtgagaagccttgaaaatgtatnaaganttgaaaaagggnngggaaacannccnatta

SEQ ID NO: 10050 - DNA, 527 bp, Homo sapiens
  misc_feature (389)..(389): "n" may be a, t, c, g, other or unknown
  misc_feature (467)..(467): "n" may be a, t, c, g, other or unknown
  misc_feature (472)..(472): "n" may be a, t, c, g, other or unknown
  misc_feature (494)..(494): "n" may be a, t, c, g, other or unknown
  misc_feature (515)..(515): "n" may be a, t, c, g, other or unknown
  misc_feature (525)..(527): "n" may be a, t, c, g, other or unknown
aattggatgattttggacaagtctgtgcatttattcatatcttattccatgtcaggggactcagtacaaaggtgaaaaagacaaagttgctgttctcaaggagtatactttagacacataagctagcaataaacaaacaggatgattttagctcatgacagggctacacagacagtaacagtgatgagatagagtgatggggaagaggtgcttaaaatggggttgtcaggaaaggcctctgctaaccaccagatctcatgggctcatcttgagatttaacccagcaaacctcttctgagccagttggcaccactgatctccctcccctcctttaaactgttgccttccttgatttctgtgacaagatactggtgtcactatctccttgnctcctcctacttccagctccctctttcagccttctatgcaggcacatcttcttttgccacccattaaaatccctggtngccangacaaccattccttctggcggnttgaaagaaagctcaagtgcncacaaggccnnn

SEQ ID NO: 10051 - DNA, 564 bp, Homo sapiens
  misc_feature (402)..(402): "n" may be a, t, c, g, other or unknown
  misc_feature (445)..(445): "n" may be a, t, c, g, other or unknown
  misc_feature (487)..(487): "n" may be a, t, c, g, other or unknown
  misc_feature (505)..(505): "n" may be a, t, c, g, other or unknown
  misc_feature (546)..(546): "n" may be a, t, c, g, other or unknown
  misc_feature (554)..(555): "n" may be a, t, c, g, other or unknown
  misc_feature (564)..(564): "n" may be a, t, c, g, other or unknown
aaagacacgtgtctccctctgttgtccaggctagagtgcagtggcatgatcatagctcactgtagcctcgaactcctgggctcgagccatcctccaacctcagcctcacagatccctacaactacaggcccatgccattgtgccctgttgcattctttttacttttttgtagatactgggtctcactgtgttgcttaggctggtctcaaactccggggctcaagcaatcctcccacctcggcctctcaaagtgttcggattagaagcatggaccactgcacccggccttctgagctctttttcaactaggtctcaacttttggacttctgtgttcatctctgccttgttcaattttagcaagtatcgtgctaaagttgggtttagctagaatcctcatcctncacatctgatcactctcaaaatctaatcgggcttcttatcctntggcatccttcatgaatggctaattaccctgggctggccctnaacaagaaatcctggtanggactatttaacccgaattccccacaaatgcctggaggaancctcttanncattgggcn

SEQ ID NO: 10052 - DNA, 555 bp, Homo sapiens
  misc_feature (431)..(431): "n" may be a, t, c, g, other or unknown
  misc_feature (465)..(465): "n" may be a, t, c, g, other or unknown
  misc_feature (484)..(484): "n" may be a, t, c, g, other or unknown
  misc_feature (505)..(505): "n" may be a, t, c, g, other or unknown
  misc_feature (511)..(511): "n" may be a, t, c, g, other or unknown
  misc_feature (537)..(537): "n" may be a, t, c, g, other or unknown
acaatgctaatgttattttatcttgaaaacaatcttgagaagtaggaattattgtcctctttcacaagacaggaaaaatgaggccaagggttagtgacttgctgagggtcacacagtgacagagtggtatcctggtccctgtccctgacttcttccctagggctcctcctcctgggcatctcactcagaggaagcagggccatcagtggtactggtgccagctcttggggagctattttcccccaggtgggttaagttctctcctagtatacaacaggatggtggctacaccgtcatgatagggagaacagctatcttaggaggctgcttgctagacagagatgggtgtgtgtgccgtgtctgtctgtctgtctgtctgtctgtctgtctgtctgtcctgggtccagagcccgtcaattcttcaacctcgncttcctctattggccttttctggacatagggaanaagtgcttcttcctggtgnccccaagaatactcctggctntttcanttttcccaaatccatcctgaaatggncctttggcttgccccaag

SEQ ID NO: 10053 - DNA, 529 bp, Homo sapiens
  misc_feature (477)..(477): "n" may be a, t, c, g, other or unknown
  misc_feature (492)..(492): "n" may be a, t, c, g, other or unknown
  misc_feature (495)..(495): "n" may be a, t, c, g, other or unknown
  misc_feature (503)..(503): "n" may be a, t, c, g, other or unknown
  misc_feature (507)..(507): "n" may be a, t, c, g, other or unknown
  misc_feature (509)..(509): "n" may be a, t, c, g, other or unknown
  misc_feature (523)..(523): "n" may be a, t, c, g, other or unknown
aaagggcacacatacacttttaccgtttacaccaaaccagaatcaaaacccaaatcagagtatccagaaatccaagccaggtcaaaaccaaaacgaaagtatcaagcaatccaaatcaagtcaaaaacaaaaaccaaagtgccggtacaggcatgccgtgggtgatcaggccacccttccactcaaatggagtgggcaagttccaaagactagtcttaccaagtttcagatgtccggactccaagtgcctgttccttcccagtgttcagccgctgcattgatcctctgtggtggcctgccacacgccactctggcgaggtgttccactggggcaattgcctacccgggagtgctctcaggttctgcgtccctcaagctggccagagtcccctgtagggatgctccacagggcaggcctatgctgcctaaggggcttgcttcgactatctggtaatcacctggctttccaatcagggnaccccagaaatgtancanggacaagnccgnangggttggatttcancctgga

SEQ ID NO: 10054 - DNA, 496 bp, Homo sapiens
  misc_feature (426)..(426): "n" may be a, t, c, g, other or unknown
  misc_feature (462)..(462): "n" may be a, t, c, g, other or unknown
  misc_feature (468)..(468): "n" may be a, t, c, g, other or unknown
  misc_feature (470)..(470): "n" may be a, t, c, g, other or unknown
  misc_feature (485)..(485): "n" may be a, t, c, g, other or unknown
  misc_feature (488)..(488): "n" may be a, t, c, g, other or unknown
  misc_feature (494)..(494): "n" may be a, t, c, g, other or unknown
gagacagagtctcagtcacccaggctggagtgcagtgtcccagtcttgactctctgcaacctctgcctcctgggttgaagtggttttcctgccttagcctcctgagtagtggggattacaggtgtccaccaccacgcccagctaatttttatatttttagtagagacggggttttgccatgttggccaggctggtctcaaactcctgacctcaggtgatccgcccgctgcagcctcccaaagtgctgggattacaggcgtgagccaccgcgcctggctaaagcagtggtttttataaggtatctgctccagtttctaccttcggtagtgacaatgtgtttgtttgcatttcccacacgtgtgtccaatgtttgcttgttttcttcttcaggaaatcaactttttgtgagtgtgctgaaggcaacangctttgccagtacacagaacttcgtgaaaaccactngaaacngncacttgctcatctgnccnttctgngg

SEQ ID NO: 10055 - DNA, 462 bp, Homo sapiens
  misc_feature (394)..(394): "n" may be a, t, c, g, other or unknown
  misc_feature (408)..(408): "n" may be a, t, c, g, other or unknown
  misc_feature (438)..(438): "n" may be a, t, c, g, other or unknown
  misc_feature (448)..(448): "n" may be a, t, c, g, other or unknown
  misc_feature (451)..(451): "n" may be a, t, c, g, other or unknown
  misc_feature (461)..(462): "n" may be a, t, c, g, other or unknown
gagatggagttttgctcttattgcccaggctggagtgcaatggcacgatctcggctcatcaaaatctccagctcccgggttccagcgattctcctgcctcagcctcccaagtagctgggattataggcttgcgccaccacacccagctaattttgtatttttagtagagatggggtttctccgtgttggtcaggccggtctcgaactcccaaactcaggtgatcagcccaccttggcctcccaaagtgctgggattacaggcctgagcaactgcgcccgggctttttttttttttttaaaagatagtcttgctctctcgcacaggctgattgcatggtggcgtgatctcagctcactgcaacctccgcctcctgggttcaagcaattcttgggnatttttagtaaaanatggggctttccatattggcccaggctggnctaaactccnggncttaaaccann

SEQ ID NO: 10056 - DNA, 417 bp, Homo sapiens
  misc_feature (411)..(417): "n" may be a, t, c, g, other or unknown
gcaaagacaaacattttatttttcatgataggagctgtagcagagtatatgggggcctctgccagcccccaggctgggactggggcctgtgaccttgagaacctcatctcacattctgcagactttggcggcggggcagtgctcgaccactggctgggtgggctgatctcagcctctcctgcaggcccagggctgaaatcataaccgtcaggcccagccttggccaaagataatgcaactttggcagggctggctgctgggagggggcaggcacttgctcctcgtagagcaagagtgggtttcttccctgaccctcccttccaccccggtagggtggtttccttaggaactcaggcctgcgggagaaatggttccagcttctggaggctgggtgggggtggggttgggggnnnnnnn

SEQ ID NO: 10057 - DNA, 437 bp, Homo sapiens
  misc_feature (405)..(406): "n" may be a, t, c, g, other or unknown
  misc_feature (422)..(422): "n" may be a, t, c, g, other or unknown
  misc_feature (426)..(426): "n" may be a, t, c, g, other or unknown
  misc_feature (432)..(433): "n" may be a, t, c, g, other or unknown
  misc_feature (437)..(437): "n" may be a, t, c, g, other or unknown
gaccagaaagagactttttctaatacagcagtgttttggctgggacaggttggccggactctccaggaacgtggtgaagagcgtgggggaggcggctgaggcagggcagagcccaggctgcagagctgtgtgcttcacaagttggctctgtggtcgggaaggctccacggccataaggaccctggcctttgatttcctgggaggaacagcacttggaacggagtaagaatttcaggcaatcacctggtttccccaatggctttcttgtctcacggacagtttaacaaagctggcagagtcctgtaactaggatctgtaactttgggggtaagggcaagtaggaacagacatccaaaacaactgagtgctgggataaaggcttgaccggaaagatttcaggggccnnggctttgtttgcattntggnaaactnntcan

SEQ ID NO: 10058 - DNA, 550 bp, Homo sapiens
  misc_feature (455)..(455): "n" may be a, t, c, g, other or unknown
  misc_feature (476)..(476): "n" may be a, t, c, g, other or unknown
  misc_feature (491)..(491): "n" may be a, t, c, g, other or unknown
  misc_feature (514)..(514): "n" may be a, t, c, g, other or unknown
  misc_feature (539)..(539): "n" may be a, t, c, g, other or unknown
ctagagtttgtctattttattagtctttttaaagaaccatgtatgtcaggtttccttcaggaaatagatggtgtattcaaactggataatctaataaagttatatttataaaagtatagaaagagtatagtgaaaccacaagtaatagcagaatcccctgggactgggacaagaggatggagcagtcaccagaacctggagacagagagggctgcctggcttcagataatgtcagcatctgtgctgtatgagttccagtgtggcagccctctcctaaattaccccaattccctctggatctgggatctgctccctcctcttgcccctgaggtctgggggtgggaaaggctccccactcttgctagttccagggtgcttcactggcctttatgagtttcccttcaccctgttcacaccttggtgaatattctcttcctgacatgctcctcagttcnccacttgaatgggccatctgnttcttggcgggaccntgactgcactggttcattccaanctggtgagctgggctttaaattggncctgggtaacc

SEQ ID NO: 10059 - DNA, 552 bp, Homo sapiens
  misc_feature (498)..(498): "n" may be a, t, c, g, other or unknown
  misc_feature (533)..(533): "n" may be a, t, c, g, other or unknown
  misc_feature (537)..(537): "n" may be a, t, c, g, other or unknown
  misc_feature (541)..(541): "n" may be a, t, c, g, other or unknown
gagatggagtcttgctctgttgcccaacctggagtgcagtgttatgattttggctcactgcaacctctaccatgttcaagcgattctcccacctctgcctcccgtgtagctgggatcacaggcacacgccaccacacctagctactttttgtatttttagtagaaatggggtttcaccatgttggccaggatggtcccgaactcctgacctcaagtgatcctcctgcctcggccttccaaagtgctgggattacaggtgtgagccactgtgcctggccaaaaatgtgatttcttatttcccacattgccaattccatttcaattaactataatagctatgtctattgagcactcaagcgtattctagaaactgttcctgattctggggatatatccatgaatgaactatagtccctgttattaagtaatccgtagtctgactaaaccattagaaattaaaaaaaaaatggctactttcaaagacatcttggagttcangagtcccacactgggaaccattttacctaataatncaanctgnttggaattaac

SEQ ID NO: 10060 - DNA, 558 bp, Homo sapiens
  misc_feature (174)..(174): "n" may be a, t, c, g, other or unknown
  misc_feature (290)..(290): "n" may be a, t, c, g, other or unknown
  misc_feature (345)..(345): "n" may be a, t, c, g, other or unknown
  misc_feature (435)..(435): "n" may be a, t, c, g, other or unknown
  misc_feature (449)..(449): "n" may be a, t, c, g, other or unknown
  misc_feature (486)..(486): "n" may be a, t, c, g, other or unknown
  misc_feature (529)..(529): "n" may be a, t, c, g, other or unknown
  misc_feature (541)..(541): "n" may be a, t, c, g, other or unknown
  misc_feature (554)..(554): "n" may be a, t, c, g, other or unknown
  misc_feature (558)..(558): "n" may be a, t, c, g, other or unknown
catagggtctcgctctgtcactcaggctggagtgcagtggtgtgatcatggctcactgcgtcactgtagcctcaccctcctgggctcaagtgatcctcctgtctcagccctcccaagtagctgggccacaggtgtgtgccaccatgcccagttttttttttttttttcgtaaanatgggggtctcactacgttaactgggctggtctcaaactcctgagctcaagcaatccttccaacttggcctcccaaagcgctaggcttacaggaatgagccaccgtgcctggccanaatcggttacatatatgtgacatatgtgtaatacatgtgtgcctgtccccaggtntcagggcagagagaacacactttctcctactattttaccacacccttcttgctgggaggctattaaacctgaaggtctggtactatgtantggtgaagggtganatatggattcaaaccacactggggtttaagtccctgntttggcaattaattttaatgggacccctgggcaaggggaaccnccctttttgggncctgggttccctngttn

SEQ ID NO: 10061 - DNA, 558 bp, Homo sapiens
  misc_feature (485)..(485): "n" may be a, t, c, g, other or unknown
  misc_feature (528)..(528): "n" may be a, t, c, g, other or unknown
  misc_feature (533)..(533): "n" may be a, t, c, g, other or unknown
  misc_feature (558)..(558): "n" may be a, t, c, g, other or unknown
ctgctcggtgccattttatttaatgcaaacactagacagtttacaagtcacacctggacacaagcacgtgaacagatgtacagggaattctggaattttgagatcagtccccatttcttcctcagggccctgggactgaacacggtctcacagacagcacatattctacgtcacagctctagggtttcaaggacttagccatccgacaggcctcaccataaaggtaaagtggacaacccctgaggtcacgctgtccaggtggcgacaggccacgcatgccaaaatcctccatagccacctccggcccagcaccagccagagggtggggccatcggttctcgacatacttggtataagggagggacaagcctgacaaagttcacaatctggccaatgagtgtgggaggccctggaaacaggccaatcctgcaagccaccccacccttactaacttcctgaacatgggaagctttttgagaccaggnccaaggttcttttcctttattgggaccacgcaaaaggcatttntgcantgcttgaaggtccccctttaaaccn

SEQ ID NO: 10062 - DNA, 540 bp, Homo sapiens
  misc_feature (451)..(451): "n" may be a, t, c, g, other or unknown
  misc_feature (457)..(457): "n" may be a, t, c, g, other or unknown
  misc_feature (459)..(459): "n" may be a, t, c, g, other or unknown
  misc_feature (462)..(462): "n" may be a, t, c, g, other or unknown
  misc_feature (514)..(514): "n" may be a, t, c, g, other or unknown
  misc_feature (526)..(526): "n" may be a, t, c, g, other or unknown
  misc_feature (530)..(530): "n" may be a, t, c, g, other or unknown
aaagggaaaaaaaatttattaggtccaggaatcaaagatgacttgatagaattatgaatacatgcagaattggatggttagaaatgaaatcaatctatttaggtccagcctaaggttctgatagccaatcagtagacacaatcagagtagtagtattcctaagaaaccaggataaatctccaatgtgcatgagtttaatgaaccagatagattattgtatcgccaatatccacccttatcccattctcagtcagatgaattttcttgctcatgaggtccacattgaaaacagcatgctcagaaatgggggtcttctcggtgtactcctttcccaggacaggaactcgtcgaggccccaacagtggatcatcaaatctcatcagtttcactttggaaaggtctttaattcctcgattcattttcattaaacgcctgattatggaatcacagntatctncntgnctggatttcaattttggttgaaaagtggccttggatggctgggggattcccncgaaaaaccggncccnccaaggttct

SEQ ID NO: 10063 - DNA, 550 bp, Homo sapiens
  misc_feature (73)..(73): "n" may be a, t, c, g, other or unknown
  misc_feature (124)..(124): "n" may be a, t, c, g, other or unknown
  misc_feature (158)..(158): "n" may be a, t, c, g, other or unknown
  misc_feature (440)..(440): "n" may be a, t, c, g, other or unknown
  misc_feature (476)..(476): "n" may be a, t, c, g, other or unknown
  misc_feature (491)..(491): "n" may be a, t, c, g, other or unknown
  misc_feature (501)..(501): "n" may be a, t, c, g, other or unknown
  misc_feature (521)..(521): "n" may be a, t, c, g, other or unknown
  misc_feature (532)..(532): "n" may be a, t, c, g, other or unknown
  misc_feature (534)..(534): "n" may be a, t, c, g, other or unknown
  misc_feature (542)..(542): "n" may be a, t, c, g, other or unknown
ccaagtcccttattttactgatgagaaaacagccagagagtgaaagctgatgattacaaatcacagccatganagctgggctctgcactcagccctgctgggctgggtggccgctgctcacggngacccttcaaggcaggcctcattctgtccagtanaggtgtggttactaagtcatagagctacagaggtgagggaccaggtgccctcactttggttccaagacccatctgcaccccacaaatgccaccagccacacctagaacaaaatggttttaatcaattgcgtcaccctcactctcctgggagcggagcaacaaaaaggctcggctcctgcccccagaggacagtaaggcttatgtgtctctccacactgcagggcccaggctgggcaggcagggggtgggaagcaggacagggggcagggaaggaaggttggnaggcagggaaggaaatggcaggtggctggaacccangaaagccaagggganccaacttggnccttgggccccagggcccanccccaatactncngttttccnttttcctg

SEQ ID NO: 10064 - DNA, 548 bp, Homo sapiens
  misc_feature (481)..(481): "n" may be a, t, c, g, other or unknown
  misc_feature (501)..(501): "n" may be a, t, c, g, other or unknown
  misc_feature (505)..(505): "n" may be a, t, c, g, other or unknown
  misc_feature (508)..(508): "n" may be a, t, c, g, other or unknown
  misc_feature (537)..(537): "n" may be a, t, c, g, other or unknown
  misc_feature (545)..(545): "n" may be a, t, c, g, other or unknown
aatggtgatttttctttatttccccgcaccttcaatctcatggcatggtctgcaggaaacctcagagtcctgccaactcgcaggcttcgctgatcgcatggcacctgggcaccccgccaaagagctgaaactcccaaggctcagccaggactctccagctgtggtgtttctaaaagccgttctgggtgagatgtagagccgagttttcccagtcgctcagtcctcctcccgtgaggacaacactgcttgctctcctggcttgcctcacccatccaggaaaaggtggggaggggctctaggcagcggcctctcctggttgaaagaaactgagacctgggccttccgtccagtttaacctggagcaggcctggcccctgggcaggctcagagcaggtcccccattcagcaaatgagggtatcctcctattttgccaacatccatcttcaccgacttggcctgaacccattcttgagtacaganggacacccatgacagaaatnccangtnacttttgctggaagccactgggctggaanaggacttnttt

SEQ ID NO: 10065 - DNA, 550 bp, Homo sapiens
  misc_feature (485)..(485): "n" may be a, t, c, g, other or unknown
  misc_feature (490)..(490): "n" may be a, t, c, g, other or unknown
  misc_feature (495)..(495): "n" may be a, t, c, g, other or unknown
agacagagtctcactctgttgcccaggctggagtgcagtggtgcgatctcggctcactgcaacttctgcctcccaggctcaagtgattctcctgcctcagcctcccgagtagctgggactacgggagcatgccaccatgcccagctaatttttgtattttttgtagagacggggtttcaccatgttggccaggctggtctcgaactcttgacctcacatgatccacttgccttggcctcccaaactgctgggattacaggcgtgagccactgcacctggccccccctctgccctctcttgagaggcaaggcattttctatacaggggtgaggaaaagttaaactttctatacagtaagttagcaatgcccaaatcccaactgagaaacgatgtaaattttagtgatagggctgtaaccactaggtaatggcaaggacataaatcccaatattcacaagtccttgtggggaagggtgtgatattgnatctncctgncactttatgttcatatatggaaacattatggaaatgacctattaccatcttttta

SEQ ID NO: 10066 - DNA, 549 bp, Homo sapiens
  misc_feature (491)..(491): "n" may be a, t, c, g, other or unknown
  misc_feature (497)..(497): "n" may be a, t, c, g, other or unknown
  misc_feature (504)..(504): "n" may be a, t, c, g, other or unknown
gccccttttacaggggagacgtaaagctgtcccagttatcaaaaaattcaaatctccttttcttctgtggactggctgtcaatgagctttcatccagggtgtctcccatgttctgggaactacttccagatgttcctgaagcacttcctgggtcaaaggactctgctgcttccaggagctccatatcacttccttctttctcaaaggacttctggaataggtcgtagatcttctgcggctttgggtccttgtagaggtaatcagtggattctgtcatttctgaaaaattggtctcagaaagcccggcttctgccagaactttaatcttctcttgaatcaggggccaaaggtagtcatcagctgtgccctttgccacgaggtagtgaatgcccacggagctggtctgtccaatgcggtgcacgcggtcctcagcctggatcagcacccctgggttccaaaacagctcagcaaacaccaccaggtcaacccangaaaangtgaagnccatattggcagcggtgatggacagcacgggcacagcatgctttt

SEQ ID NO: 10067 - DNA, 553 bp, Homo sapiens
  misc_feature (479)..(479): "n" may be a, t, c, g, other or unknown
ctttgagatggagtttcactgttgttgcccaggctggagtgcaatgccgcaatctcggctcactgcaacctctgccttctgagttcaagcgattctcctgcctcagcctcccaagtagctgggattacaggcatatgccaccatgcctagctaattttgtatttttggtagagacggggtttctccatgttggtcaggctggtcccgaactcctgacctcaggtgatccacctgcctcggcctcccaaagtgctgtgattacaggcgcgagccaccacgcccagcctcaatttaaccttctttcttccctgacaccgcacatcctgacttctcccctttatcctaatccaggactactccccactccttcctagttacctcccctaccctggggtcctagttggcaaggatctgccaagtggtctggttcttgaagaaggtggtgccaacacttttaaaaagaacctaatggaaaacangcttgggggtgggaagggaaagggttgattaataatcaagtttcctccaaatagccggaatggaaagggcttgg

SEQ ID NO: 10068 - DNA, 553 bp, Homo sapiens
  misc_feature (450)..(450): "n" may be a, t, c, g, other or unknown
  misc_feature (508)..(508): "n" may be a, t, c, g, other or unknown
  misc_feature (510)..(510): "n" may be a, t, c, g, other or unknown
  misc_feature (512)..(512): "n" may be a, t, c, g, other or unknown
  misc_feature (529)..(530): "n" may be a, t, c, g, other or unknown
  misc_feature (537)..(537): "n" may be a, t, c, g, other or unknown
  misc_feature (553)..(553): "n" may be a, t, c, g, other or unknown
atgtttcacaatttgtatggctgattctacgcacatttaaatgtgtttatgacaattgtacatttcagttttcctctggttaaaccaatgtggaagtacacaggatgggagctgagagacaagcatcctgggcccagccatgctggcctcagtgggccaagctggggacagatgacctctgctccgtggatcctgctggctcagggtggggaaggggcctcagaagaggagtcaggctctcctctttattctcctcacagccatggtgaatggcattcctgggaggctggtttggagaactcgctgaacctaagtgagcaggaagtgaaggtctgttcccacctgtgcctgtgttcccagatagcagctgcctccaggagactcaccaggagccaggtccctccatacctgatctcaattaactcactcaccaaggagcccaggtccctnccatacctgacctcaattaaacttaacttacccaggagccaaggtccctccattaccntnanttaccaacaatcaagtnnccttcanaccttatcttaattan

SEQ ID NO: 10069 - DNA, 553 bp, Homo sapiens
  misc_feature (535)..(535): "n" may be a, t, c, g, other or unknown
caagtttagggatgtgctctatatttgcatttttctttttaaaaggcacagtttttattttaacgacgctgcattgctctttgatgatgaatctcaattcgactcctcaaactgtcaacactcttgttatcctagattctagaaggggcctcatcttttgacttctttctatagagggccacatctaaagctacagcactcatttggaaaaggacactgggatcaacacgtaagcgttgcaagcacaggggccgcctctcttgcagacaggtggccaaagcagggcttgtgctgggccagaagtggaagtaattcctcgccagctacacattcagtctgactggtggatgattgggagtgtttgtccctccctcccccaataattgatggccttgagatctgccagcatctcaaaggcagattcgtggctctgttcccagacttaggtctcagttatttaattggtaaatgacacaatcaaagagactcaacacttaattgggaatgctgattcaagtatttcctgggctaactngtggaagccataaattgg

SEQ ID NO: 10070 - DNA, 504 bp, Homo sapiens
  misc_feature (389)..(389): "n" may be a, t, c, g, other or unknown
  misc_feature (468)..(468): "n" may be a, t, c, g, other or unknown
  misc_feature (483)..(484): "n" may be a, t, c, g, other or unknown
  misc_feature (491)..(491): "n" may be a, t, c, g, other or unknown
  misc_feature (495)..(495): "n" may be a, t, c, g, other or unknown
  misc_feature (497)..(498): "n" may be a, t, c, g, other or unknown
gaatggaagatattgcaacactgggcccacagattttagcaatagcaacatttgcagggagctggttagcagttgccctcatctgatagcacatgcattttctagctccctcaagttctctctgctcactttggtacctgcctggcttttatagacatcagagtttgaaatctttttgtttgtttgtttgtttgagacagggtctcactctgttgcataggctggagtgtagcggcctgatcacggttcactgcagcctctacctcccaggctcccgagatcctcccacctcagcctcccacctagctgggaccacagccatccaccaccatacccagctaactttttgtattttttgtaaagaccatgtttcgtcatgttgctcaagntggtctcgaactcctgagctcaagcgatctgcccacctgggcctcccaaagtgctgggattacaggcgtgacccactgngcatgacctgaaatnnttatttnattngnnaacttt

SEQ ID NO: 10071 - DNA, 569 bp, Homo sapiens
  misc_feature (338)..(338): "n" may be a, t, c, g, other or unknown
  misc_feature (409)..(409): "n" may be a, t, c, g, other or unknown
  misc_feature (491)..(491): "n" may be a, t, c, g, other or unknown
  misc_feature (503)..(503): "n" may be a, t, c, g, other or unknown
  misc_feature (544)..(544): "n" may be a, t, c, g, other or unknown
  misc_feature (559)..(559): "n" may be a, t, c, g, other or unknown
  misc_feature (566)..(566): "n" may be a, t, c, g, other or unknown
gttgctttcccagacttttatttgaaatgtgactgctttgtaaaactccagagtcaaggactcataggcaggaggatgtcataaattaacaggaaaggatgagaaatctccactccactccctcctccctcccttgatcactcattccctctcttacattcattaaccacccactacatgccatgccctaaggaagcagctatctaagaagtccctgcctgcaggggctttacagaccaggaggaaggcaacccatagagccaggatcctgataaccactgctgactgcccctctgcctaggcaccagctaaggtggctccaaaaagtgaggccttgntgggaaggggaaaaacagcaaaggtcagcttggatgaacccatccagaattttgcaatcagaaatacctanaaaagaattattttagaagaacagggggatgccagggcttggggatgaggaatgatgttttcagtgcttaaggcccctgaangtcttggtcttnctgctcaaaaacgcaaggggggtcccaggttgccttttcanagcttgcctttaatnctggcanttc

SEQ ID NO: 10072 - DNA, 570 bp, Homo sapiens
  misc_feature (502)..(502): "n" may be a, t, c, g, other or unknown
  misc_feature (533)..(533): "n" may be a, t, c, g, other or unknown
  misc_feature (542)..(542): "n" may be a, t, c, g, other or unknown
  misc_feature (561)..(561): "n" may be a, t, c, g, other or unknown
  misc_feature (570)..(570): "n" may be a, t, c, g, other or unknown
cactgcttttcctttattgataggtcagagagcatttcctggcacccccagggtacagccccctgactcctgctacccaagaaggccaccctttcctgcctgtgatactccgtggcatctgttctgccagaggactgaccctttgtgctccacatatgttttgccaggaaacacttatctcagccacaaaccgtccctgtcctccaaaagactcagagctgcttacaaggggctgctttggtcagtcagctgttagtcctggggctcttgcctcctctgtgggggtagcatcagtcaccctaaagttctcaggccgccgctagctagtgagttacaagattttagaaaccagctcttgtccacagatcctcaggcccctggttcttggatccagaggcgtctgaggtatgttcacaggcacctgctgctgctgctgctgcctctgctcttgccctcagtccccgtctttccacctgggtccccttgcactttcatgcctgangctgactggtggccaagtctaaactgagggncttccgganaccgagaacccgccgaacngccttggan

SEQ ID NO: 10073 - DNA, 564 bp, Homo sapiens
  misc_feature (527)..(527): "n" may be a, t, c, g, other or unknown
  misc_feature (543)..(543): "n" may be a, t, c, g, other or unknown
  misc_feature (554)..(554): "n" may be a, t, c, g, other or unknown
cttctgagacagagtcactgtcgccccggctagagtgcagtggcgtgatctcagctcactgcaacctccacctcccgggttcaagtgattctcctgcttcagcctcccaagtagctgggattacaggtgcccaccaccacacccagctaatttttgtatttttagtagagacggggtttcaccatgttggccaggctagtctcgaactcctgacctcaggtgatccacccgccttaacctcccaaagtgctgggattataggcgtgagccactgcacccagctggaaaatacttcttaaatgcaatttataagcatgtgtattagtttcctattgctggtataacaaattactacaaacttagtggcttaaaacaacacagatgtgttgtcttacagttctagaggttagttctaaataggtctcactgagctaaatccacggtgtcagcagagctgtgttctttcctagagcttctaggggagaatctggtttcctggctttttccagcatctagcactggcacanttctttggcttgggancttggtccatnttaaattcat

SEQ ID NO: 10074 - DNA, 574 bp, Homo sapiens
  misc_feature (494)..(494): "n" may be a, t, c, g, other or unknown
  misc_feature (499)..(499): "n" may be a, t, c, g, other or unknown
  misc_feature (574)..(574): "n" may be a, t, c, g, other or unknown
aacaagtaaatcattggctttattctgggtcctggaagctccactgtgagtctgaaaaaaagacagaacaggggcggcagccctggggggtggtgcagaaaatagtccctggctcctctggccctgggagcctaaagggcagtgaggagaaggcttagcaagaggcctggagcaggggaagtcaggtccctcaggaacccctcctcccccagaggaaggaggaagagggctggagagtctgctggagagtctgctcagttcctcagcaactgcactgcaggagggtgcaggccatgggttactccttgcccttctcaggggcagtgggctcccagagccacttggtagtccccaggggctcagtcccagggtccagccgtgactcccctaagggcccctcgccctccaagtccagctcctcaaaagaggagcccgctggcgcctgactcgctgtagctgtgctcgctgcgggtgtcaccgtcatcccagccacngctgnacgccccagtgacagtgtggcaacttgaagtcttcccggttgcaaggcttactttcagcttacagaactcgggtn

SEQ ID NO: 10075 - DNA, 554 bp, Homo sapiens
  misc_feature (501)..(501): "n" may be a, t, c, g, other or unknown
  misc_feature (514)..(514): "n" may be a, t, c, g, other or unknown
  misc_feature (525)..(525): "n" may be a, t, c, g, other or unknown
  misc_feature (527)..(527): "n" may be a, t, c, g, other or unknown
  misc_feature (554)..(554): "n" may be a, t, c, g, other or unknown
agaaaataaaaactttatttttttcaagtttataagatagttcccattacatataacattacggtcacggattctacagccacaaatgcccgcagtcacataaatatatccaatccaatcaatgccttttcctgctaacagaggcatctgaagttcagagggagagtcgcattttaagtaaaagtcgtccttaatgggagggctcctgtcagtgcattaggaactagccaaggagccttgcttgccagagctgtctgactcagaggagaggaagggacagatggcctgctgactggggctgaggcagaactagattttctctcttgtggtttaagatattttagaatctcggaattcagatcctatagtgggaatatctggggagttctaacttctggatgaaaaaggaaaccaatttagtggtaagaaatagaagcctgcttaagagggaccctaactgcctccttgaggagtaaggagtcagaggaagaccctaagctnaccattccttggnccaaccattgntntaccccatacttctttccctgggggtn

SEQ ID NO: 10076 - DNA, 540 bp, Homo sapiens
  misc_feature (485)..(485): "n" may be a, t, c, g, other or unknown
  misc_feature (491)..(491): "n" may be a, t, c, g, other or unknown
  misc_feature (503)..(503): "n" may be a, t, c, g, other or unknown
  misc_feature (507)..(507): "n" may be a, t, c, g, other or unknown
  misc_feature (522)..(522): "n" may be a, t, c, g, other or unknown
  misc_feature (531)..(531): "n" may be a, t, c, g, other or unknown
  misc_feature (539)..(539): "n" may be a, t, c, g, other or unknown
cttttttatttgagacggcgtctcactctgtcacccaggctagagtgcagtggtgcgatctcggctcactgccagctccacctcccgggttcacgccattctcctgcctcagcctcctgagtagctgggactacagggatccaccaccatgcccggctaattttttgtattttttttagtagagacggggtttcactgcgttagccaggatggtcctgatctcctgacctcgtgatccgcccgcctcggcctcccaaagtgctgggataacaggcgtgagccaccgcgcccggccaccattggctctttctatgcacccagttggatgggcaatttacctatacctggcagaccaaaaggaagataacttggggcctcgcagctgtgcgcaccccatggaaaccaccacacagcatttttttttttttttggagacagagtctcgttctgttactcaggctggagtgcaatggtgtgatctcggntactgnaagctccacctnctangttcaagcgattctnctggcttancctcctang

SEQ ID NO: 10077 - DNA, 565 bp, Homo sapiens
  misc_feature (438)..(438): "n" may be a, t, c, g, other or unknown
  misc_feature (467)..(467): "n" may be a, t, c, g, other or unknown
  misc_feature (489)..(489): "n" may be a, t, c, g, other or unknown
  misc_feature (517)..(517): "n" may be a, t, c, g, other or unknown
  misc_feature (522)..(522): "n" may be a, t, c, g, other or unknown
  misc_feature (559)..(559): "n" may be a, t, c, g, other or unknown
cacctaagtctttatttatttggctctaggaagaatttgcatgaaaatgagcctgtatggcaggtacagaatgtactgtaacagcaccagagaggtacatcctctctcctctacagagcctcaatgtttaatacatacatgtgactttagtcataaaaccacatagtccaggaaaaaaggagccctttagaaaaaaaaaatcagtttagaatgactttcaaattgaccattccttttcaaatacttaaattcaaataacagatacattcagaggcccaaatgttggcatagaataaaatcatgttcatttatttttttctgcatcttagaattagaaggcataaaattaaatatgttgaatgtaataaattcatccatacaagtgcaagtctccagatataatgcattttatggcagatttattattttaaaaatgtnccagtaaatcaaaaaaagagggagtatgnccatttaacttttaatggaagngatgtaggaggcttcagaaatcaaatgngagcntgaaaattggccaaccttaaaactttcaaatctgggnaaagtg

SEQ ID NO: 10078 - DNA, 499 bp, Homo sapiens
  misc_feature (442)..(442): "n" may be a, t, c, g, other or unknown
  misc_feature (462)..(462): "n" may be a, t, c, g, other or unknown
  misc_feature (469)..(469): "n" may be a, t, c, g, other or unknown
  misc_feature (477)..(477): "n" may be a, t, c, g, other or unknown
  misc_feature (492)..(492): "n" may be a, t, c, g, other or unknown
  misc_feature (495)..(495): "n" may be a, t, c, g, other or unknown
  misc_feature (499)..(499): "n" may be a, t, c, g, other or unknown
gtagagacagggtctcgctatgttgcctagggtggtctcaaattcctgggctcaagtgatcttctcacctcagcctcccaaagtgctgggattataggcatgagccactgcacctggctgagatgaaaggtcttactcacttttcctggctctttactcctggtgtggcactatacaaagccatgacgtggaaactgagtcacatacctcctagttgggccactcaaaataactcagattgccatccacccatctttttggaaacgtaagtttccactaaatgttctatgtgggcacagaccagtacagagggaaacaggttataattagggagagctgttgctcttggaaccttctggattttaatggccccgagaaatcaagtcaaaacaggcttcatgctgttgctgacttgccagccattgctgacctaaaaatagangaaggggccataaaccaatntacatangtggcctntaacagctggaaaangcnaaan

SEQ ID NO: 10079 - DNA, 561 bp, Homo sapiens
  misc_feature (355)..(355): "n" may be a, t, c, g, other or unknown
  misc_feature (391)..(391): "n" may be a, t, c, g, other or unknown
  misc_feature (494)..(494): "n" may be a, t, c, g, other or unknown
  misc_feature (504)..(504): "n" may be a, t, c, g, other or unknown
  misc_feature (513)..(513): "n" may be a, t, c, g, other or unknown
  misc_feature (518)..(518): "n" may be a, t, c, g, other or unknown
  misc_feature (543)..(543): "n" may be a, t, c, g, other or unknown
agatggagtctcactctgtcgcccaggctggagtgcagtggcacaatcttggctcactgcaacctctgcctgccaggttcaagcgattttcctgcctcggcctcctgagtagctgggattacaggtgtgtgccaccacacccggctaatttttgtatttttagtagagacggggtttcaccatgttggtcaggctggtctcaaactcccgacctcgtgatccgcccgccttggccttccaaagtgctggaattacagggatgagccactgtgccgggccaaagcagaatttaaatcagcaattgggatacaatattagtgcagataatttacactagagtcatatttatatctgncacagtattaaagtataccacatatgtatggactgntagaagaaattcatttcatttttaaaagcaatggattggttaataaggttaagttctttaacactttctttaaaattcctggcaaggttaacttccattggcntttttaaatngaaaaaccnaaccnaaccaaacttaaaccccaagccacnccccaaaatggtaagttt

SEQ ID NO: 10080 - DNA, 556 bp, Homo sapiens
  misc_feature (414)..(414): "n" may be a, t, c, g, other or unknown
  misc_feature (419)..(419): "n" may be a, t, c, g, other or unknown
  misc_feature (437)..(437): "n" may be a, t, c, g, other or unknown
  misc_feature (448)..(448): "n" may be a, t, c, g, other or unknown
  misc_feature (510)..(510): "n" may be a, t, c, g, other or unknown
  misc_feature (515)..(515): "n" may be a, t, c, g, other or unknown
  misc_feature (517)..(517): "n" may be a, t, c, g, other or unknown
  misc_feature (542)..(542): "n" may be a, t, c, g, other or unknown
  misc_feature (544)..(544): "n" may be a, t, c, g, other or unknown
ggtgacagagtctcgctttgtcgcccaggctggagtgcagtggtgcaatctcggctcactgcaacctctgcctcctgagttcaagcaattctcttgccttagcctcccgagtagctgggactacaggcgcccgccaccatgcccagctaattttttgtattttggtggagacggggtttcatcgtgttgcctaggctggtctcaagctcctgagctcaggcaatctgcccacctcggcctcccaaagtgctaggattacaggcatgagccaccatgcccgggcccctttcctttgattttaataacacttagagtaatgtagtgttctggatccagaagattacttctggaacaattagtgaccaacaaccacccttatacttgacataaaactgagcaggtttagggacaganggaantgtgaagttcaccagctntttcacactgngcttataagaaccaaatctggccaatgtgacctgacacacttacctgggcaaggatcttatnaagangnttccagaataacttcccgaaacttntntgggactggtaa

SEQ ID NO: 10081 - DNA, 421 bp, Homo sapiens
  misc_feature (404)..(404): "n" may be a, t, c, g, other or unknown
  misc_feature (407)..(407): "n" may be a, t, c, g, other or unknown
  misc_feature (410)..(410): "n" may be a, t, c, g, other or unknown
  misc_feature (413)..(414): "n" may be a, t, c, g, other or unknown
  misc_feature (416)..(416): "n" may be a, t, c, g, other or unknown
  misc_feature (421)..(421): "n" may be a, t, c, g, other or unknown
aaatttgagtcagggtctcactctgtggcccaggctggagtgcaatggtgcgatcacggctcactgcagccttgactttctgggttcaaggagtcctcctgcttcaacctcccaagtggctaggaccacaggcgtgcaacaccacacccagctacccactcattttttggttgaatgaacagcttaaattcttgttctgacccaagagcctttgcactgcctcttcctcctgcctgcttatcccccagttatccacctgttccctccctcatttccttcaattttatttttttctgcaatggggcctttcctgactaccacttaaaattgcttgcttgggtacaatggctcacgcctgtaatcccagcactttgggaaggtgaagtgggtggatcacctgaggncanganttnnanaccan

SEQ ID NO: 10082 - DNA, 525 bp, Homo sapiens
  misc_feature (362)..(362): "n" may be a, t, c, g, other or unknown
  misc_feature (397)..(397): "n" may be a, t, c, g, other or unknown
  misc_feature (449)..(449): "n" may be a, t, c, g, other or unknown
  misc_feature (454)..(454): "n" may be a, t, c, g, other or unknown
  misc_feature (456)..(456): "n" may be a, t, c, g, other or unknown
  misc_feature (461)..(461): "n" may be a, t, c, g, other or unknown
  misc_feature (464)..(464): "n" may be a, t, c, g, other or unknown
  misc_feature (491)..(491): "n" may be a, t, c, g, other or unknown
  misc_feature (508)..(508): "n" may be a, t, c, g, other or unknown
acggtaggtaataagatttactgaaaacgtctcggccacattcagtactggtttggtggatacatcagaaggaggttgcataacattaggcaggtggaggggctgagaggaagagatgtgggcacctgtgtgccagtgtgtccgtgctgggggacgcctgtccaggtggtgagtggaacggtgtgtgtgtgtgtctgtgtgcgcgtgttaacaagaaaaacgaaccagaaaaggaagtgcattttatcccactgcacattgcaaaagtctcacgccaaaaaagctagactttcctctatgtatggcatcaaaagggagtaaaaaatgattggatcacccagattataaataagggtatttgnttctcaaaaatccttattaaaacattaaatatcanctcttttggggggagaaatacattcatttcagggagacctcggaagaatggnccatncntttgnttntaccccaaccagtgggggaaggggaanccccaaaagggcccaanggggtccctccagttga

SEQ ID NO: 10083 - DNA, 552 bp, Homo sapiens
  misc_feature (395)..(395): "n" may be a, t, c, g, other or unknown
  misc_feature (511)..(511): "n" may be a, t, c, g, other or unknown
  misc_feature (522)..(522): "n" may be a, t, c, g, other or unknown
  misc_feature (528)..(528): "n" may be a, t, c, g, other or unknown
  misc_feature (532)..(532): "n" may be a, t, c, g, other or unknown
  misc_feature (536)..(536): "n" may be a, t, c, g, other or unknown
acaattgttaacatggcaacctttaaagccagctcttaaataccaagaccttgaacttgatgcattccacatttctcctctgcccagaaggcagatgggagaataattcaccaaagtttagacacaggtaaattgaggggagggtttcttttttctttttgtttttttgagccaagtcatgctcctgaaaaaaaatgcttactgaggaaaataaacacctcgagctcaagcagctctcaggagtatgtagtccctgccctgaggccacttatcatctagtttgagaagagacaggtacaaaaatagctcaaacatcaggtgccagcagttcaggggagggatctgaaaaggcagcaaggcactaaatcagcaccccaacctggttttgtgtttgntttcttaaacctgccagcaccaactcttcatcaccttgcaaattcaagaccatctttggaaaagacagttaggactgacttgcaatggctttgggaatcttacccacccccatggntggttttctanggcctngggncaanggctcctttaaaaagg

SEQ ID NO: 10084 - DNA, 553 bp, Homo sapiens
  misc_feature (413)..(413): "n" may be a, t, c, g, other or unknown
  misc_feature (450)..(450): "n" may be a, t, c, g, other or unknown
  misc_feature (520)..(520): "n" may be a, t, c, g, other or unknown
gttattataggcatttattactaactatagtccttcttggaaggaacacccaaaccaatacttataaagtacatgtaatttatagtaacatattttactatatacatatggaaaaaatcatattctcacagaagagctgaacagacattcaccaggatacgactgttggaccagctgctggagatggacctgctacccctcagcagcctccccaccacaagacaagtgatctcaatgtccccaaacctgtgggaccctgttctacacacctcatttttgttccggcgtttcatcctccttgtgtgattgtactgattttcatgagacacaagttacttctttacatccatattcccaaagcagggttacatggtaggaaagaaaggaaattggaggtactaagctcattgggnctcctctagcttttaccagcatctaatgcttcactgntttttttccattggagactttaatggcacttggataaatacatggaggtggttttttcctcaaaatggantaccccaattaagactgggaagggcccaaaaaa

SEQ ID NO: 10085 - DNA, 549 bp, Homo sapiens
  misc_feature (111)..(111): "n" may be a, t, c, g, other or unknown
  misc_feature (197)..(197): "n" may be a, t, c, g, other or unknown
  misc_feature (409)..(409): "n" may be a, t, c, g, other or unknown
  misc_feature (438)..(438): "n" may be a, t, c, g, other or unknown
  misc_feature (440)..(440): "n" may be a, t, c, g, other or unknown
  misc_feature (456)..(456): "n" may be a, t, c, g, other or unknown
  misc_feature (479)..(479): "n" may be a, t, c, g, other or unknown
  misc_feature (515)..(515): "n" may be a, t, c, g, other or unknown
  misc_feature (526)..(526): "n" may be a, t, c, g, other or unknown
  misc_feature (531)..(531): "n" may be a, t, c, g, other or unknown
gtagagatggggtttagccatgttgcccaggctggtctcaaactcttaggctcaaacgacccacccaccttggcctcccaaagtgctgggattacaggcatgaaccattgngcctggtcttggtaaatcttttgaacttgcagtttagccaatcctgaactgttaatgtaagaacaacagatgtggtttattactgngcatacccgcccttgttcagccagaagatattccagggcaaatctgttatccaagacagcattggctagggagtgcagggaggcttgatgtccttttatggctctgcctgtactagttgccagtgtttcaagggtttgaaagtttctcaaagctggctgacagtatgcaaaagccattccaaggggctatttcaacttctggccaaaatagncctattggcttttagaatttaccccatgngngaaattatgaactggntattctactgggaccttaaagtncctaaacaaggcatttccttatggggtggaccattnttccccccaangggcncccttttggcaagtaaat

SEQ ID NO: 10086 - DNA, 549 bp, Homo sapiens
  misc_feature (438)..(438): "n" may be a, t, c, g, other or unknown
  misc_feature (453)..(453): "n" may be a, t, c, g, other or unknown
  misc_feature (482)..(482): "n" may be a, t, c, g, other or unknown
  misc_feature (494)..(494): "n" may be a, t, c, g, other or unknown
  misc_feature (501)..(501): "n" may be a, t, c, g, other or unknown
  misc_feature (537)..(537): "n" may be a, t, c, g, other or unknown
  misc_feature (539)..(539): "n" may be a, t, c, g, other or unknown
  misc_feature (543)..(543): "n" may be a, t, c, g, other or unknown
ggtgtttttagtagagattgggtttcaccatgttggccaggctggtctcgaactcgtgacctcaggtgattcacccacttcagcctcccaaagttttgggattacaggcgtgagcaaccacgcccggcctgcctgcttagtttctggctgtcacttagctttgcaaggctgggagcagcactccaggaggcagaggaagggaacacatgttcagactggggaataccatactaagtgtacagacatacatttggacactgtcctgaaagacatcatacaaacatggaagctcttgaacaaaggtcctcccttgccccaacccccaggcagccctcacgtccttccagtctttgttttgctgcctgatggagaagcagagatttggggcgtggggctggaggaacagccagtgccacttgttcctctgaagcaagtggncttaaaaccaccttntggccttcccagctacttgggcatgcttntaccaaggtgtnaaggctnaatgggcccggggccacttaattgggcaagggttgntnttanggaaaa

SEQ ID NO: 10087 - DNA, 551 bp, Homo sapiens
  misc_feature (510)..(510): "n" may be a, t, c, g, other or unknown
caatggcaacacagatttattgggagaaagacctgcggagagggggtaccagctagtgccagagcccccttcccgcttacaggctggaccagttacagtcccgggcaggagaggtctgggattgttgtgaaaatggggtgggggcggtgtgtttggctgctgataatgaaggaatttagtgcagccaggggttaggcctgggacctgcctgacaggatgtttctcacagctcaggccctggtggaattttccactctgaccagtttgtaaaatggtaggggtctgcaaaatagtgcagtttgggctaacattcttatttcttactttagtataaaaaggaaaaagggccgtcgttgatcatctggctgcttcctgctggataggggccgttgtgattagggcctgggttctggagcttccgaatggtttcctcgaagctttggtattaaacctggcaaaaggtgaaatatattatcaatgggttttgcatgcttgcctggattaaacaanttaaccctttgggaaatgaaaccgggatccaaggttaaatt

SEQ ID NO: 10088 - DNA, 553 bp, Homo sapiens
  misc_feature (288)..(288): "n" may be a, t, c, g, other or unknown
  misc_feature (387)..(387): "n" may be a, t, c, g, other or unknown
  misc_feature (470)..(470): "n" may be a, t, c, g, other or unknown
  misc_feature (514)..(514): "n" may be a, t, c, g, other or unknown
  misc_feature (523)..(523): "n" may be a, t, c, g, other or unknown
  misc_feature (549)..(549): "n" may be a, t, c, g, other or unknown
caaagctaccctggaacggtaatacaataaaactagtacctgtgcataaattgttaactgacctgcccagcatgggtacctaactggggtttagggtagggggacagagggctttttaagattggtggtgggggatggggattaatacagacagctcgggtagggtccactcctggttccagggtgcaggttgctggacttggagcatgggatgaagagatgttcagagatagagatcattaggttgctgaactcccctagggcagtggagtgaaaaagctgtagcanccaaggcagggtgtagatccctggaggctgacggcttggggtggggccacagtgagcccagcccctgatggctctagttcttgcccttgcagagctcanaaatggaggtggctcctgtgccttgtccaacaatggttcccttgaaaaagaacccataaggatcccccaatccaccccaatgnggttcttgggggtaatggagataatctccccacagtggggtgancttggggtnaagggaacctggcttcttggaatggnaacc

SEQ ID NO: 10089 - DNA, 490 bp, Homo sapiens
  misc_feature (436)..(436): "n" may be a, t, c, g, other or unknown
  misc_feature (444)..(444): "n" may be a, t, c, g, other or unknown
  misc_feature (455)..(455): "n" may be a, t, c, g, other or unknown
  misc_feature (463)..(463): "n" may be a, t, c, g, other or unknown
  misc_feature (470)..(470): "n" may be a, t, c, g, other or unknown
  misc_feature (481)..(481): "n" may be a, t, c, g, other or unknown
  misc_feature (484)..(484): "n" may be a, t, c, g, other or unknown
gagacaaggcctggctctgtcgcccaggctggagtgcagtggcgtgatctcagcttactgaaacctctgcctcctgggctccagccatcccccaacctcagcctcccaagtagctgagagtacaggcatgcaaccacacctggctaatttttgtatttttgtagagatggggttttgccatgatgcccaggctggtctcaagctcctgagctcaagtgatcctctcgccttggcttcccaaactgcttggattacaggcatgtgccaccacatccggcctaaaagtttttaagagtaataagcaaaggtagatgtgtatgtgtgtgatactgtcatggtgacatttgtccaaacctatagaatgtgccaagagtgaacactgtggactctggttgatggtgatggatcaatgcagtttcaacaactgtgacacatncacccctntggagcgagangtctgcantggggangctatatgggnatngggggg

SEQ ID NO: 10090 - DNA, 470 bp, Homo sapiens
  misc_feature (340)..(340): "n" may be a, t, c, g, other or unknown
  misc_feature (373)..(373): "n" may be a, t, c, g, other or unknown
  misc_feature (377)..(377): "n" may be a, t, c, g, other or unknown
  misc_feature (410)..(410): "n" may be a, t, c, g, other or unknown
  misc_feature (427)..(427): "n" may be a, t, c, g, other or unknown
  misc_feature (442)..(442): "n" may be a, t, c, g, other or unknown
  misc_feature (464)..(464): "n" may be a, t, c, g, other or unknown
  misc_feature (469)..(469): "n" may be a, t, c, g, other or unknown
ataaataagaaatagggtttattgagaaagttcggcaagcagagaaacagaacagacacacaaccccctgctgttcacagctcaggcctaagatggttgtgttctgtggccaggccccctaaggctctgtgctttcataggaactggagagcaattgtcaacaagggaaactgaaagaatggccttcagaactctggctgacggcagcctgttcttttgttaagctaatttagacctttgttcagctaccaggagagaaaattaggtgtaggagccctggtcccaagctctggtcttaaaacaccatcatcctgctttacctctacaaccatcccacggncctattatatggatgagggtaaagaaacacgtncaangcgggtcattccccttcagtgcttatcacctanttgagggatccaaacanggccacctgccaaanctaaggaccaggaccaggccancccang

SEQ ID NO: 10091 - DNA, 509 bp, Homo sapiens
  misc_feature (448)..(448): "n" may be a, t, c, g, other or unknown
  misc_feature (471)..(471): "n" may be a, t, c, g, other or unknown
  misc_feature (483)..(483): "n" may be a, t, c, g, other or unknown
  misc_feature (493)..(493): "n" may be a, t, c, g, other or unknown
  misc_feature (496)..(496): "n" may be a, t, c, g, other or unknown
  misc_feature (504)..(504): "n" may be a, t, c, g, other or unknown
  misc_feature (508)..(508): "n" may be a, t, c, g, other or unknown
agttaagaaacagaacaccttttgtttaagcaactaaattaacacgtgatggttcttggcaagatcccatccatgacagcattcccgtccaccaatcttttccgaaagtctggagcttactggacgtagtgtaatggcaactcctcccactaaaaggccccgtcaggctgggcacagcggctcatgcttctaatcccaacactttgggaggccaagacaggaggatgcttgaccccaggagttcaagaccagtcttggcaatgtagcaagaccccaactctataattttttttttttttttgagacggagtctcgctctgtctcccaggctggagtgcagtgggtgcgatctcggctcactgcaagctccacctcccaggttcacaccattctcctgcctcagcctcctgagtagttgggaccacaggcgcccaccaccacgcccggntacttttttggatttttaagtanagacaggggttnactggggtanccnggaatggncttna

SEQ ID NO: 10092 - DNA, 539 bp, Homo sapiens
  misc_feature (467)..(467): "n" may be a, t, c, g, other or unknown
  misc_feature (482)..(482): "n" may be a, t, c, g, other or unknown
  misc_feature (509)..(509): "n" may be a, t, c, g, other or unknown
  misc_feature (516)..(516): "n" may be a, t, c, g, other or unknown
aaagcttttaaatttcagttaccagctccaatgaaaaaagaaatccagtctagaacagccactctgaaagccaaaacaaaaagagctccaaaaaactgttgagcaaagttaagtgccttttcggaagcaaatctcgggatttcgaaagcctggctttgtttttctctgtgtgaaaaaatattccagattgtaacatgccgtcgcttcaaggagtttttagcagcttccttgatacatgaaaatcttgttctctgaaagcttcaggtgttgtcttcccagaattggtttcactatgtgtgatgccctcgctttcttcctttgggcttgttagttccttcatcattaggtgtgagatgtgttatttatagatgcttcgactcctgggatggctctttgaacacagccctgccatgtcaatgcacagaaagccccgatttgtttctgacccgtcttgataatcttaccgngcacagctttcctanggttaatttgcaattaattaatttagngacaggnctcctgggttgccaacctggctg

SEQ ID NO: 10093 - DNA, 557 bp, Homo sapiens
  misc_feature (524)..(524): "n" may be a, t, c, g, other or unknown
  misc_feature (535)..(535): "n" may be a, t, c, g, other or unknown
  misc_feature (548)..(548): "n" may be a, t, c, g, other or unknown
  misc_feature (556)..(557): "n" may be a, t, c, g, other or unknown
ggttttctctttgaaagtttattgttttctttaaaaaaaaaaaaaaacctataccttttatattttacattcacctctcagaatatttaatggtacccgttaacgatgttataaaaaaagaccatcacctgcttgaaatggctgcaaatttaccatgttctggcattaaagtgatttcaactctttggacaaattggtgtaacagtaagcaccgagatttcaaattcccagatgagaaaaaaaaaattaatcaggaggaaatttatttagtaaaaattcaaagctaaagaaatgtgagaaggaagccaaacccaaaaaactgtaaaaaatacaatcttctctccagaattaggttaaaaaatacagtcaaccccattctaaaccccatatttcttagaaaagtcacccagtcctgaacacagggtcttatacacaaatacatgtagcttgatttgcagatcagcctctgggatccgaccttacctggccccaattagaagtcaaaaaccaaaatttaggtaggnaggcagacctntattaaactcagnatcccgtnn

SEQ ID NO: 10094 - DNA, 558 bp, Homo sapiens
  misc_feature (446)..(446): "n" may be a, t, c, g, other or unknown
  misc_feature (491)..(491): "n" may be a, t, c, g, other or unknown
  misc_feature (504)..(504): "n" may be a, t, c, g, other or unknown
  misc_feature (533)..(533): "n" may be a, t, c, g, other or unknown
  misc_feature (556)..(557): "n" may be a, t, c, g, other or unknown
actcttacttggttttaataatacagttaggatgggttgccaggtctggcattgggcctagatgcccaggcatcgtggagtgcctccgtggtcactgggcacaggccaccagctcctccagggcttgctctcggcggttgccatggaccagcagcacctccttgatccggtcctgctggaagcccatgtcactgaactgctcccagaggcgcaggaactcccctgcctgaggaagaggagacagggagggtgctgggggctctgctgggcctggcctcaaccatggggagccccagctccagtgcctactgcacctagtcccaaaaagctgtggctacccccaggccacgtgagcctgatcctgggccgcacctgccacttttctgtacctgtagggtgatgtaggttccgacctcccttcctctgccaaggaaagaaggccccancctggccatgggctctgcctgactcttcttccacttcttccactnactggcaactttntgctggggcaagaaggggggcaaaaccgncaccttgacctggaggacaaaannt

SEQ ID NO: 10095 - DNA, 558 bp, Homo sapiens
  misc_feature (84)..(84): "n" may be a, t, c, g, other or unknown
  misc_feature (223)..(223): "n" may be a, t, c, g, other or unknown
  misc_feature (241)..(241): "n" may be a, t, c, g, other or unknown
  misc_feature (334)..(334): "n" may be a, t, c, g, other or unknown
  misc_feature (353)..(353): "n" may be a, t, c, g, other or unknown
  misc_feature (417)..(417): "n" may be a, t, c, g, other or unknown
  misc_feature (441)..(441): "n" may be a, t, c, g, other or unknown
  misc_feature (479)..(480): "n" may be a, t, c, g, other or unknown
  misc_feature (512)..(512): "n" may be a, t, c, g, other or unknown
  misc_feature (516)..(516): "n" may be a, t, c, g, other or unknown
  misc_feature (521)..(521): "n" may be a, t, c, g, other or unknown
  misc_feature (523)..(523): "n" may be a, t, c, g, other or unknown
  misc_feature (543)..(543): "n" may be a, t, c, g, other or unknown
gtagagacagggttttgccatgttgtcgtccaggctggtctcgaactcctaggctcaggcaatcctcctgcttcagcctcccanagtgctgggattataagcatgagccaccatgcctggcctcagtaggggattcttaaagaagacacatatgcagtgagtggcttggattttgaaagaggtgtgtgtgaaggccaggggtggtggcccactcccctcctgngtgcccactttcattcanaaccatcccatttattggtcttttctaccagtatctctacaaatcatctttccatttagcagcctttcctagggggtcacatagccacccctnacataaagaatgaggctgngggtcacagacaagacacaacaatgtagcccacatcccgataaaaaagtgttgggcaagcacangccttacactggaatcagaacaangggggaaggattcaacttactctgggaacagaccgacnnggatgacccatcttgcattcctttttttggangganaaagncntgaggcttcctttggctggnaaaaaaattacttgg

SEQ ID NO: 10096 - DNA, 561 bp, Homo sapiens
  misc_feature (284)..(284): "n" may be a, t, c, g, other or unknown
  misc_feature (310)..(310): "n" may be a, t, c, g, other or unknown
  misc_feature (352)..(352): "n" may be a, t, c, g, other or unknown
  misc_feature (408)..(408): "n" may be a, t, c, g, other or unknown
  misc_feature (465)..(465): "n" may be a, t, c, g, other or unknown
  misc_feature (475)..(475): "n" may be a, t, c, g, other or unknown
  misc_feature (478)..(478): "n" may be a, t, c, g, other or unknown
  misc_feature (521)..(521): "n" may be a, t, c, g, other or unknown
  misc_feature (537)..(537): "n" may be a, t, c, g, other or unknown
agtagagacggggtttcaccatgttggtcagggctggcctcgaacccctgacctcagatgatcagcccacctcggcctcccaaagtgctgggattacaggagtgagccaccacgcccggatttttttttttttttttttttaacagaccaaagcgttaagagtccccaaaggagggaagccaccctgcaatggaatggcagaaccaggatgggtgaacctgaagtctcaggtgtcaagacatcggcacacagacagcttggtctctcctaccgacaagcacatntgtggccctgctgcacatatgggcanagggtggctggcaccgtcctgccttcggcatgttccaacatncccacaggaccctatacctggaagcccctacatcatttactgggttttgtgacaanatggagacccaatagagtttcctaagagggagaaagagtccacagaaccccaccctnaattcagggnctnttggaccggtcctaacttggggcattgccaggccaggggctgnacccttttttccccanagtcctggcacaagccaaaaccgt

SEQ ID NO: 10097 - DNA, 473 bp, Homo sapiens
  misc_feature (31)..(31): "n" may be a, t, c, g, other or unknown
  misc_feature (136)..(136): "n" may be a, t, c, g, other or unknown
  misc_feature (278)..(278): "n" may be a, t, c, g, other or unknown
  misc_feature (285)..(285): "n" may be a, t, c, g, other or unknown
  misc_feature (290)..(290): "n" may be a, t, c, g, other or unknown
  misc_feature (388)..(388): "n" may be a, t, c, g, other or unknown
  misc_feature (401)..(401): "n" may be a, t, c, g, other or unknown
  misc_feature (406)..(406): "n" may be a, t, c, g, other or unknown
  misc_feature (409)..(409): "n" may be a, t, c, g, other or unknown
  misc_feature (421)..(421): "n" may be a, t, c, g, other or unknown
  misc_feature (437)..(437): "n" may be a, t, c, g, other or unknown
  misc_feature (447)..(447): "n" may be a, t, c, g, other or unknown
caaaacaagtgttatttattataaaatcagnggcttctgattagaagactttttttttttaaaccaaataggctcaagaagctggctggaggttgaattggctgacgaacatcttcttcctccaccagcagtttgngggacacatcacgtttctgccaagtgctacagctgaagcccatattcatagaagcaccctgacagcccttctccagcaacttccagaaaacagaacctgagcactcaaagctgcatcagcccatgtggccttgctcccaaanaagcatntggcnatttgggcatgggggaaccaaaagtgggcagggaattctccttggctccttaaaagggcatgggagcccagggaaaccgttcggccccagtgcagccntattgggaagganggatnggnaaaaggctgctnggctttttccttcctnaccctatggnaagggggactggccctttggttcctt

SEQ ID NO: 10098 - DNA, 517 bp, Homo sapiens
  misc_feature (3)..(3): "n" may be a, t, c, g, other or unknown
  misc_feature (41)..(41): "n" may be a, t, c, g, other or unknown
  misc_feature (168)..(168): "n" may be a, t, c, g, other or unknown
  misc_feature (170)..(170): "n" may be a, t, c, g, other or unknown
  misc_feature (273)..(273): "n" may be a, t, c, g, other or unknown
  misc_feature (275)..(275): "n" may be a, t, c, g, other or unknown
  misc_feature (405)..(405): "n" may be a, t, c, g, other or unknown
  misc_feature (422)..(422): "n" may be a, t, c, g, other or unknown
  misc_feature (429)..(429): "n" may be a, t, c, g, other or unknown
  misc_feature (434)..(434): "n" may be a, t, c, g, other or unknown
  misc_feature (441)..(441): "n" may be a, t, c, g, other or unknown
  misc_feature (446)..(446): "n" may be a, t, c, g, other or unknown
  misc_feature (481)..(481): "n" may be a, t, c, g, other or unknown
  misc_feature (509)..(509): "n" may be a, t, c, g, other or unknown
ganacagggtttcactcttgtcacccaggctggagtgcagnggcacgatcttggcttactggaacctccgccttccaggttcaagcgattctcctgcctcagcctcccgagcagctggcattacaggcgcctgccaccacgcccagctaatttttgtatttttagtananacagggtttcaccatattggccaggctagtctcaaactcctgacctcaagttatccgcccaccttggcctcccaaagtgctgggatcacaggcgtgatccatngngcccgggccacgtctcttcctttcaatgtaggatgtcactcatgagcatcaattcttcactgcattaaggaatgtgtgattttagaaagtgcctgagtatagaattgtgagggtgtggcctatgtcttangccttggagaaactcanctagcanagaanaatgganaaagngggcataacgttatgattgctcaaaactaaatgcngataatatgaccttgaacctgggaagcncaaaagcc

SEQ ID NO: 10099 - DNA, 556 bp, Homo sapiens
  misc_feature (480)..(480): "n" may be a, t, c, g, other or unknown
  misc_feature (513)..(513): "n" may be a, t, c, g, other or unknown
  misc_feature (531)..(531): "n" may be a, t, c, g, other or unknown
  misc_feature (537)..(537): "n" may be a, t, c, g, other or unknown
ataacagaaaaatatttatgtaatgatggcagctgcaaattgattgggatgttaataaataaaaaggaacaagtatcaactagctgcaaatgaggaagaaaccaacctacctgaaaactacaaccaaattctcatggctaataagtgatggcagtgagaccatggccctaatggaagttagggcagcctcacccactgaaatgttgtttagttggagctgatagcctcagtgttagataaaaattgtgcaacacctgagcaacaaattttttttttttttttttggaaattggcatgtattctgcaaagacttgttttaggccagttttaccccatctgctaaacgcaatgcatagtctgtatcaaccagaagaacccatctctaaaaacatcaatgttgatagtcaaagaccactgtgttagaacccaaaatcagggcttggatgattacctacattagacagagcaatggtggcacangcttgagcatgacaatggctcatatggttgacncaaaagtaaccaattctnggtgcnttcaggaggaatgcctgct

SEQ ID NO: 10100 - DNA, 536 bp, Homo sapiens
  misc_feature (439)..(439): "n" may be a, t, c, g, other or unknown
  misc_feature (459)..(459): "n" may be a, t, c, g, other or unknown
  misc_feature (481)..(481): "n" may be a, t, c, g, other or unknown
  misc_feature (488)..(488): "n" may be a, t, c, g, other or unknown
  misc_feature (525)..(525): "n" may be a, t, c, g, other or unknown
  misc_feature (528)..(528): "n" may be a, t, c, g, other or unknown
  misc_feature (535)..(535): "n" may be a, t, c, g, other or unknown
gacagtttcaacatggctttactctctctctgggcacaagcgagccatatgtgcagcatcagcaaggtataccttttacagacaatagtggctctgagccaaacacgagctcatgtgagttgttacctaatgggcctcatgtggtgtggttacataacgagcaaggttgtgtgcttgcactccaaacccactgagtcatgctgcaccagaaggctgcctcagcctactcctgactaaagcacagccatttcccttacactacaccccctaggctgagggcgtcctccaggcagggacacatgcctatatggcggagccctgagtccataacccacaacaacaatacagagagcaacagctcactactaggatctcagctatgatacttatgactattagggcccaatgtacgccagaacctagggatgctcaccatctntgcaaggggttgacagtgangcttttcagtcaccttaatctnctggaanacccttttgaaggctggtggtatggtctgctgaatgncanggataang

SEQ ID NO: 10101 - DNA, 551 bp, Homo sapiens
  misc_feature (53)..(53): "n" may be a, t, c, g, other or unknown
  misc_feature (61)..(61): "n" may be a, t, c, g, other or unknown
  misc_feature (267)..(267): "n" may be a, t, c, g, other or unknown
  misc_feature (276)..(276): "n" may be a, t, c, g, other or unknown
  misc_feature (354)..(354): "n" may be a, t, c, g, other or unknown
  misc_feature (477)..(477): "n" may be a, t, c, g, other or unknown
  misc_feature (487)..(487): "n" may be a, t, c, g, other or unknown
  misc_feature (522)..(522): "n" may be a, t, c, g, other or unknown
  misc_feature (551)..(551): "n" may be a, t, c, g, other or unknown
cattttgcaaatttaatgtaactctgataccaaaatatgacagcacacagaangcaaacantaaagcaggaacagcaaacagatttttccatcacatgacaccctcagctgattggccataactgccttgactgctgtgtggacaaagattccaaggatgtactttggctccatgggaaggactactgcaatttattagcggtatctgtaaacatggggaataaatctgaaacctcactagccatacgagaagccacaggcaccaanactggcggntccactgccaaagccagcactggtgctcggtccaccaccaaagccagcaccagtgtttggtccaccgccgaagccagntcctgtgctcggtccaccgctgaagccactggtgcttggtccactgcaaaagccaacaccagtgcttggtccaccgttgaagccaacaatagaactggggccactactgaaccccgtgctggngctgggttcncagtaaagccagtgcttggggttggaaccctggcnaagccaatggtgggcctaaacctttgggn

SEQ ID NO: 10102 - DNA, 547 bp, Homo sapiens
  misc_feature (189)..(189): "n" may be a, t, c, g, other or unknown
  misc_feature (245)..(245): "n" may be a, t, c, g, other or unknown
  misc_feature (337)..(337): "n" may be a, t, c, g, other or unknown
  misc_feature (421)..(421): "n" may be a, t, c, g, other or unknown
  misc_feature (433)..(433): "n" may be a, t, c, g, other or unknown
  misc_feature (439)..(439): "n" may be a, t, c, g, other or unknown
  misc_feature (447)..(447): "n" may be a, t, c, g, other or unknown
  misc_feature (451)..(451): "n" may be a, t, c, g, other or unknown
  misc_feature (511)..(511): "n" may be a, t, c, g, other or unknown
  misc_feature (525)..(525): "n" may be a, t, c, g, other or unknown
  misc_feature (540)..(540): "n" may be a, t, c, g, other or unknown
ggaaacaaaccaaaaactttatttacaaaagtaaattttaacttgcttttatatgtcatataccgttaatgatgacagcaacagatttaaaatacattgaggtttgtgcagctcatttccccctagttataccataaaactttataaacattgctttagctttgatgtttggtcacgtttgttgtgcanaagtcacgtttcagggtaggttcaccgccagacacggtcacatcaccattggctgnggatttccaagaagcaaaggagccaatctcagcaaagctcgcactggcatttttagctgcttaaatttgaagagcagttcagcaaagcttgngctcccttctagtcctataggtggcaggtgctgtggagctggcacagagtggtagacgaggaacaggccagcatgctcagctgngattcctccaanggctgnccgctgangtangcgtgcacacacattttacccccgacttggacccctggtccagggattatcaatggggcnctttacaacagggngggaattccagttcntaaaaac

SEQ ID NO: 10103 - DNA, 462 bp, Homo sapiens
  misc_feature (356)..(356): "n" may be a, t, c, g, other or unknown
  misc_feature (368)..(368): "n" may be a, t, c, g, other or unknown
  misc_feature (383)..(383): "n" may be a, t, c, g, other or unknown
  misc_feature (397)..(397): "n" may be a, t, c, g, other or unknown
  misc_feature (426)..(427): "n" may be a, t, c, g, other or unknown
  misc_feature (456)..(456): "n" may be a, t, c, g, other or unknown
  misc_feature (460)..(460): "n" may be a, t, c, g, other or unknown
ccttttactgcccatttattaccgtgcgggttaaaaaacgggaaaagaggccgggcgtggtggctcacccctgtaatcctaacacttcaggaggctgaggcaggcggatcatgaggtacacgcccagggaagagaagggacttgtccaaatgtcactcaagtacttggtccataacattaagctttgtaattcaccaggttaaatgtgacatcactgttccatccaccctaccaacactccaaagaaactcaacttcctgttccctcttgaggaagtaaaacttaccagataaaaaggggaacgaggtggtgggggggggctggccgtcgaggccgggggccaccaaacgaggtancagtggaggganggctggggggaccanaacgcaatgtcagngtgtcaggctcatccttggaaacaggcannccgggataccatggtgacaggcaagggancggncc

SEQ ID NO: 10104 - DNA, 531 bp, Homo sapiens
  misc_feature (459)..(459): "n" may be a, t, c, g, other or unknown
  misc_feature (465)..(465): "n" may be a, t, c, g, other or unknown
  misc_feature (490)..(490): "n" may be a, t, c, g, other or unknown
  misc_feature (495)..(495): "n" may be a, t, c, g, other or unknown
  misc_feature (507)..(507): "n" may be a, t, c, g, other or unknown
  misc_feature (523)..(523): "n" may be a, t, c, g, other or unknown
  misc_feature (529)..(529): "n" may be a, t, c, g, other or unknown
gagatggaattttgctcttgttgcccaggctggagtgcaattgcgcgaacactgcaacctccacctcccaggttcaaacaattgtcctgcctcagcctcccgagtagctgggattacagatgcctgccaccacgcccagctaatttttgtatttttagaagagacggggtttcaccatgttgaccaggctggtctcgaactcctgacctcatgatctgctcaccttggcctcccaaagtgctgggattacaggcatgagccactgcacctggccatatttttttttttggagatagggtctcactctgctgccccagcttgaatgcagtagagtgatcatagctcactgcagcctcaaactcttgggctcaggtgatcctcccatctcagcctcccgagtagctaggattacgggcatgcgccaacatccctggctagtttttaaacaattttttgtanaaacangggcttgctatgtggccaagctggncttgnacttctggactnaagccatcctgaattnggcctncc

SEQ ID NO: 10105 - DNA, 564 bp, Homo sapiens
  misc_feature (415)..(415): "n" may be a, t, c, g, other or unknown
  misc_feature (449)..(449): "n" may be a, t, c, g, other or unknown
  misc_feature (464)..(464): "n" may be a, t, c, g, other or unknown
  misc_feature (482)..(482): "n" may be a, t, c, g, other or unknown
  misc_feature (484)..(484): "n" may be a, t, c, g, other or unknown
  misc_feature (493)..(493): "n" may be a, t, c, g, other or unknown
  misc_feature (499)..(499): "n" may be a, t, c, g, other or unknown
  misc_feature (563)..(563): "n" may be a, t, c, g, other or unknown
cagtgtcttcagtgaagtttactgtatattataaacagtcatagaattcaaagacaatcatataaccaactcttttggatggcttaggatgtgccaggtactgtgctaaggacaagagatataaccagatacaaaccagtccccatcctcaatcattacttattcactcaacaaatatttttgagtacttaccctgcaccaggcactagggatataacagataaaaattaagtctctcgcttcatgaagctttcattctgatagagggagacaggcaataagccaaataaatggtttattccaccaccccttcaagtcttcactcaaatgttcctttttcaatgagactatataaccaacgtatttaaaatttcaaccaccatcctgcattcactgcttttcatcttgctaaggnagttaatatgtgttaatttgactgaccacaaggngcccagatacttggncaaacattatgcctgggngngctgtgaancatggntttggatgagattaacatttggaatcagtcccctggataaagcttatttttttttcccaggggna

SEQ ID NO: 10106 - DNA, 554 bp, Homo sapiens
  misc_feature (495)..(495): "n" may be a, t, c, g, other or unknown
  misc_feature (533)..(533): "n" may be a, t, c, g, other or unknown
  misc_feature (554)..(554): "n" may be a, t, c, g, other or unknown
gagatggggtcccgctgtgttgcccaggttggagtgcagtggtgcgatcttggctcactgcaacctccgcctcacgggttcaaggattcttctgcctcagcctcctgagtagctgggactacaggtgcgcaccaccacacccagctaattttttttgtatttttagtagagacagggtttcaccatattggccaggctggtctccaactcctgacctcatgatccgcccgcctcgacctcccaaagtgctgggattacaggcatgagccaccacacccggcaatttttgtattttttgtagagacgggggtcttgctatgttgtccgggctggtcttaaactcctgacctcgagcagtcctcccaccttggcctcccaaagtgctgggattatagacatgaggcacggagcctggctctgtctccctctttaatgagtaaattttacaaattgccaacctaccactagttagtacacagtgactgtagttgtcanaagcttaaacgtgtatctgggcatccgggttcttctgntttctggggagcactttcctn

SEQ ID NO: 10107 - DNA, 539 bp, Homo sapiens
  misc_feature (432)..(432): "n" may be a, t, c, g, other or unknown
  misc_feature (445)..(445): "n" may be a, t, c, g, other or unknown
  misc_feature (456)..(456): "n" may be a, t, c, g, other or unknown
  misc_feature (460)..(460): "n" may be a, t, c, g, other or unknown
  misc_feature (465)..(465): "n" may be a, t, c, g, other or unknown
  misc_feature (513)..(513): "n" may be a, t, c, g, other or unknown
  misc_feature (539)..(539): "n" may be a, t, c, g, other or unknown
gagatggagtctcgccctgttgcccaggctggagtgcagtggcacaatctcggctcactgcaacctccacctcctgggttcaagcgattctcctgccttagcctcccgagtagcttggattacaggcaaccgccaccacgcccggctaatttctgtatttttagtagagacagggtttcaccatattggccaggctggtctcgaactcctgaccttatgatcccgccacagcctcccaaagtgttgggattacaggcatgagccactgcacccggcctgtgagttacttatttgtttcgtgtattatctgtctcatccccactagaaagtcagctccatgaaggcagcaatgtttgtctactttgttccctgttgtctccaaagtgtctagaacagagctttgggcctgggtggccctcacaaacagtaacngaatgaatgaacncagacaagganaaanggctntgaaccaaacttacaggaggcacacttcagttaaaactggtcaatggntttcacttgcacttgaagtaaaggan

SEQ ID NO: 10108 - DNA, 539 bp, Homo sapiens
  misc_feature (405)..(405): "n" may be a, t, c, g, other or unknown
  misc_feature (414)..(414): "n" may be a, t, c, g, other or unknown
  misc_feature (455)..(455): "n" may be a, t, c, g, other or unknown
  misc_feature (463)..(463): "n" may be a, t, c, g, other or unknown
  misc_feature (521)..(521): "n" may be a, t, c, g, other or unknown
  misc_feature (524)..(524): "n" may be a, t, c, g, other or unknown
gagacagagtcttgctctgttgcccaggctggggtgcaatggcgcgatctcagctcactgcaacctccacctcctgggttcaagtgattctcctgcctcagcctccctgggattacaggtgcacgccaccacacccagctaatttttgcatttttagtagagatgggatttcaccataatggccaggctggtctcgaactcctgacctcaagtgatccacctgcctcggcctcccaaagtgctgggattacaggcatgagccactgcactcggcctccaacattccactattccagataatgagaggctttgagtctacagggcattctggggttacttctatctctttgagcctatgactgtagaatgtaggatgtgaggttctagaatccttttatgaagccngaggaatgnccctttaactttccatggccctcaagtgtgtgggcttctgntgcaaggnctcatgtcttaagtgagggctaaagtcaaggactcatgggctatggcaaggcaaaaanctnaagccgaattaactt

SEQ ID NO: 10109 - DNA, 439 bp, Homo sapiens
  misc_feature (48)..(48): "n" may be a, t, c, g, other or unknown
  misc_feature (409)..(409): "n" may be a, t, c, g, other or unknown
  misc_feature (419)..(419): "n" may be a, t, c, g, other or unknown
  misc_feature (424)..(424): "n" may be a, t, c, g, other or unknown
  misc_feature (430)..(430): "n" may be a, t, c, g, other or unknown
  misc_feature (434)..(434): "n" may be a, t, c, g, other or unknown
  misc_feature (437)..(437): "n" may be a, t, c, g, other or unknown
  misc_feature (439)..(439): "n" may be a, t, c, g, other or unknown
aaacagcacttgagtatataattagttcaacgtaaaaccatccatctnggccttggcgaggagccctgccttctccatgccccggctgtaggctctgctgccttgaatatccacctcccacaggtgctggtcgtaggctggatgtgttgaatttctccatgatggggtccactgcacccactgtggccaggagagcagaacaactagtctctcctccaccatccagaacagtgcctcttgcagagtctcctcgggaaacttaccaagtctgatggtaacaggggcatgggaccatcctaactgggaagacaaaaaggctgagaccttcccagagtcaccttgggagtgagcatgggaacatggctgaacaccaagacagagccaggctggactgcagtagtgcaacctnggcccactgnacctncgcctnccgnttnan

SEQ ID NO: 10110 - DNA, 548 bp, Homo sapiens
  misc_feature (520)..(520): "n" may be a, t, c, g, other or unknown
agctcatctgctatggttagtgttagtgtactttatgtgtgacccaagacaattcttcttttcccaaggtgccacagggaagccaaaagattggacaccctgttctagatcatcccatccagtagtgttcaaacttttatttttacagctaaattcctcaagcagatgggctcctgtgtggaatcacaatgatgctggttaagattcactgaatgcttgctatatatcaggctctgtttggagcccagcatatatatatatataatctcagttaatcccacagtacctgatgagggaggtactgctgtttgtcccatttattttttatttatttattttattttattttttttgagatggagtttcactcttgttgcccaggctggggtgcaatggcgcaatctcggctcaccacaacctccgcctcccaggttcaagcaattctcctgcctcagccttccaagtagctgggattacaggcacgcaccaccatgcccgggtaatttggtatcttttttantagaaaatggggttctccatggttggtc

SEQ ID NO: 10111 - DNA, 546 bp, Homo sapiens
  misc_feature (465)..(465): "n" may be a, t, c, g, other or unknown
  misc_feature (488)..(488): "n" may be a, t, c, g, other or unknown
  misc_feature (514)..(515): "n" may be a, t, c, g, other or unknown
  misc_feature (529)..(529): "n" may be a, t, c, g, other or unknown
  misc_feature (538)..(538): "n" may be a, t, c, g, other or unknown
  misc_feature (546)..(546): "n" may be a, t, c, g, other or unknown
gtttttggtgtttttaattgtttttgttaatgtaaaaacagaaccatcacagccgctcagctctataacccatccagcccaagactgttctagtggtgaaaccaagagtagacaggtcttcctacctcagtgacctcaaaacacaaggacatctccatagggcatcaacatgcatctgtcatccaagaatctaagaacttcctgatccttccacattttctatcaataatattgccttctgaggttatggattccaggtcttctatgaaataggtaaagcttcctttcgcgttccaagaaatatagtttgcgaagggaactggaaaacgtgactctaggcctcagccacttcctctgttaccctgtgcaagttgtagaacaatccacgttctcacagctccccttcttcaagttgtggagttcttcaaggtggacagatcacacctcaggaagtcattccttggnagcccactagaattatcataaangcagtccggcttggtagttttcttgnncccagcatcactgngccaccacntaagtctn

SEQ ID NO: 10112 - DNA, 549 bp, Homo sapiens
  misc_feature (448)..(448): "n" may be a, t, c, g, other or unknown
  misc_feature (451)..(451): "n" may be a, t, c, g, other or unknown
  misc_feature (479)..(479): "n" may be a, t, c, g, other or unknown
  misc_feature (497)..(497): "n" may be a, t, c, g, other or unknown
  misc_feature (521)..(521): "n" may be a, t, c, g, other or unknown
  misc_feature (528)..(528): "n" may be a, t, c, g, other or unknown
gttttttcaaaactgcttttatttgtagcaattcatgttcattcaacaaacagtgattgattatatgagagcacctgacaccaggtactgacgcttatgagcaagacaccttgtcaaccatagggagactggatgaggatttatataactcaggtgtatgaccaagtctcccttgtctgacaggccttattatgaatgagtgtggtagtgagtaagctctaagacagcccccagggatcccagtctcctggtgctcacacccttgagagttcctctgctcctgagtgtggatgaaacctgtgacttccttctaaccatcagaatccagcaaagaccgcgggatgtcacttccatgattacactgcacaaggttgtaactgctgtcttgttagactctccactgccttcttggtttacatgctttgatgaaggaagtggccatgttgangangttcacgtggaaacaaactgaaggtggncttcacagatggacagtnccaactaagggcctcaatccatcncttggangggaaccaaatcccacaacct

SEQ ID NO: 10113 - DNA, 466 bp, Homo sapiens
  misc_feature (450)..(450): "n" may be a, t, c, g, other or unknown
  misc_feature (452)..(452): "n" may be a, t, c, g, other or unknown
  misc_feature (457)..(457): "n" may be a, t, c, g, other or unknown
  misc_feature (459)..(460): "n" may be a, t, c, g, other or unknown
  misc_feature (464)..(464): "n" may be a, t, c, g, other or unknown
  misc_feature (466)..(466): "n" may be a, t, c, g, other or unknown
agatcgaatttcactctgtgacccaggctggaatgcactggcacgaattcagctccctgcagcatggacctcccaggttcaagtgatcttcccacctaagactactgagtagctaggaccacaggtgtgtcccaccatgcctggctaatgattttttttttttttttgctagacacagggtctcaacatgttgcccaggctggtcttgaactcctgggctcaagcgatcctcccacctcagcctcccaaagtgctgttataagcatgtgccacccaccactctggccttgatactcttttggtaaaaaatatactagtattagcattctgtggccaggaatggtggctcacatccatctgtaatcccagcattttgggacgccaaggccggaggattgcttgagcccaggagtttgagaccagtttggagaatatggcacactgtttctncnaaaantnnattntn

SEQ ID NO: 10114 - DNA, 547 bp, Homo sapiens
  misc_feature (482)..(482): "n" may be a, t, c, g, other or unknown
  misc_feature (514)..(514): "n" may be a, t, c, g, other or unknown
  misc_feature (519)..(519): "n" may be a, t, c, g, other or unknown
  misc_feature (531)..(531): "n" may be a, t, c, g, other or unknown
  misc_feature (535)..(535): "n" may be a, t, c, g, other or unknown
catctttgaagtcctttattcccagcagttcacatcagttactcattgagctggggttcgtcatattaaccaagaattcattcatctttcttttgatattgtaatcttgtcctcatctccacaactgagttggggcctgaggggtttaagagttctcactccatcacaggaggcaaggggtacccttgtgaaccagacttcaactcctggaagtcttgttcagttcataggcaaatatctttgcaagtttagtatgagacagcccaacggttaaataaataagacacagtgccatggttctaggcatttggagagggaaaaggcacattacacagattcccctggagaaaatacaggccattctcatcttctcaacatgcattttcccactcttcagcgacttttaatcttatcccctggtctatgagaaaccataacccacgtgctactgaatacatttttattttcccttcatgacatanacttgggttccagtatattttaatttcctccntatgnctacaagacatncaantttggtcagggc

SEQ ID NO: 10115 - DNA, 553 bp, Homo sapiens
  misc_feature (489)..(489): "n" may be a, t, c, g, other or unknown
  misc_feature (507)..(507): "n" may be a, t, c, g, other or unknown
  misc_feature (540)..(540): "n" may be a, t, c, g, other or unknown
agagaaagtctggaggtttactcaacaacgttcacaatcacaattgtacatggtaaatcagtctttcacaaaggcttatttttccaggcaggaggagaggctggtggtcttgagcttttggcctggaattccagtctgaattttcaaatattccctgcctccaacccctttgggatcctagtcttcaagccaataacagagcaggagtctgaccctgttctgttgcctggcatggctgaatcaaagccattctggaagcagatgttaaggtgaacttgtcacttggtatgtaggtccgactcccatcccagaggtggcagtgggccttggctcaagatcaagtttgaactaaaatattacttggatttttcacaaagagtgtccgttgaaagcaataaggaattccagaacagaactgcacttcttgtccctctctcacacttacaaagcttcagaaaacattaaaaatgcattacctctaggaattcnaaagatcacccaactgtncaaactagatatcgctgaagcagaaactctgantcctcagtactac

SEQ ID NO: 10116 - DNA, 578 bp, Homo sapiens
  misc_feature (520)..(520): "n" may be a, t, c, g, other or unknown
  misc_feature (537)..(537): "n" may be a, t, c, g, other or unknown
  misc_feature (552)..(552): "n" may be a, t, c, g, other or unknown
  misc_feature (562)..(562): "n" may be a, t, c, g, other or unknown
  misc_feature (575)..(575): "n" may be a, t, c, g, other or unknown
cttttttttttttttgcctcagagtttctcaagctttctgactttgatcaacagtctaccaaggatatactttaaaattttacagtaatcaatatcataacagcagctaacagtacactgggtgaggatggtacttaaataattatttattgagttgcttacagaagagaggtctcccaagtcccaaatcaacttcacaaatattttattagtacttacaatatacaaaaacctttttctaagctctgccctacagattaataaaaaggagcttaaaatgaagggaaggagagagaaaaagacaaaagattaatacacaagttatggtacttctaagcaggaaagaagctgcttaacttggttgggatgggagaggggtggtttcaagccagaagctgaacagcatgttgagatgctaaaataaggaagatattccagaaagaggacaggcacagaatctccacgtgaaatttcctgtagactagtaagaaaatcaagtgagatcaacaggagaaagatntaagaagaaaactccanggccaggcacacggntcatgcctgnaatccagcctttngga

SEQ ID NO: 10117 - DNA, 560 bp, Homo sapiens
  misc_feature (559)..(559): "n" may be a, t, c, g, other or unknown
ccattaatctttctggagaacctagatcctaagtcgaaaaacctactgaagtatatcacaacctgtaagtaggtacagatgtctgaggcctatttagaacaacagtgttagaaaggcgcttccttacctgttagacaaaggcgacttccggccaaacccaattgcccccaggatcccagagctgagtctctcctcagccacgaggttctgcctgctctgaaccaagagcagaattcgaatgacagattctgtcaggacggagtcattctgctctgtctgaatgagggagagctgaaggacttggtgccaccacaaaaacagctttgcctcttcctccacggagcttgggtacacctgttccagccacttgcttaagatgagcagcactttcatttcattccttaaagtctgttcgctgtttaaacactgaagcaagtagacgtaaagagtcaagtaactgcccaaggtgaggcactcctgcaggaactcttccatggtgagctcgggaacctgaagggatccagaatgggtccccatcctgaatctgatggagagggcnt

SEQ ID NO: 10118 - DNA, 569 bp, Homo sapiens
  misc_feature (486)..(486): "n" may be a, t, c, g, other or unknown
  misc_feature (542)..(542): "n" may be a, t, c, g, other or unknown
  misc_feature (545)..(545): "n" may be a, t, c, g, other or unknown
  misc_feature (554)..(554): "n" may be a, t, c, g, other or unknown
  misc_feature (566)..(566): "n" may be a, t, c, g, other or unknown
  misc_feature (568)..(568): "n" may be a, t, c, g, other or unknown
gagacggagtctcgctctgtcacccaggctgggatgcagtggcgcaatctcggctcaccgcaagctccacctcccgggttctcgccattctcctgcctcagcctcctgagtagctgggactacaggctcctgccaccacgcccggctaattttttgtgtttttagtagagatagggtttcaccatgttagccaggatggtctcaatctcctgacctcgtgatcggcccacctcggcctcccaaagtgctgggattacaggcgtgagccaccgtgcacggccaattattttatttttcaaacctaagaggagctcccaatatgaaagtattgtcagcaagttttctcataaaatgagaaatcttgtaaattaaacaaatcacaaattggcctgctttgcacatccagagtttcatgacctctagctaataaagatgcccatgtttgctcaggtcaccatgtgttgggctcctggctgggcatttcangcacatccatgctatcatcatccctattcttcaagtgaaggatacttggggctcanaanaggttcggngacttggctaangnc

SEQ ID NO: 10119 - DNA, 437 bp, Homo sapiens
  misc_feature (260)..(260): "n" may be a, t, c, g, other or unknown
  misc_feature (300)..(300): "n" may be a, t, c, g, other or unknown
  misc_feature (397)..(397): "n" may be a, t, c, g, other or unknown
  misc_feature (400)..(400): "n" may be a, t, c, g, other or unknown
  misc_feature (416)..(416): "n" may be a, t, c, g, other or unknown
  misc_feature (426)..(426): "n" may be a, t, c, g, other or unknown
  misc_feature (429)..(429): "n" may be a, t, c, g, other or unknown
  misc_feature (432)..(432): "n" may be a, t, c, g, other or unknown
  misc_feature (436)..(436): "n" may be a, t, c, g, other or unknown
gaaattttaaagctgggtgtccagggcagacatcacatgttggcaggttctgtgatgccccctgagccataaaaccagcaaattttttattagtgattttcaaaaggggagggagtgtccaaatagggtatgggtcacagagatcccatgcttcacaaggtaataagatttcacagggtaaatggaggcagggcgagatcacaggaccacaggactggggtgaaattaaaattgctaatgaagtttcgggcatgcattgncattgataacatcttatcaggagacagggtttgagagcanacaactggtctgaccaaaatttattaggcaggaatttcctcgtcctaataagcctgggagcactctgagaaactggggcttatttcatccccacagntgngaccataaaagacagntgccctgaancanccntttna

SEQ ID NO: 10120 - DNA, 554 bp, Homo sapiens
  misc_feature (16)..(16): "n" may be a, t, c, g, other or unknown
  misc_feature (35)..(35): "n" may be a, t, c, g, other or unknown
  misc_feature (56)..(56): "n" may be a, t, c, g, other or unknown
  misc_feature (63)..(63): "n" may be a, t, c, g, other or unknown
  misc_feature (113)..(113): "n" may be a, t, c, g, other or unknown
  misc_feature (207)..(207): "n" may be a, t, c, g, other or unknown
  misc_feature (330)..(330): "n" may be a, t, c, g, other or unknown
  misc_feature (518)..(518): "n" may be a, t, c, g, other or unknown
cattttactgcatttngctttattgcgctctgcanatagtacattttttacaaagngatttgnggaaaccctgcagcgagcaagtctattagcacatttttccaatagtatgngctcacttcatgtctctgcgtcacattctggtaattcttacaatatttcaaactttttcattatcatcatatctgttatgatgatctgatcagngatctttgacattactattgtaatagttttggacaccacaaaccatgcccatataagacagcaaacttaattaataaatgttgtacttgttctaaccgctccatcaacaggccatttccctgnctctctccctctcttcaggcctcccattccctaagacacaatattgaaattaggccaattaataaccttttgatagcctctaagtgttcaactgaaagagttacaggatctcacactttaaagcaaaagctagaaacgattaaagctttgagaaaaaggcatgccaaaaatggagataggccaaaagnggagctctttggaccaattagccaagtgggaaaagg

SEQ ID NO: 10121 - DNA, 562 bp, Homo sapiens
  misc_feature (491)..(491): "n" may be a, t, c, g, other or unknown
  misc_feature (545)..(545): "n" may be a, t, c, g, other or unknown
  misc_feature (557)..(557): "n" may be a, t, c, g, other or unknown
gaggactgcaaggcacaactgtgcagacaggcagagaagcctcagcacctgtgggaaaggaacgaatccatttctgtctgctcatttcccacccatgagtgtggacagccttcctgtccctggagtgtccaggcctgcctggactgagtctgtccctctccctccccttgcaaaggctgagagtgttctggatgtggctctgaaagaatgccaaggtctatcaggtgggtccaccacagccctagcccaggatgtccctcacctgtgtccattcccccagcaaagtcctcatcataggagtcatcagtggagtcctcgccatccaccgaagaccatgctcggagcttggcttccgcgatggcaaactgctcagccactcctgtcgcagggacagaatgcataagcagagaaggtgagttaagtctagggctcagcttgaagacaggagagaggagaaacagggtatgggaagactccaacccccatgtcanacccgaggagataaagaaagcaccctggccggtgtggtggcttaagcctggaancccagcactttnggaag

SEQ ID NO: 10122 - DNA, 386 bp, Homo sapiens
  misc_feature (43)..(43): "n" may be a, t, c, g, other or unknown
  misc_feature (298)..(298): "n" may be a, t, c, g, other or unknown
  misc_feature (345)..(345): "n" may be a, t, c, g, other or unknown
  misc_feature (363)..(364): "n" may be a, t, c, g, other or unknown
  misc_feature (372)..(372): "n" may be a, t, c, g, other or unknown
  misc_feature (382)..(382): "n" may be a, t, c, g, other or unknown
  misc_feature (386)..(386): "n" may be a, t, c, g, other or unknown
atcattttatgaactttaaccatagcaaatgggtttttacggnagtcataaaatcaacattaccacatatacaaaggacaagaccccagtttggcatacaaaaataccatatattaaaattgggttcattggaaaactcaggactggctaaaacaccatctataacagagagagcaagcaagaatgcttttaagacattcagatttataaacagcagcttgatatcccctttacgaagtcaatatttggcaacatttggacaatattttctacacagcccagcagctcatttatctgnagggctatttggcccttaaaaaaaaaaaaaaaaaaaaaaaaaaagcncctaaaataaataatccnnataattgnaaatgaaacncatn

SEQ ID NO: 10123 - DNA, 546 bp, Homo sapiens
  misc_feature (356)..(356): "n" may be a, t, c, g, other or unknown
  misc_feature (495)..(495): "n" may be a, t, c, g, other or unknown
gggatggagtcttgctgttgcccaggctggagtgcagtggcacaatctccgcttactgcaacctccacctcccaggttcaagcagttctcctgcctcagactcccaagtacctgggattacaggtgtgtgccaccacactcagctaattgtttttttatttatttttgagatggagtgtcgctctcttgcccaggctggagtgcagtggcgccatctcggctgactgcaagctctgcctcctgggttcatgccattctcctgcctcagcctcctgagtagctgggactacaggtgcccgccgccatgcccggctttttttattttttttttttttttttttgtagttttggtaganacggggtttcaccgtgttagcccggatggtcttgatctcctgacctcatgacctcatgacctgtccgcctcggcctcccaaagtgctaggattacaggcatgagccactgtgcccggcttggattggattttagcaganacggggtttcactatgttggccaagctggctcaaactggtgactcaaagaa

SEQ ID NO: 10124 - DNA, 556 bp, Homo sapiens
gtaaatccaaactacacctagaaaactgctttctgaaacattccttagtctgtggctcacctaataatcctcactcaaccttatcaggaggtaaggattctgtctgaactcaggatccatttggatcggtggcctacctatgggcaatgagaggaatcatattaactgtcactgtccatcctctgagtctttgtagtttgtagtaaaatacatactgtcccatataaaaaatgagaattgtgttaccctaaatgtcagataatttggtgtttcccagctctccagctctaaagaatctctgctgggtatccctttatgtctggaaggagactgtcagcttctggtatctgagacctgtgtgccctataacatctagttatggctatcgttcttaactagtttagggatacctttctgtaggaattaagagtaaacacagatcttcagaggcaagagttttagaacttattgaagacttttggcatatggaaacttcattcaacaaagagtgccccttaaaaaaaatctctactggcattgggtatggggatctgcc

SEQ ID NO: 10125 - DNA, 544 bp, Homo sapiens
  misc_feature (167)..(167): "n" may be a, t, c, g, other or unknown
  misc_feature (320)..(320): "n" may be a, t, c, g, other or unknown
  misc_feature (351)..(351): "n" may be a, t, c, g, other or unknown
  misc_feature (495)..(495): "n" may be a, t, c, g, other or unknown
  misc_feature (497)..(497): "n" may be a, t, c, g, other or unknown
  misc_feature (515)..(515): "n" may be a, t, c, g, other or unknown
  misc_feature (544)..(544): "n" may be a, t, c, g, other or unknown
gagactgagtctcactctgtcacccaggctggagtgcagtagtgcaatcttggtttacagaaacttccgcctcctgagttcaagcaattttcctgtcgcagcctcctgagtagttgggattacaggcacctgccaccatgcccggctaatttttgtatttttagganagatagggtttcgccatgttggccaggctggtcttgaattcctgacctcaggtgatccactcacctcggcctcccaaagtgctgggattataggtgtgagccaccttgtccggcccaaactgacattttatagggatttttcatccttaaagngatctactcagctcatttcttccaaatctgnattttacagcacactttaaactggtgccgcagagtttttgagtggtgatggcagctgccctctatgtctgtggtgtgccggcccctcatgctggggaaagaggggacgtgaccctacccttacagcaggctggcctcctttctntnccaaactggcggccctgntctgggctaactagcccaatcctagcctn

SEQ ID NO: 10126 - DNA, 559 bp, Homo sapiens
  misc_feature (493)..(493): "n" may be a, t, c, g, other or unknown
  misc_feature (525)..(525): "n" may be a, t, c, g, other or unknown
  misc_feature (550)..(550): "n" may be a, t, c, g, other or unknown
  misc_feature (555)..(555): "n" may be a, t, c, g, other or unknown
gagatggagtttcactcttgttgcccaggctggagtgcaatggcacgatttcggctcactgcaacctctgcctccccggttcaagcgattctcctgcctcagcctcccgagtagctggaattacaggcgtccaccaccatgcccagctaattttttgtatttctagtagagatggggttccaccatattggccaggctggtctcaaactcctgacctcaggtgatccactcgccttggcctcccaaagtgctgggattacaggcgtgagccaccgcccctggccaaggccctactttctaaaagaggaaaactgagaccaaggaagggtaatgagcacatctgtttctccactcaaggccagcggtgagaaacggcagagccgggcaccggtaccttggcttcaggcaagtcacccagcacctctgggcttcatactccgtttggaaaatgcggatgacaagaacatcccccatccagcggtcccactctggngaatttattctaaaagggaaaatccaacaggntttggtctggggatgagtcatcgangcttnatta

SEQ ID NO: 10127 - DNA, 572 bp, Homo sapiens
  misc_feature (543)..(543): "n" may be a, t, c, g, other or unknown
  misc_feature (548)..(548): "n" may be a, t, c, g, other or unknown
  misc_feature (572)..(572): "n" may be a, t, c, g, other or unknown
catgaagaccagtttattttacatgcttgctttcacattctttactgggaatttaaggccttttttcagccttaacttgtataccaacctcaaggattttgtttgatacagaaaaggatagggctgggcccttctgccaaggactgataacctgcctgccaaaaggaagagggaatgaaagccttttgtccttctaggccccttacagtacctcaaaatctaaaggccttaaaggggaaaaaaaccgtatctgttctttctccttatctcctacccttctctttaagcatattgaagatggacttttttccaaatgtttatttgtaggaagaggtgatgagcgcaggccagcagctgagaacttacagctttgatgcaccaggaactgtattcaagctgagggcaaaagcctcctagggagggagccaggtccaccaaggccagagacagacagggcgagactgtggaaggccagggagatgctgcctggtaaatgctcagctggcctactgggcaagtcctctgggggttctagagctgatnggaanaaggagtcattttgatagtcccgn

SEQ ID NO: 10128 - DNA, 566 bp, Homo sapiens
  misc_feature (487)..(487): "n" may be a, t, c, g, other or unknown
  misc_feature (507)..(507): "n" may be a, t, c, g, other or unknown
  misc_feature (564)..(564): "n" may be a, t, c, g, other or unknown
gagagtctcgctctgttgcccaggctggagtgcagtggcgcgatcatggctcactgcaacctccgaccccggcgttcaagcaattctcctgcctcagcctccctagtagttgggattacaggcatgcgctaccaagcccagctaatttttgtgttattagtagagagggtgtttcaccatgttggccaggttggtctcgaattcctgacctcaagtgatccgctcgctcgcctctctaccttccaaaattctggaattacaggtgtgagccaccacgcccggccagggatgtggttttataaactatgaactaactctccatgctatgttgttcttgttaattcatttctctcatagataattaaaaacaaaaaacaagaaaacaaaatccaacaagcaggcataagattatatgggagctttattaactaaatgccctaggttatattcaaagcagaatcacccagcactcctcaggagactgcancatggggtaaaattgggtgnactttgaggacattttggatatcctaatgaaacatggaccttcctggggttcttaangc

SEQ ID NO: 10129 - DNA, 568 bp, Homo sapiens
  misc_feature (485)..(485): "n" may be a, t, c, g, other or unknown
  misc_feature (537)..(537): "n" may be a, t, c, g, other or unknown
  misc_feature (562)..(562): "n" may be a, t, c, g, other or unknown
ctgagacagagtcttgctctgttgcccaggctggagtgcagtggcacgatctcggctcactgcaacctctgcctcccgggtttaagtgattctcctgcctcagcctgtggagtagttgggattacaggcgcataccaccatgcccagctaatttttgaatttttagtagagatggggtttcatcatgttagccaggctggtctcgaactcctgacctcatgattcacctgcttcggcctcccaaagtgctgggattacaggtgtgggccaccacacccggccaaggaaaacttttaaaaaataagtttagtgtcacctaagtctacagtggttataaagtccacagtagtggacagtaatgtcacaggccttcacattcactcaccatccactcatttactcacccagagcaaattctagtcctgtattacaagctccactcatgggaaccatttttaaaatcttttataccatatttttcctgngccatttctatggttagatactgaatccatcggcttcaattgcctgtagtantcaaggacaatcacatgcttgacanggttgg

SEQ ID NO: 10130 - DNA, 550 bp, Homo sapiens
  misc_feature (109)..(109): "n" may be a, t, c, g, other or unknown
  misc_feature (124)..(124): "n" may be a, t, c, g, other or unknown
  misc_feature (136)..(136): "n" may be a, t, c, g, other or unknown
  misc_feature (157)..(157): "n" may be a, t, c, g, other or unknown
  misc_feature (222)..(222): "n" may be a, t, c, g, other or unknown
  misc_feature (349)..(349): "n" may be a, t, c, g, other or unknown
  misc_feature (357)..(357): "n" may be a, t, c, g, other or unknown
  misc_feature (432)..(432): "n" may be a, t, c, g, other or unknown
  misc_feature (453)..(453): "n" may be a, t, c, g, other or unknown
  misc_feature (503)..(503): "n" may be a, t, c, g, other or unknown
  misc_feature (509)..(509): "n" may be a, t, c, g, other or unknown
  misc_feature (514)..(514): "n" may be a, t, c, g, other or unknown
  misc_feature (524)..(524): "n" may be a, t, c, g, other or unknown
  misc_feature (537)..(537): "n" may be a, t, c, g, other or unknown
ggatcataagtatcttcaagaccaaaataattttctactcctgagcatgctcattggtcaaaggaaggaaggaatcataatagcgttaataaggctagcgtcttttcanaagttggttctttgngccagtcttggngctagacacaccgataggaanaaaactccttcacatccccaggacaccaacatgggatacgtttgatcatcattcttaatttgcanaaggagaaataggctcagtgagatgaaatagccactccagtggcaaggctgggactggaagccgggcttgtcctgattccaaatccagtttctttccactgccacggagacggagagaagggacagnggccccanatggggatggggtgactggatgtgggcaggcctgcgggggaagagtgccctctgttgagcatccgaatgatggcnccagaaaagaaaactgggcanaatcccagttattaaaatcccctgaggggaacaggtcaccccgacccctnaggcanaagangggggggaanacaaggcccatanatgaaggccctgg

SEQ ID NO: 10131 - DNA, 448 bp, Homo sapiens
  misc_feature (22)..(22): "n" may be a, t, c, g, other or unknown
  misc_feature (45)..(45): "n" may be a, t, c, g, other or unknown
  misc_feature (57)..(57): "n" may be a, t, c, g, other or unknown
  misc_feature (73)..(73): "n" may be a, t, c, g, other or unknown
  misc_feature (119)..(119): "n" may be a, t, c, g, other or unknown
  misc_feature (159)..(159): "n" may be a, t, c, g, other or unknown
  misc_feature (161)..(161): "n" may be a, t, c, g, other or unknown
  misc_feature (170)..(170): "n" may be a, t, c, g, other or unknown
  misc_feature (218)..(218): "n" may be a, t, c, g, other or unknown
  misc_feature (236)..(236): "n" may be a, t, c, g, other or unknown
  misc_feature (241)..(241): "n" may be a, t, c, g, other or unknown
  misc_feature (251)..(251): "n" may be a, t, c, g, other or unknown
  misc_feature (284)..(284): "n" may be a, t, c, g, other or unknown
  misc_feature (310)..(310): "n" may be a, t, c, g, other or unknown
  misc_feature (324)..(324): "n" may be a, t, c, g, other or unknown
  misc_feature (330)..(330): "n" may be a, t, c, g, other or unknown
  misc_feature (362)..(362): "n" may be a, t, c, g, other or unknown
  misc_feature (370)..(370): "n" may be a, t, c, g, other or unknown
  misc_feature (377)..(377): "n" may be a, t, c, g, other or unknown
  misc_feature (402)..(402): "n" may be a, t, c, g, other or unknown
  misc_feature (423)..(423): "n" may be a, t, c, g, other or unknown
  misc_feature (441)..(441): "n" may be a, t, c, g, other or unknown
  misc_feature (444)..(444): "n" may be a, t, c, g, other or unknown
ggtttttttttttttaaacatntacttatttccattttaatgaanaattaaaggatncaatgggttaaagacncatttaaaatactagcaagggattagacagacgaatcaaattttgntgatatcccaaataattacaagagacttcgaaaatgtagngnaattcaggntttctttccagtttaaaaatttctatccattgcctctatctttggggncactgccaccaataaacncagtntacagcttanaaacctaattactatcttcaactaggaaaaggnaaaccaacatcatttctttaaaatgngaaataaagaatgngatcgnacttaattttggctcatgggcccacaatactntgaaatgncatgccnaaatgtaaaagttcaaaagggaacnttatcatttgctataattgcnccaaaaatttagctctgnacnctgg

SEQ ID NO: 10132 - DNA, 569 bp, Homo sapiens
  misc_feature (497)..(497): "n" may be a, t, c, g, other or unknown
  misc_feature (515)..(515): "n" may be a, t, c, g, other or unknown
  misc_feature (560)..(560): "n" may be a, t, c, g, other or unknown
  misc_feature (563)..(563): "n" may be a, t, c, g, other or unknown
acagtacatgaatgttttattcttcataaagtgcttaaaacatgaagaagaagctctttataaagagccttaactaggaagacaaacagcaaagcagaaccatgcctgcaccctgcccaacccacctgcaactttcctccaagtgtggctcggagaagaaacatcaacaaggaccctgggcttcgattcaaaaactcctctgaagccatccatgccctgggcattagggaggcccacaaaggtcagggccagggctgggagtgaataaagcccagaggaatccccagtagggggggtgactccccctctctcagaaaagatacttacttctctaatacccaatgacccccaaaagcatgactgaaaccctggggaacagtggatacttttctcagatttgatgagtggagtttaaggtaggtaaccgttacaggggctttcctccatgtgtggcgctcctctgctccatcctggcagcagacagacatcacccaganggcacgtgtctgcctgangcctttcaaaagcaagcccacaaggccctttcttgaaaaaatggnggncccaaa

SEQ ID NO: 10133 - DNA, 363 bp, Homo sapiens
  misc_feature (135)..(135): "n" may be a, t, c, g, other or unknown
  misc_feature (325)..(325): "n" may be a, t, c, g, other or unknown
  misc_feature (329)..(329): "n" may be a, t, c, g, other or unknown
  misc_feature (334)..(334): "n" may be a, t, c, g, other or unknown
  misc_feature (343)..(343): "n" may be a, t, c, g, other or unknown
  misc_feature (345)..(345): "n" may be a, t, c, g, other or unknown
  misc_feature (353)..(353): "n" may be a, t, c, g, other or unknown
  misc_feature (363)..(363): "n" may be a, t, c, g, other or unknown
cccattgggtgacagcgtttattgaaaggaaatcttgctttatccaggaattcactcacatggaggtagctgcaaggagaatgtctctttctcatgacaaccaaagcgaccaaaccataccctaaagcagagacncaatggaataagtcaacgggcattgtagaacgacgctcagaagcaggaaaaaccataaaagatacaggatgattgtctcttcagtattgcatttggccatgtatgtgtttttacataaaatatatgttttctttttaagctagctaaagaaaatactcttgatcggggttagttcttaaagcaaaaaacngaanaaaangttggatananaataaaantaaagaaccn

SEQ ID NO: 10134 - DNA, 433 bp, Homo sapiens
  misc_feature (348)..(348): "n" may be a, t, c, g, other or unknown
  misc_feature (363)..(363): "n" may be a, t, c, g, other or unknown
  misc_feature (386)..(386): "n" may be a, t, c, g, other or unknown
  misc_feature (402)..(402): "n" may be a, t, c, g, other or unknown
  misc_feature (405)..(405): "n" may be a, t, c, g, other or unknown
  misc_feature (419)..(419): "n" may be a, t, c, g, other or unknown
  misc_feature (423)..(423): "n" may be a, t, c, g, other or unknown
gcctcttttgttaaacagcaacagagctctgccactttggccaaccaccctcctttgtcctcttccttttccctcctgccaagtgtcctattctcaaaaggtctaaatcactgccttccagcttggtgggcaacctgctgggggccccaagtgaggtggggaggggctccctagctatttcccagtgacctctatcacatcatcgtctttatcctcatcatcattggagctgaacccaacctcggcaacctcatgagagtcaaatggaggcacctgggaccgtaggaggccaccagctgggtagcctgcatgtggggacatgtacctggatagatagaacatgccccncaaaaggttgttggncaaaacagggaaaggaaaaggcncaaacatcctgggttngancagaattggctggnaaantggaagtgaa

SEQ ID NO: 10135 - DNA, 551 bp, Homo sapiens
  misc_feature (390)..(390): "n" may be a, t, c, g, other or unknown
  misc_feature (392)..(392): "n" may be a, t, c, g, other or unknown
  misc_feature (427)..(427): "n" may be a, t, c, g, other or unknown
  misc_feature (441)..(441): "n" may be a, t, c, g, other or unknown
  misc_feature (467)..(467): "n" may be a, t, c, g, other or unknown
  misc_feature (478)..(478): "n" may be a, t, c, g, other or unknown
  misc_feature (503)..(503): "n" may be a, t, c, g, other or unknown
  misc_feature (526)..(526): "n" may be a, t, c, g, other or unknown
  misc_feature (533)..(533): "n" may be a, t, c, g, other or unknown
  misc_feature (538)..(538): "n" may be a, t, c, g, other or unknown
ctttgtcgttgttttatttaaaatgttattgtctctgattagaaaatacagtcatgagggctaaaaactgaaatgatgtgaaaaggcatccattaagcagtgttgccccaccaccctctccatcagtcttgtctcatggggatggggaaaatgaagacagaacgctttgccttgctttgcaatccctcctttgaaggccttctgtcccaggaagccaatgttcatttgatgtggaagagggacctgtgtttaaccagaagctgtcctccctcatccctttcccatggcttacacgcagaagggagaggagatgaccagaggagaaatcagggggaagaaaaggcaacaggggaggcaaaggggaaaggagaggaatgcttaaaatatacngngaaatttgagtaggatctctactcaaagacttctntgggaagtgtccanaattgaccacccaggtgctgacggtngaaagaacccngacccaaaaccctggactagttgcnttaactccattagccctgagttncctttgnaaaangaaactggggggc

SEQ ID NO: 10136 - DNA, 543 bp, Homo sapiens
  misc_feature (440)..(440): "n" may be a, t, c, g, other or unknown
  misc_feature (514)..(514): "n" may be a, t, c, g, other or unknown
  misc_feature (536)..(536): "n" may be a, t, c, g, other or unknown
  misc_feature (538)..(538): "n" may be a, t, c, g, other or unknown
aacgtgaataatgctgttattagagttgaagagaagcccttagaaatgggacaaacattgtaattctcttagagaactgtaacttaaacagaaatacacttaatagaagaggaaagaaaatggttcatgtgacacaaaggtcccatgtgttgacttctttggtaagatcaaataagtatttaagcctagcaatagggtcagtccagttagtatttctcctcacaaatggtgaatatcaactccaggatggctggagttttctcatggtttggttccacgccatctgcatgtctttacaagtgataaaaaccggaattttccagctgctactagtcacagggggtccccaatatgggttgtttaattatgatgacgggtcctgtcaattgcatccagtaaaattggtcacatagagaactcatctaaaactgagggtttgntgtggttttgaaaggccattggaatccagatttgcaaagcatgtcaaggtatggcaaaacatatgccacccatnttaaaaactttccttataatgnangactt

SEQ ID NO: 10137 - DNA, 554 bp, Homo sapiens
  misc_feature (541)..(541): "n" may be a, t, c, g, other or unknown
  misc_feature (554)..(554): "n" may be a, t, c, g, other or unknown
ccttttaatgataatgatttaacttagaaatctgttgtgaaacttttgtctagttttgcaattctcagatattccagtgcaaaaatagatcccgttacagacagcgtaaagtgcttggaatgagggccaatgatgaacaaagagcacaaaaacagcttcatcttagggtataagaagggataatagcatacctaaatccttatggaaatagaaacattctaagggggatgcaacaattttgaaaagaattagagcaatatttctacagtattacattattactagtagataataacaagggtacaaattaatgtctcaatatcaaagtgggttcagtattacatgacacatggctctttggaaaatattttacctgatatatacaaccacaagaagaaaacacagataaatggctttagtcaatgattactatacagtgaatgaatgatgtgcaacatttaatagtcacaaagcatttgctttcagtacagataatgaaatcagtagtgtgagggttggttggtttttaacaatgaattgngctggggcatttn

SEQ ID NO: 10138 - DNA, 549 bp, Homo sapiens
  misc_feature (408)..(408): "n" may be a, t, c, g, other or unknown
  misc_feature (451)..(453): "n" may be a, t, c, g, other or unknown
  misc_feature (505)..(505): "n" may be a, t, c, g, other or unknown
  misc_feature (514)..(514): "n" may be a, t, c, g, other or unknown
  misc_feature (529)..(529): "n" may be a, t, c, g, other or unknown
  misc_feature (548)..(548): "n" may be a, t, c, g, other or unknown
atgattattatggttaagaattttattatcaaaattattacatctcttgtgaaagttcaaatgttacagcaaggtgtaaacactccacttgagaaagaagtgatacttcttcccttccaagagttccccccaccccccgcccctacccccccaagaggtctggtcttgacagcaccctgcccacacagagtggctggggtctctgcacgtgccaggcagggtgagggccgcctgcccgctggcctctccccttggttaaatagccaaggggagaatgcaaaccccagcccaaatggagagacatttacatacgttttatataatatacaaagaaaccagcatcccaggcaacatgatttccactcccaatgctctcccagactgatgggtttgtgggggaaacaacanaaagaaaagtacactgctgaggtctcagcatttaaaaaaaaannnaaaaaaaatctcccctcatttgagcaaacacctgatttcgattttgaaaagngaaatttgnaacaagtcacacccnaagaggagaagactgtgcnt

SEQ ID NO: 10139 - DNA, 534 bp, Homo sapiens
  misc_feature (265)..(265): "n" may be a, t, c, g, other or unknown
  misc_feature (448)..(448): "n" may be a, t, c, g, other or unknown
  misc_feature (525)..(525): "n" may be a, t, c, g, other or unknown
aacaaaatacttattttattgttgtaaaattaaaaatagtagacaagcatatatacagttcccaagcagagcaatacaaatatataaattattgcagttttcaaagaaaatgtaacagccaaataattgcctacttttttgaaacaaacttggtttttaccacagcagtttcattttctttttccaaaagtcttaacacaattttgtaaagtaaatttctaacgccagagagattaagttcaatgaccatagtatatgctactgntttaaagcaaggttaacacacacacacacacacacacacacacacaaaatgggactgaacaaaagtcactacttaatactttctaaattgcctcttttggaggtacggtgaaagaaaaacattctagatgtgtctgaaagaaacaaggtcacacacttactaaaattcccctttgctttaagngtagttgagggaagttcaactaatcttaaccctttttgggaagaaggcaatactcatcttcatgaattttggttacnttggaaacc

SEQ ID NO: 10140 - DNA, 537 bp, Homo sapiens
  misc_feature (432)..(432): "n" may be a, t, c, g, other or unknown
  misc_feature (465)..(465): "n" may be a, t, c, g, other or unknown
  misc_feature (470)..(470): "n" may be a, t, c, g, other or unknown
  misc_feature (494)..(494): "n" may be a, t, c, g, other or unknown
  misc_feature (523)..(524): "n" may be a, t, c, g, other or unknown
  misc_feature (528)..(528): "n" may be a, t, c, g, other or unknown
acaaaggactgaagtcaaaccgccaaaagaaaaatgtattgtaacaacaaatagggtacaactttaaggaatgtacttttaaaattactatgagtttatcaataataacctttcatgttaagtcttccaatttttgtacataaaaatgattttcatcaaaccactgaaactatccattgtggatgtaaataaaataaccaagttcaatgtaagaaagcagcataaaacaaagtaaaacttgtgatttgcaaatcagcctgatgtaagtttgttgttgttgttgtttttttttgcctttgtagttgcagaaggtgagctctgttttagaaggagtcatttcattccccaattgaatttttactcatttaggctaaaatcacttcaaaagtttaaaatgagggtagaggaaataaaaaggaaaaaaagtaaacntataggtaagtttatcagatcactaaatgctanctttngaatatccaaccccagccaatgcntaaggtctttatgccatcctggatttggnntttntaaggggaa

SEQ ID NO: 10141 - DNA, 542 bp, Homo sapiens
  misc_feature (299)..(299): "n" may be a, t, c, g, other or unknown
  misc_feature (351)..(351): "n" may be a, t, c, g, other or unknown
  misc_feature (353)..(353): "n" may be a, t, c, g, other or unknown
  misc_feature (385)..(385): "n" may be a, t, c, g, other or unknown
  misc_feature (441)..(441): "n" may be a, t, c, g, other or unknown
  misc_feature (509)..(509): "n" may be a, t, c, g, other or unknown
  misc_feature (517)..(517): "n" may be a, t, c, g, other or unknown
  misc_feature (519)..(519): "n" may be a, t, c, g, other or unknown
  misc_feature (528)..(529): "n" may be a, t, c, g, other or unknown
ctcagagaattatttaataatagaattaccatacttttggcgcaaatgtgtccaacaccaatgtgacaagtacatatatcagaatcactctttcctcagagaatcacaccttcccttggctctgcctgtggatccaaatcaagcctgggtgtggctgacaataccagggcacggtttgcttcccggccctccatctctactgtttggctacagcttgagttcactaggcatcggctcccctctcaggccagccagcaagttgttagctgccaacaaggacatggtgttgcgggttctgngggtggcactgccaatgtggggcagaatcacacagttcttcagggtcatganangggtggtttgtaagcagtggttctgggctcgncacatccagtccagcagctgcaatcttaccactggccaagggctggtacaggtcgncctgggttacgaacgtcgcccctgggaatgacagtgggtgacatgggtacccccgaaaaatccttcgncaagccancntttgggggnnaacaactaccgat

SEQ ID NO: 10142 - DNA, 548 bp, Homo sapiens
  misc_feature (286)..(286): "n" may be a, t, c, g, other or unknown
  misc_feature (295)..(295): "n" may be a, t, c, g, other or unknown
  misc_feature (307)..(307): "n" may be a, t, c, g, other or unknown
  misc_feature (309)..(309): "n" may be a, t, c, g, other or unknown
  misc_feature (370)..(370): "n" may be a, t, c, g, other or unknown
  misc_feature (377)..(377): "n" may be a, t, c, g, other or unknown
  misc_feature (410)..(410): "n" may be a, t, c, g, other or unknown
  misc_feature (452)..(452): "n" may be a, t, c, g, other or unknown
  misc_feature (493)..(493): "n" may be a, t, c, g, other or unknown
  misc_feature (508)..(508): "n" may be a, t, c, g, other or unknown
  misc_feature (545)..(545): "n" may be a, t, c, g, other or unknown
gtgtgttaagtcacttgtttatttctcaagatgtgcacactcaagtatgaagctggccgggacaactcatggctcctaggtatgtacaggccctttgatggcttgggttacagacaacctcatagctggtgcaccacacacacgagataaaacaggaagcctaaaaaccccaagccacaccaagaaaaatgagagaggggagggcggggtaacaatgcagcatcccgcggagggaacttaatgcacaaggagggagaacagagggtggaaggcaagccaactttcncttcgcccncgcaactgctgngngggtgggcaagggactgagttcaacaagggcctttaggaaactttttggaatcgggtgaantctgatnaaaaaaccgggccacaatcgagggaacttttgnaaaggcttccacttggcttgaaactcctcctggaaggttttnagggcttttgtcggcagcttcgtaaatgggcatgtcgttgnggcggatgtcctcancgagagaccggaccagcctcccttttgggttactggnagg

SEQ ID NO: 10143 - DNA, 311 bp, Homo sapiens
  misc_feature (3)..(3): "n" may be a, t, c, g, other or unknown
  misc_feature (19)..(19): "n" may be a, t, c, g, other or unknown
  misc_feature (39)..(39): "n" may be a, t, c, g, other or unknown
  misc_feature (90)..(90): "n" may be a, t, c, g, other or unknown
  misc_feature (114)..(114): "n" may be a, t, c, g, other or unknown
  misc_feature (178)..(178): "n" may be a, t, c, g, other or unknown
  misc_feature (282)..(282): "n" may be a, t, c, g, other or unknown
  misc_feature (286)..(286): "n" may be a, t, c, g, other or unknown
  misc_feature (291)..(291): "n" may be a, t, c, g, other or unknown
  misc_feature (293)..(293): "n" may be a, t, c, g, other or unknown
  misc_feature (296)..(296): "n" may be a, t, c, g, other or unknown
  misc_feature (299)..(299): "n" may be a, t, c, g, other or unknown
  misc_feature (311)..(311): "n" may be a, t, c, g, other or unknown
agntagattctacctctgncacccaggcgggagtgcagnggcatgatctcggctcactggactccagcttaggcaacagagccagactgngtctcaaaaacaggaaagaaaacnaaagaaaatttggactattgccaattacaaatatttttagagaagaattcaaaatagtaactgnggatgatggaaacaatagttatgatagaagtctgatgaaacttcccagttcacaaggaaatttaattacttacgtgcagcattttaagacagtaatcagaatcntgantgggngnatnatnttagggcccccn

SEQ ID NO: 10144 - DNA, 554 bp, Homo sapiens
  misc_feature (373)..(373): "n" may be a, t, c, g, other or unknown
  misc_feature (430)..(430): "n" may be a, t, c, g, other or unknown
  misc_feature (476)..(476): "n" may be a, t, c, g, other or unknown
  misc_feature (478)..(478): "n" may be a, t, c, g, other or unknown
  misc_feature (483)..(483): "n" may be a, t, c, g, other or unknown
  misc_feature (488)..(488): "n" may be a, t, c, g, other or unknown
  misc_feature (539)..(539): "n" may be a, t, c, g, other or unknown
  misc_feature (554)..(554): "n" may be a, t, c, g, other or unknown
caggataataaccaaaggttttattaacttggaaaataaaaattcaataaaacattcagattgggaagataaaaatgaataattcttcctgaaagcagatcagaaacatagacgaaaaatagaaaagataaaaaatattagagcatcagcctgggtgtaggggagggtccaacattgaaataataggtggtccagaaagaaagaatgtaaataatcacaagaaaatttaagaaatttcccatgaaggcccagcacaaggtttaacacccgggatacaacaccatcatgacagttcagaacaccaagaataaagagatcttaaatgtttccaggaagggtggataaaaaaacctaagtcacatataaaggtacnggaatcagaatggcatcagaaatctcaaccagcaccgcttgggaagggctaggggangggattattttccacctggcattctatgctcagccccattttggtnanggccnaaatncggactttttaagtcatgccaaaatctcaaaatatttacaacctttttacnttccaggtcttttcn

SEQ ID NO: 10145 - DNA, 551 bp, Homo sapiens
  misc_feature (483)..(483): "n" may be a, t, c, g, other or unknown
  misc_feature (513)..(513): "n" may be a, t, c, g, other or unknown
  misc_feature (533)..(533): "n" may be a, t, c, g, other or unknown
  misc_feature (535)..(535): "n" may be a, t, c, g, other or unknown
  misc_feature (550)..(550): "n" may be a, t, c, g, other or unknown
gagagagagagtctcactctgtcacccagactggagtgcggtggcacgaacactgctcactgcagccctgacctcctgggctcaagccatcttcccttctcagcctccagagtagctgagatcacagtcgcatgccaccacacatggctaaatttttttttgggggcgggggggtagagacggggatctcaccatgttgcccaggcaggtgaagttgtattttataattacctaaaagttatagtttatttggtttgatggggtagcttatttatttttaatcttcaatgtagtagaatgactttttttggtgtttttgtcagcattataatcttcagtgttcttaatgaacactttcattaagtttaataaatgcctttagcaacaataatatatgccaacaagaatcatgacaaatttctacccaactcgttggtacatttctgattctggttcaatgaaaatgtctctcttaaaaatgcncactttgcaaaagcttggcataattccttnccaagccgtgtttacacagnantgaaccgaaagagtnt

SEQ ID NO: 10146 - DNA, 396 bp, Homo sapiens
  misc_feature (383)..(383): "n" may be a, t, c, g, other or unknown
  misc_feature (387)..(387): "n" may be a, t, c, g, other or unknown
  misc_feature (390)..(390): "n" may be a, t, c, g, other or unknown
  misc_feature (393)..(396): "n" may be a, t, c, g, other or unknown
gagacggagtcttgctctgtcgccgctggagtgcagtggcgcgatctcgattcactgcaagctctgcctcctggattcacgccattctcctgcctcagcctcccgagtagctgggactacaggcgcccaccaccacgcccagctagtttttttgtattttttagtagagacggggtttcaccgtgtcagccaggatggtcttgatctcctgacctcgtgatccgcccacctcagcctcccaaagtgctgggattacaggcgtgagccactgtgtccggccaggcctctcttcttaattcaacagtcagttatctcagagggtttctctctagtgtctcttcctgtttgaaaggaagtgggacaactgaatgcttcctcaattntttnttnttnnnn

SEQ ID NO: 10147 - DNA, 515 bp, Homo sapiens
  misc_feature (318)..(318): "n" may be a, t, c, g, other or unknown
  misc_feature (322)..(322): "n" may be a, t, c, g, other or unknown
  misc_feature (371)..(371): "n" may be a, t, c, g, other or unknown
  misc_feature (387)..(387): "n" may be a, t, c, g, other or unknown
  misc_feature (436)..(436): "n" may be a, t, c, g, other or unknown
  misc_feature (457)..(457): "n" may be a, t, c, g, other or unknown
  misc_feature (463)..(463): "n" may be a, t, c, g, other or unknown
  misc_feature (466)..(466): "n" may be a, t, c, g, other or unknown
  misc_feature (469)..(469): "n" may be a, t, c, g, other or unknown
  misc_feature (495)..(495): "n" may be a, t, c, g, other or unknown
  misc_feature (509)..(509): "n" may be a, t, c, g, other or unknown
ctgttttttgttttttgtttttttttcccaaagcggctgcagttaggtcttgaaaaagcttaaggtattaaaactagaaaaacgcaccaaaagttgtgcgtaaaaaagttgctccccaatgagaagtcttctaccgtcatggagcttctgtttccacatactgtccaagaccaccacagggtgcaccgtaccattgggaggtgcttccatattccgcaacaaatgaaacttccatgatgaagatccggaagaaaagatgtagtgatggaaaaggagccacatattccaaccatttaaataactttaatttacatactnactnacacaggtaccagggctttgaaaatagattggtcagtcctaaaaagcanctttggtctggcttcncttttctggcccttcctttttagccaaggcaggccttccactttttcantactgggtcaagtaaggttgngttaanaanttncccaacgctttaatcttttttggccntggatttttcaggnaaaatt

SEQ ID NO: 10148 - DNA, 554 bp, Homo sapiens
  misc_feature (385)..(385): "n" may be a, t, c, g, other or unknown
  misc_feature (440)..(440): "n" may be a, t, c, g, other or unknown
  misc_feature (465)..(465): "n" may be a, t, c, g, other or unknown
  misc_feature (510)..(510): "n" may be a, t, c, g, other or unknown
  misc_feature (534)..(534): "n" may be a, t, c, g, other or unknown
  misc_feature (544)..(544): "n" may be a, t, c, g, other or unknown
  misc_feature (546)..(546): "n" may be a, t, c, g, other or unknown
cttttttttttttgaaacagcgtctcactctgtcgcccagactgctggagtgcagtggcgcgatctcgactcactggcaacctccacctcccaggctcaagcaattctcctgcctcagcctcccgagtagctgggattacaggcgcatgccactaccgcccggctaatttttttagtagagacggggtttcgctatgttggccaggctcctgacctcaaatgatctacccaccttggcctcccaaagtgctgggattataggcatgagccaccgtacctagccctcaatgcaactttctaaaaaatgcctactacaaatctcttaactaatgactctcttaggctgctgcaatacagaatttctttttttttcttttttttttanagacagggtctcgctctgtcacccaggctggagtgcaatggcacaatcacagctnactggagcctcaaactcctgggctnaggcaatcttccaccttagcctccaagtagttgggactaccaagnggcaccaacatcctgggcaatttnaaaattttgnanaaaccggg

SEQ ID NO: 10149 - DNA, 564 bp, Homo sapiens
  misc_feature (307)..(307): "n" may be a, t, c, g, other or unknown
  misc_feature (436)..(436): "n" may be a, t, c, g, other or unknown
  misc_feature (462)..(462): "n" may be a, t, c, g, other or unknown
  misc_feature (502)..(502): "n" may be a, t, c, g, other or unknown
  misc_feature (521)..(521): "n" may be a, t, c, g, other or unknown
  misc_feature (523)..(523): "n" may be a, t, c, g, other or unknown
  misc_feature (560)..(560): "n" may be a, t, c, g, other or unknown
gcctggtccccacatgttttgggttttgtgacatattgctgggcccaatacctagaaaatggaaggctccgcctggggcctgtccacagtggatctggtgacatatctctgcattaatcacctaagagatgtggctgtcttcttctccctgaaccctgcttacagggaagattgtgacatattgctggcatcagcaaacagacgatgtgtctctcgtaattgggccttgcccacagaaagcattttgacatattgctgggcttattactgaaggtgaagggtgactcttgcagcctgcaccctgcanggggttggtaacgtattcctggctgagtacccaggtgatgtgactcttctgcctggcccttgtgtcaggggaaagaattgtgacatattcctggcccagaaatcaaggtgaaggtgacttttcctgttngctccctacccacaggtaaaaactgnggacatatatcttggtccactaacagtgcaataacgactntaatgcccacataagccantngaaaggaactggcagtttaactgggatttgaaaaaanggta

SEQ ID NO: 10150 - DNA, 551 bp, Homo sapiens
  misc_feature (464)..(464): "n" may be a, t, c, g, other or unknown
  misc_feature (506)..(506): "n" may be a, t, c, g, other or unknown
  misc_feature (515)..(515): "n" may be a, t, c, g, other or unknown
  misc_feature (530)..(530): "n" may be a, t, c, g, other or unknown
gagatggagttttgctcgttgcccaagctggagtgcaatggcgcgatctcggctaaccgcaacctccgcctcccgtgttcaaacgattctcctgccacagcctcccgagtagctggaattacaggcatgcgccaccacgcccggctactttttgtatttttagtagagatggggtttcacctgttggccaggctggtctccaactcctgacctcaagtgatccacccgcctcaccctcccaaggtgctgggattacaggcgtgagccactgtgcctggcctatttatttattttatttttgagacagcgggagtatctcccaagctggagtacaatggcgtgatcttggctcactgcaacctccacctcccgggttcaagcaagtcttatgcgtcagcctcctgagtagctgggattataggcatgcgtgaccatgcctggctaacttttggattttttagtanagatggggtttcaccattttgaccaaactggctcgaactccngactcaagngacttctgccttggnctcccaattggtgggatacag

SEQ ID NO: 10151 - DNA, 558 bp, Homo sapiens
  misc_feature (516)..(516): "n" may be a, t, c, g, other or unknown
  misc_feature (519)..(519): "n" may be a, t, c, g, other or unknown
  misc_feature (550)..(550): "n" may be a, t, c, g, other or unknown
  misc_feature (552)..(552): "n" may be a, t, c, g, other or unknown
  misc_feature (554)..(554): "n" may be a, t, c, g, other or unknown
  misc_feature (558)..(558): "n" may be a, t, c, g, other or unknown
gagatggagtctagctctgttgtccaggctggagtgcagtgacgcgatctcggctcactgcaacctccacctcccaggttcaagcaattctcttgactcaccctcccgaacagttggtattacaggtgcccgccaccacgcccggctaacgtttgtatttttagtagagacggggtttcaccgtgttggccagcctggtctccaactcctgatctcaagtgttccacctgcctcggcctcccgaagtgctgggattacaggcatgagctactgcacctggtctaaaggtgcatttttgtaatgtcactattatggctctgacaatagggaccagaggtcatttcattttattattggttatctacatttctctctcagtgtgaaacttgctgatatttgaagaaactgggatgtgaggcagggaccaatcatggaggtgtgtctgagacggagggggttcctgggaggcaggactgatgctggtgctaatgctggggaaagtcccaggcaggctancanggtggcaccaagcttcgatgtgaaccgccgnantntgcn

SEQ ID NO: 10152 - DNA, 561 bp, Homo sapiens
  misc_feature (525)..(525): "n" may be a, t, c, g, other or unknown
  misc_feature (545)..(545): "n" may be a, t, c, g, other or unknown
  misc_feature (550)..(550): "n" may be a, t, c, g, other or unknown
  misc_feature (554)..(554): "n" may be a, t, c, g, other or unknown
aaacagagtctcactcactctgtcgcccaggctggagtgcagtggcatgatctcggctcacagcaacctccacctcccaggttcaagcaattctcctgcctcctactcctcccatgtagctgggattacaggtgtgtaccaccatgcctggctaacttttgtatttttagtaaagacggggtttcaccatgtcagccaggctagtcttgcactcctggcctcaagggatctgcctaccttggcctcccaaagtgctgggattacagacatgagccaccgcacccagcctggttgggagaatgttctattgattccctaggatgctaggaagtactcagcaaatactaaatgtagcaattctcaggggttaggaggagttcaagataaatgagtattgtaaacacagtagtccaggtaagttaagcccccatgccctcttcaggaggcctggtctctggacacttacagaagaaaagtccacccctcgtatacaggccttccatagcttacttctcaacagactgnagcttcaacctgaaacaccnttttncatnttactaa

SEQ ID NO: 10153 - DNA, 571 bp, Homo sapiens
  misc_feature (472)..(472): "n" may be a, t, c, g, other or unknown
  misc_feature (518)..(518): "n" may be a, t, c, g, other or unknown
  misc_feature (522)..(522): "n" may be a, t, c, g, other or unknown
  misc_feature (525)..(525): "n" may be a, t, c, g, other or unknown
  misc_feature (544)..(544): "n" may be a, t, c, g, other or unknown
  misc_feature (568)..(568): "n" may be a, t, c, g, other or unknown
gttttttttttttttttttttcccagttagaaaacgttttatggacacggaacgctccactgtaacgggcaggcagaacacactcctttcccaggctcatcaattaaacagaaaacaggggagctctcctcaccccagcctggccctgtgctccccaatggcccctgcgaggcccctaccatggcctgcctgggagacacaaactatgacaggaacacactggactgatacagaatgaggccagacacacccatgcctgtgcctcccaagagcgaccccaggacagtggggcagacagaggtgtctacactggcagaaataagggctggagccacacgtgatgctcggacacaaacggcacgcagctctgcagcctggccacacacccttcgcgtatgactccactcctcagggttcacggggctgtgtacagagactctctctgctgacacgatggccacacgcccttcgngtatgacttcacttcctcagggttacgggcttgtgtacagagactntttntgntgacccatgggcatatggnctttgcgtatgactccattcttanggt

SEQ ID NO: 10154 - DNA, 533 bp, Homo sapiens
  misc_feature (428)..(428): "n" may be a, t, c, g, other or unknown
  misc_feature (441)..(441): "n" may be a, t, c, g, other or unknown
  misc_feature (454)..(454): "n" may be a, t, c, g, other or unknown
  misc_feature (457)..(457): "n" may be a, t, c, g, other or unknown
  misc_feature (464)..(464): "n" may be a, t, c, g, other or unknown
  misc_feature (480)..(480): "n" may be a, t, c, g, other or unknown
  misc_feature (501)..(501): "n" may be a, t, c, g, other or unknown
  misc_feature (529)..(529): "n" may be a, t, c, g, other or unknown
gaagtggtgcaaagtacatttatttttacaatgaaagctcatctatgaatctgataaaggccttccttcaactggagacaatttgggatgttgcaaaacaaggtttgggaagcccttctatggatcggttttgtgtccaagtctgtccctgccaaaagccatcaaaagtctccatcacccctgggctccagtctgctacccccagacttggcagctgggatctctccttcctggttcatagttctcatatccacccctcagcgatggagttagagttccaggcccacgtggtgaacgagattgtgagtgtcaagagggaatacgtagtttatgatctgaagacccaagtcccaccccagcaagccggtgccctgcttccaggtgacggtgagtcaagtcgcgaggaggccgacagagggctgctggangccggttggaatnaaggatgcacggncanaagccangccccatgcccccgangcccaacttctttccccccgnccggaaaggcctgacttttccccttcancttg

SEQ ID NO: 10155 - DNA, 559 bp, Homo sapiens
  misc_feature (337)..(337): "n" may be a, t, c, g, other or unknown
  misc_feature (362)..(362): "n" may be a, t, c, g, other or unknown
  misc_feature (470)..(470): "n" may be a, t, c, g, other or unknown
  misc_feature (482)..(482): "n" may be a, t, c, g, other or unknown
  misc_feature (498)..(498): "n" may be a, t, c, g, other or unknown
  misc_feature (517)..(517): "n" may be a, t, c, g, other or unknown
  misc_feature (533)..(533): "n" may be a, t, c, g, other or unknown
  misc_feature (552)..(552): "n" may be a, t, c, g, other or unknown
  misc_feature (557)..(557): "n" may be a, t, c, g, other or unknown
acagataggatcttgctgttgcctaggctggagtgcagtggcacaatcatagctcactgcagcttcgaactcctgggctcaagcaatcctcctgcctcagcctcctgagtagctgagactacaggcacgtgtcaccaagcccagctaagttttttattttttgtagagatgaggtctcactatcttgcccaggttggtctccaactcctggcctcactcaatcctcctgcctcagcctcccaaaacgctggagttacaggtgtgagccactgcacctggcctttgtattttagtataaaatgtgctttggatagaatcattgctttttctagcttgnggcctttttttttttaagtatctgnataaggcagttggaaaacaagttcaagctggacactcttgagtccagtcctcatgttttcagcccactgttgcacccaattcgtgtgggcaagcctggggcccatggnatgagggatctnccagtaaggaagctgntatttggccaaaaccgcanaaacttgaaacttaangggatccaaataaatggcngttgngg

SEQ ID NO: 10156 - DNA, 561 bp, Homo sapiens
  misc_feature (384)..(384): "n" may be a, t, c, g, other or unknown
  misc_feature (426)..(426): "n" may be a, t, c, g, other or unknown
  misc_feature (501)..(501): "n" may be a, t, c, g, other or unknown
  misc_feature (534)..(534): "n" may be a, t, c, g, other or unknown
ccaagactattatttttatttccggacaaaaacatctgcttcacacagtgcacggcatcaaatgaagaggaaagaacttgtatcccaaagcctggctttctgtatcatccacaaattaagacagcatctgctgagcccatgctgagcctgtcacagtcaacaactgggaaaccggggcctctactgaaccaggggacaagtagccgaagcacttaaacagcttgatacttgttttttggtacatttgtttatttaaagcacaggaaatgaataaaatgccacctaaaaagtatctgcaatgaataaattatttccagtgaagcactgcagatccacacacaccagtctgctaacctttaccaaggccatgtccggtgggcttgngcttgtcccagttgactcttccttgagacctttcccttctgngcaatgaccacagcattagagaccagtcctgcatgcgctggcttcctcgaaggcatggaaaaccacgtggatgancagtgggctggcattgcagaaggtttaacaaanggactttactggtttcaggggccctga

SEQ ID NO: 10157 - DNA, 502 bp, Homo sapiens
  misc_feature (349)..(349): "n" may be a, t, c, g, other or unknown
  misc_feature (361)..(361): "n" may be a, t, c, g, other or unknown
  misc_feature (364)..(364): "n" may be a, t, c, g, other or unknown
  misc_feature (408)..(408): "n" may be a, t, c, g, other or unknown
  misc_feature (421)..(421): "n" may be a, t, c, g, other or unknown
  misc_feature (437)..(437): "n" may be a, t, c, g, other or unknown
  misc_feature (456)..(456): "n" may be a, t, c, g, other or unknown
  misc_feature (476)..(476): "n" may be a, t, c, g, other or unknown
  misc_feature (493)..(493): "n" may be a, t, c, g, other or unknown
  misc_feature (501)..(501): "n" may be a, t, c, g, other or unknown
agatggagtcttgttctgttgcccaggctggaatgcagtgtcactattttggttcactgcaacctctgcctcctgggttcaagcgattctcctgcgtcagcctcccgagtagctgggattacagatgcacaacaccacacccggctaattttttgtatttttagtagagacggggtttcactatgttggccagactggtctcgaactcctgacctcgtgatccaccctccttggcctcccaaagtgctgggattacaggcgtgagccaccgcgcccggcggccctgactatttttaatgagcccccgcgcaacaggctggtgtgaaatgtgtgttgagggatgctttgngaagaataaggnatnacagaaagacagtgcactgatggtgcaatgaaagcaacacaggncttcttaacctgnccaagaaacttatggntttgggggaacaatcaagngacttaaataccctttaagnggaatctcatgggtttnacaggaana

SEQ ID NO: 10158 - DNA, 575 bp, Homo sapiens
  misc_feature (486)..(486): "n" may be a, t, c, g, other or unknown
  misc_feature (492)..(492): "n" may be a, t, c, g, other or unknown
  misc_feature (532)..(532): "n" may be a, t, c, g, other or unknown
  misc_feature (570)..(570): "n" may be a, t, c, g, other or unknown
  misc_feature (574)..(574): "n" may be a, t, c, g, other or unknown
aaagacagagtctcactctgttgcccaggctggagtgcagtggcatgatcttggctcactgtaacctccacgtcccaggttcaagcaattctcctacctcagacccccaagtaactgggactacaggctaatttttgtatgtttagtgaagactgtttccccatgttggccaggctggtctcgatctcctgatcacacgtgatccacccacctcggcctcccaaagtgctgggattacaagtgtgagccaccatgctcggccccagaggcacgtttctaagtcctgaatctgcagtgctggctacaggcaaccttccctgccattgacaagtgttatcaatctgtttgacttggctatatgcataaccaagggccctgacttcccatctccaacaaggaaccacttttcttaatgcagttctggagcaaatccagatgtttgtcaaagcttgactgcccgcatgctccctgacccatcccccaaanggcttntagaacaaacaataagccatggcaaggttctggcacgganccaagccttggaaaaactagtttggaggtaaggcttgnccang

SEQ ID NO: 10159 - DNA, 518 bp, Homo sapiens
  misc_feature (199)..(199): "n" may be a, t, c, g, other or unknown
  misc_feature (353)..(353): "n" may be a, t, c, g, other or unknown
  misc_feature (438)..(438): "n" may be a, t, c, g, other or unknown
  misc_feature (465)..(465): "n" may be a, t, c, g, other or unknown
  misc_feature (483)..(483): "n" may be a, t, c, g, other or unknown
  misc_feature (493)..(493): "n" may be a, t, c, g, other or unknown
  misc_feature (507)..(507): "n" may be a, t, c, g, other or unknown
  misc_feature (510)..(510): "n" may be a, t, c, g, other or unknown
  misc_feature (514)..(514): "n" may be a, t, c, g, other or unknown
ctcaatcatcgtttttaattggctttataagctaaagtgcatagtaaagacaaaaaaaggaaatgcatacataggaaagggacacttagaaaggacctgagatacctaaatgtctgttctaaggaacactggaaggagggaatgcagatgcaggcagcaggcctgggtctggcttctggcctgggtttggagcctgcanaagctgctggcatgctagctctacccagggaacagctccaagagggagtgttgggatgaaggatcacacttgggataggtgctgctggtaccaaatgtgattttagctccattcagggcccaggggtaaccagcagtgccaccaaacctgtcancaggtaaagaaacttctaccatcccaaagtgcaggttacaggaaaggggtcactccttaatgacgacctgggcctgctgcataangcccatcttatgcaacatgtgggctgnccatctttcccacttttnagggctatgnacttgggcaaggtnaantggncaac

SEQ ID NO: 10160 - DNA, 474 bp, Homo sapiens
  misc_feature (292)..(292): "n" may be a, t, c, g, other or unknown
  misc_feature (413)..(413): "n" may be a, t, c, g, other or unknown
  misc_feature (425)..(425): "n" may be a, t, c, g, other or unknown
  misc_feature (434)..(434): "n" may be a, t, c, g, other or unknown
  misc_feature (457)..(458): "n" may be a, t, c, g, other or unknown
  misc_feature (467)..(467): "n" may be a, t, c, g, other or unknown
  misc_feature (472)..(472): "n" may be a, t, c, g, other or unknown
caaatcacatatggcttctttgaccccatcaaataactttattcacacaaacgtcccttaatttacaaagcctcagtcattcatacacattaggggatccacagtgttcaaggaacttaaatataatgtatcataccaacccaagtaaaccaagtacaaaaaatattcatataaagttgttcacacgtaggtcctagattaccagcttctgtgcaaaaaaaggaaatgaagaaaaatagatttattaactagtattggaaactaactttgtgcctggcttaaaacctccctnacgctcgtctgtcccacacaaatgtttaagaagtcactgcaatgtactccccggctctgatgaaaagaagcccctggtacaaaagattccagtgcccctgaagaggctcccttcctcctgngggctctcctanaaaaccagngggacggcctcctgctgatccgnntatacctanggggncc

SEQ ID NO: 10161 - DNA, 446 bp, Homo sapiens
  misc_feature (412)..(412): "n" may be a, t, c, g, other or unknown
  misc_feature (422)..(422): "n" may be a, t, c, g, other or unknown
  misc_feature (437)..(437): "n" may be a, t, c, g, other or unknown
  misc_feature (439)..(439): "n" may be a, t, c, g, other or unknown
  misc_feature (441)..(441): "n" may be a, t, c, g, other or unknown
  misc_feature (444)..(444): "n" may be a, t, c, g, other or unknown
  misc_feature (446)..(446): "n" may be a, t, c, g, other or unknown
ccctcaatacaacaagttgtcacaaatcgtcacagtgatacagacttatcagaaaccaatgaaacaatacaaattaaatactaataaaataaatactacagaagacagaagaacacaggggaatggagttggggggcgctcagagatctgggattttctcatttctcctcgggacaggccaaggccatccagggcccaggtttggtcttggtcatgaacaaggaggccagtccaagggaccccggcgccacctcccaccacccccgggacctcttgtcctcagacatggagttcaactttccacccccatcagcaaccacgataacaatgacgacgacagggagatgagaactaattgtaaccaaaaaaacaaaaacagtccagtcgctaatgctggcattgataaggcggnttcttgtggnccgtattattgcctnantnttnan

SEQ ID NO: 10162 - DNA, 564 bp, Homo sapiens
  misc_feature (391)..(391): "n" may be a, t, c, g, other or unknown
  misc_feature (441)..(441): "n" may be a, t, c, g, other or unknown
  misc_feature (479)..(479): "n" may be a, t, c, g, other or unknown
  misc_feature (511)..(511): "n" may be a, t, c, g, other or unknown
  misc_feature (516)..(517): "n" may be a, t, c, g, other or unknown
  misc_feature (537)..(537): "n" may be a, t, c, g, other or unknown
  misc_feature (539)..(539): "n" may be a, t, c, g, other or unknown
  misc_feature (543)..(543): "n" may be a, t, c, g, other or unknown
gttaataaccaggacatggaagtctcttggaagaacttttaaaatttgcatgattctctccacagatgacaagagctcaaaggcctggtcacagtggctcccgggaggccagtacacacccactgtcctcagacagaaacacacaacacaagggttagaaacagggtttcaaagacaaccctctgggccaggaatgaggagtcataaaatacttcaattagccattaatgctttaaaaaggcatttttttaaaaagtcccaccacaaaggctcaacttcaagtactaatttaatggttaagttgtaatatttctttgaaataatattcctatggtccagaaaaaattcaccatatttataactgatttcatgagcaaacactttcaattgntggatgtacataagtcccttttgatctaatgagaggagagacctggcttncaataagaattcactagaaatatatttccgtgggactntttaaacttattaagggccttgcctccatggntttannttagcttgctggcctttggntnaaanggtatcccttatgaaaggcgg

SEQ ID NO: 10163 - DNA, 373 bp, Homo sapiens
  misc_feature (24)..(24): "n" may be a, t, c, g, other or unknown
  misc_feature (29)..(29): "n" may be a, t, c, g, other or unknown
  misc_feature (49)..(49): "n" may be a, t, c, g, other or unknown
  misc_feature (53)..(53): "n" may be a, t, c, g, other or unknown
  misc_feature (63)..(63): "n" may be a, t, c, g, other or unknown
  misc_feature (85)..(85): "n" may be a, t, c, g, other or unknown
  misc_feature (114)..(114): "n" may be a, t, c, g, other or unknown
  misc_feature (133)..(133): "n" may be a, t, c, g, other or unknown
  misc_feature (143)..(143): "n" may be a, t, c, g, other or unknown
  misc_feature (159)..(159): "n" may be a, t, c, g, other or unknown
  misc_feature (184)..(184): "n" may be a, t, c, g, other or unknown
  misc_feature (219)..(219): "n" may be a, t, c, g, other or unknown
  misc_feature (234)..(234): "n" may be a, t, c, g, other or unknown
  misc_feature (311)..(311): "n" may be a, t, c, g, other or unknown
  misc_feature (334)..(334): "n" may be a, t, c, g, other or unknown
  misc_feature (348)..(348): "n" may be a, t, c, g, other or unknown
  misc_feature (354)..(354): "n" may be a, t, c, g, other or unknown
  misc_feature (364)..(364): "n" may be a, t, c, g, other or unknown
  misc_feature (369)..(370): "n" may be a, t, c, g, other or unknown
ctgcaaacgagtatttattgggcncctgngatgggccaagcagtatttngggngccaaggatncaacagggaaaaacatttcctnttttcttggagcttgcattcttggggganagacaaatgaataattaangccaaggagngggaaatatgagtaanaaaaaaaaaaaaagaggggttgganaagggaaggcctcctgaggggacatttcagccaanacctgaatgatggancaagccacacgggcctgagggcagcagcaggatggacaggaccaaaggtccgtgcaaaggccctgaggctgaatggngtttgaggaatgttgaaaggccngtgaggaggggaancctaanaggaattaanatccnncag

SEQ ID NO: 10164 - DNA, 543 bp, Homo sapiens
  misc_feature (314)..(314): "n" may be a, t, c, g, other or unknown
  misc_feature (406)..(406): "n" may be a, t, c, g, other or unknown
  misc_feature (413)..(413): "n" may be a, t, c, g, other or unknown
  misc_feature (531)..(531): "n" may be a, t, c, g, other or unknown
  misc_feature (534)..(534): "n" may be a, t, c, g, other or unknown
aaccttgtgcttgtatagatatatttttgagacgaagtcttgttctgtcgcccaggctggagtacagcggtgcgatctcggttccctgatacctccgcctcctggattcacgcaattctcctgcctcagcttcctcagtagctggaactacaggtgtgcacccccacacccagctaatttttgtatttttagtagagacgaggttttgccatgttggccaggctggtcttgaactcctgacctcaggtgatctgcccacctcaacctcccaaagtgccgggattacaggtgtgagccaccgcgcccggccttgngttacttttaatgagccaaaagacagtaagaaggagcaaagcaaaacccaccgaaggctctgtgggcagctggccctgaaagcacatcctgnctcttgnttttaccaactatgtgagcctttgggcaaaatacctaacagtctgaagccttaagttccttattagaaaaagggagaagatgatctggatatttcttaagggtaatggttcttccatntcntgaaggagg

SEQ ID NO: 10165 - DNA, 542 bp, Homo sapiens
  misc_feature (517)..(517): "n" may be a, t, c, g, other or unknown
  misc_feature (542)..(542): "n" may be a, t, c, g, other or unknown
ctctaatcttgtcttcatgctttatttcattaagttgatcttcaatctctgatatcctttctttcacttgatcaattcagctattgatacttgtgtatgcttcatgaaattcttgggctgtgttttcagcttcatcaggtcgtttatgttcttctctaaactagttattctagttagcaattcctctaaccttttatcaaggttattagcttccttgcattgggttagagcatgcttgtttagcttggaggattttgttattacccaccttctgaagcctacttctgtcaattcatcaaactcattctccatccagttttggtcccattcctggcaaggagttgtaatcctttggaagataagaggtattctgatttttgcaattttcaccctttttatgctggattttcctcatcttcatggatttatctacctttggtctttgctggtggtgaccttaggatgaagtttttgcatgggccgcctttttggtgaggtgatgctactgcttttggtnataagttttccttctaacagtcagn

SEQ ID NO: 10166 - DNA, 538 bp, Homo sapiens
  misc_feature (442)..(442): "n" may be a, t, c, g, other or unknown
  misc_feature (506)..(506): "n" may be a, t, c, g, other or unknown
  misc_feature (528)..(528): "n" may be a, t, c, g, other or unknown
  misc_feature (538)..(538): "n" may be a, t, c, g, other or unknown
gagagagagagagacaaggatcttgctctgttgcctggactggagtgcagtggcatgatcatggctcactgcaacctcgacttctggggctcaaggatcctcccatctcagcctcccaagtagccgagggactacaggcacgtaccaccacgcccagctcctaaggacatcagctttaagtacaatgctccaatttcttcttttcacaagagtgtatccatgtattacttatgaaattgaaagtttaaaaaagctttgagaaatacaaatctagggggaatgtcttgagtgagtgggattctgacgactcaacggattaaatgtcatgagggctgatcccagctgcctggaatgggtctgggctgtggaattgcaccgacaggtgtgccagcacagcgctggccctggccaaggtgtggaacacactgactcccagcactgntccgaggtgctgggaaccccaagtgcaagacattacaagacgccacgcttgctgccaacactgnatcccgggaccggaccagcganggtgttgatn

SEQ ID NO: 10167 - DNA, 549 bp, Homo sapiens
  misc_feature (325)..(325): "n" may be a, t, c, g, other or unknown
  misc_feature (334)..(334): "n" may be a, t, c, g, other or unknown
  misc_feature (342)..(342): "n" may be a, t, c, g, other or unknown
  misc_feature (378)..(378): "n" may be a, t, c, g, other or unknown
  misc_feature (508)..(508): "n" may be a, t, c, g, other or unknown
  misc_feature (517)..(517): "n" may be a, t, c, g, other or unknown
  misc_feature (526)..(526): "n" may be a, t, c, g, other or unknown
  misc_feature (528)..(528): "n" may be a, t, c, g, other or unknown
  misc_feature (545)..(545): "n" may be a, t, c, g, other or unknown
gagtttcaaaacgagaacatttattatttgttttttcctcattaaagtttcacaaataaagcacagcaagacttgtctgcagacacacaggaggcaaacggacagcccgtcaaccagagatggagacgaaggccagcgtggctctcacagggcagcgcttctcagaacccctggcccccctcgtgccaaggctggcctgtgtcaggcctcgcccacgccgccttatgacaaatagaggccggtgccaaggaggtggctacagagcaggggcaaggaagttatcctcatgttctgataatgaccctgcaaatcccaccccaccctnaggcacctncgtctaanggtgtcggttactccaggtaaggaggttcccagganggccgtgttttccctaaggctgatgaaacttgctccgacaagccaggccactgggaggcacctcaggatggaaaagatgctggaggctttgctggctttcaggatgcccggagccccacgggggccaaangggaagaangaaagcgantnttaagacagattggtgntggt

SEQ ID NO: 10168 - DNA, 537 bp, Homo sapiens
  misc_feature (478)..(478): "n" may be a, t, c, g, other or unknown
  misc_feature (494)..(494): "n" may be a, t, c, g, other or unknown
  misc_feature (503)..(503): "n" may be a, t, c, g, other or unknown
  misc_feature (523)..(523): "n" may be a, t, c, g, other or unknown
  misc_feature (532)..(532): "n" may be a, t, c, g, other or unknown
  misc_feature (536)..(537): "n" may be a, t, c, g, other or unknown
caatgtccacatcttcatatttatttccacagtgttaacatggaatagacttagcaaccattgcagagaaaaaaaaaaatctctcattggtttatgagttaaatcctgtaacaatgaatttcaaccattcgaagtcttctgctgcttaacatttactgaatcaaaggctgaagtaaatggactctcatctaggtctcagaaatcacacagctggcctcgtgatgtatttacgatgggatttaacttctaatacaaggcaagtttgacagttacagccaatgaagtgcacgactctgtacatggatttcttgacctaacattcaaaaggacatttcatagtactagtttaattctgatctctctctagaaggcagaaaccacatcccacactcctatgcaatttgttattttggtattgtaaagtaaatgaataagaaggggtggaggcataaagaaaatctagtttctggctgggcanggtggttcacgcttgnaatcccgcnctttgggaggccaaggcggntggatcacnaggnn

SEQ ID NO: 10169 - DNA, 542 bp, Homo sapiens
  misc_feature (249)..(249): "n" may be a, t, c, g, other or unknown
  misc_feature (405)..(405): "n" may be a, t, c, g, other or unknown
  misc_feature (410)..(410): "n" may be a, t, c, g, other or unknown
  misc_feature (432)..(432): "n" may be a, t, c, g, other or unknown
  misc_feature (466)..(466): "n" may be a, t, c, g, other or unknown
  misc_feature (524)..(524): "n" may be a, t, c, g, other or unknown
  misc_feature (533)..(533): "n" may be a, t, c, g, other or unknown
  misc_feature (537)..(537): "n" may be a, t, c, g, other or unknown
gagacaggttcttactctgtcacccaggctgaggtgcagtggatctatctcggctcactgcagccttgacctcccaggctcaggtgatcattccacctcagcctcctgagtagttgggactataggcacatggcaccacgtccagctagtttttgtattttttttgtagagacgaggtttcgccatgttgccccggctaggcttgaactcctggcctcaagcgatccactcgcctcggcctcccaaagngctagaattacaggcatgaggtactgagcctggcttgacttataattctgatgaaaatgttcaatgtcaacttaagaatgggcaagggagcacatgggcttttggaattcttttttttttttgagacggagtcttgctctgtcacccaggctggantgcantggcgtgatctcggctcactgnaaccttcgcttccgggttcaagcgattctcctgnctaaccttccaagtactgagaatacaggcatgcaccaacacgcccagctaatttgganttttagganaaanggggg

SEQ ID NO: 10170 - DNA, 557 bp, Homo sapiens
  misc_feature (345)..(345): "n" may be a, t, c, g, other or unknown
  misc_feature (510)..(510): "n" may be a, t, c, g, other or unknown
  misc_feature (514)..(514): "n" may be a, t, c, g, other or unknown
  misc_feature (523)..(523): "n" may be a, t, c, g, other or unknown
aaaaacatgagagcaaattgtacatatatcaatctcccttgcttgtctttaagaaagggccgttcatagcatttggcacaaaccctctatttctgttgcattagcatgattttaaataagaaggaaaataaacatttgatttatttcatgcttcctaagtttctgggcagggacatgccttactcttttagaaaccaattccaagatgacatctgactgcatttttctgttggtccgaacttctaaacaaacactcataaagtaagtttaaacaatttggagatgtatgaggaaaaagtcttgttctgttcagttcagactttgttaaaaaaaaaaaaaaaaaangaaaagaaaaaaatgctcatttcacatgtccatgatcttcatggattttttttaagcttatttgagtttgattaagggacaaaaaagaagaggcggcaagttttccctatctctttggagtgtttcgctcaaggaaattttgctcatcaaggtcagctacatacncagnggacacatnaaaggcaaactggggggctccgaggatacaaagg

SEQ ID NO: 10171 - DNA, 556 bp, Homo sapiens
  misc_feature (479)..(479): "n" may be a, t, c, g, other or unknown
  misc_feature (494)..(494): "n" may be a, t, c, g, other or unknown
  misc_feature (498)..(498): "n" may be a, t, c, g, other or unknown
  misc_feature (513)..(513): "n" may be a, t, c, g, other or unknown
  misc_feature (529)..(529): "n" may be a, t, c, g, other or unknown
  misc_feature (539)..(539): "n" may be a, t, c, g, other or unknown
agtcctagatacaattcctttattatcattatcatgccccctagcacatgaagctgggcttccacctagatcagctaaggacaggggtatgtttacaatgagaacaatttctctatgcgcattaggttaagacctcttctctgtttctagaatactgtgatgactcacatccatgggccagctgcttccaggaatccatctggcctcaacaacattgggctgcctggaataacggctggcacttgcacagggcagggtatggggagcaggcctcaggtctataagcaggactgggcactgctgaaataggggaagggggcagccaacatgtagcaggttctcccaaggcatgtagaagttggtgggaaaatggggctggggtgtgtaacttgtccccttccaggaagggacccaggcacctggtctcctggccaagatcacaggcgatccaagagtcctccagggaagaacaagactgnacagacgcacagcanaaangctttcctggctggncatgaactgccatggngacacgcttnattctagcccccaaggg

SEQ ID NO: 10172 - DNA, 472 bp, Homo sapiens
  misc_feature (171)..(171): "n" may be a, t, c, g, other or unknown
  misc_feature (235)..(235): "n" may be a, t, c, g, other or unknown
  misc_feature (324)..(324): "n" may be a, t, c, g, other or unknown
  misc_feature (364)..(364): "n" may be a, t, c, g, other or unknown
  misc_feature (387)..(387): "n" may be a, t, c, g, other or unknown
  misc_feature (405)..(405): "n" may be a, t, c, g, other or unknown
  misc_feature (427)..(427): "n" may be a, t, c, g, other or unknown
  misc_feature (432)..(432): "n" may be a, t, c, g, other or unknown
  misc_feature (443)..(443): "n" may be a, t, c, g, other or unknown
  misc_feature (463)..(463): "n" may be a, t, c, g, other or unknown
  misc_feature (471)..(471): "n" may be a, t, c, g, other or unknown
aaaaaacaaagtgtgcattttccttactacgtttagtcaggaatatgcggtcattttattggttactgggtttctcatacaaacagatataatatcacttttaagagaaatgtacacaaggaagtaaccatagtaccacttattagtgggggcctctgggtacataaatgngtcctcccaaatagtcatcatacattcaatgtattggttagggccaaaatccctaaaccacctntcaacaaaacattacacctttggttctttattatgcaaaaattacaaattggcaaattcaataagaggatgcaatgggatttgagcatnacagccaaattgcttatactaaaaaattttaaattcttanaatcttttttccttaaacctttncctttcccaccttacatnagaaaaatggatgcttaaaacnaaacnggaggagcaantaaccaaccaaaaaaccctntccccaang

SEQ ID NO: 10173 - DNA, 563 bp, Homo sapiens
  misc_feature (133)..(133): "n" may be a, t, c, g, other or unknown
  misc_feature (448)..(448): "n" may be a, t, c, g, other or unknown
  misc_feature (509)..(509): "n" may be a, t, c, g, other or unknown
  misc_feature (546)..(546): "n" may be a, t, c, g, other or unknown
ccatggcttacttttattttttattataaaaacacatacaagagttttaagaaataacgaatataagacaaatcaaaaccatggtgagttattaaacccattttctatatacaaatactaaaattcccaaagnggaatatcatccaatgtgagacacatcatagcacggtccatatgtacacggcacacagagctctgcctgcgctcatctgtgaattgctcattacatgtcactgataaaaaaatctgcaagggaacttctactcttcagttctcctcttcctgatgcattgtcacatatttttaaggaactttagggatatgaagaaaatgcattaaagtgggtttctgctaagggctctgcatgttttgctctgatcaattacgcactacatcttgagaaaaacttttgcaactcatttccagcaaagatagcagaaaactctangtttttgccaattaattttttcctagcctcattggaacccaagtccaacaccaccggttanggacccaatcatggtttttatattgggaagtcaattntaaaaggcccctcaatt

SEQ ID NO: 10174 - DNA, 568 bp, Homo sapiens
  misc_feature (499)..(499): "n" may be a, t, c, g, other or unknown
  misc_feature (558)..(558): "n" may be a, t, c, g, other or unknown
  misc_feature (567)..(567): "n" may be a, t, c, g, other or unknown
gtttttgtttttttttgagatggagtcttgttctttggcaaggctggagtgcagtggtgtaatctcggctcgctgcaacctccaccacccgggttcaagcgattcccctccctcagcctcccaagtagctgggactacaggcgcccgccaccacgcctggcttaattttttctattttagtagagacagggtttcaccatgttggccaggatggtctcaatctcctgacctcgttatccaccggcctcgacctcccaaaatgcttggattgcaggcatgaaccaccgtgcccagcctcattagttcttaaagtcactaatagcattattttatgcccacgaaccagtaagtcagaccaaagcctgaaatagtgttttctgaaaaatggaaaaggaaatataagaattttaaaaacaaaccttgaaatcagtttctcaagttaaaattctgatggatgtcacaaatagtaagggcttccttactgagctctggcatctgntttggcttttatgcatactgggatttgggaagctgctgctcaacattctagcccatttncagaggggnc

SEQ ID NO: 10175 - DNA, 541 bp, Homo sapiens
  misc_feature (413)..(413): "n" may be a, t, c, g, other or unknown
  misc_feature (492)..(492): "n" may be a, t, c, g, other or unknown
  misc_feature (522)..(522): "n" may be a, t, c, g, other or unknown
ggagctggagccttgctctgtcacccagactgaagttcagtggcacaatctcggctcactgcaacctccatctcctgggttcaagcatttctcctgcctcagcctcccaagtagctgggatttcagcacctgccaccacgcccagctgatttttgtatttttagtcaagatgagatttttgccatgttggccgggctggtcttgaactcctgacctcaaatgatccgcctgcctcagcctcctaaagtgctgggattataggcatgagccaccacacctggcctttttcttctgtttctaactgttcccttttatttccctatggagcatctactgagccccagcccgagagtagaaacaaacctgctggctgctctcaaggcacttatagtccagtaggggagacggcactnaccactcagtcacacaaatgaccgtcgaattgtgacccaccctaaggcaattggcttttctgaggactaaggagggacnaggagctaaggaggacccctttatgccaantaaaacctctggggaactt

SEQ ID NO: 10176 - DNA, 545 bp, Homo sapiens
  misc_feature (374)..(374): "n" may be a, t, c, g, other or unknown
  misc_feature (497)..(497): "n" may be a, t, c, g, other or unknown
  misc_feature (543)..(543): "n" may be a, t, c, g, other or unknown
cttaaaataaaattaaggctcaaatgttctattaagctctcattgcttatgtatattatattaaggcttataaatgcacctggtaaattaaattcaccctggattgaattaacacctgctatatgagttatttgctttatgtaatcagtaatctcaaggtttctcctctttctctggaaacacaatttaaatattaacctaatctttaaactgcggctgcttctttctgacatttggaaactggtcatccatacaaaaaaaggcaaatatggatatattaatgaaaaggcagcttctcaaaaatcttaaagtatgtaactcaatgaattgggaaggaaaatgataaaagtagcaggaaagtcaagtctttgtgncactttctagggaaaacaatgctggtcatctgccaacaacaccttcagtctgagaacctgctgaagttgactggcaattgccaaaaagtctttgggtttcttcatttgaatctctggaaaaancctgggaagctgccatgccgtgcaaaaaaattttaattttaaaaangc

SEQ ID NO: 10177 - DNA, 517 bp, Homo sapiens
  misc_feature (375)..(375): "n" may be a, t, c, g, other or unknown
  misc_feature (419)..(419): "n" may be a, t, c, g, other or unknown
  misc_feature (450)..(450): "n" may be a, t, c, g, other or unknown
  misc_feature (468)..(468): "n" may be a, t, c, g, other or unknown
  misc_feature (487)..(487): "n" may be a, t, c, g, other or unknown
  misc_feature (503)..(503): "n" may be a, t, c, g, other or unknown
  misc_feature (509)..(509): "n" may be a, t, c, g, other or unknown
  misc_feature (511)..(511): "n" may be a, t, c, g, other or unknown
caataaatgtatagaaattgttttattcaaagactaagggggaaagggtgagaaattaagtctagcagtacaattatagaacctctggtgtattctcatgggaaaattaatgttttaggtaaaatggagacgacagtagttacgacaaatacttgagaaaagcctatgaaattactgactttggtagtccagccaaacatttgcttcaggaaaagcatccagaaatataatgatttagggatatcaaggtatactatataaagcattgttgtatatattatttcctcttttcccttgggaggtaatatctgaattattatcagactcctaatgaggaaacactctgagaagtgagaagcctgccttgtgtcaaantgggtaaaatcagagagacaaaggcgttagggctcgactcaggncctctgacttgcagggttctattgaagtggncaccttgcctgagctttnaagcttaaggaatgggccnaggaataccctggggncattcncnccggaa

SEQ ID NO: 10178 - DNA, 539 bp, Homo sapiens
  misc_feature (458)..(458): "n" may be a, t, c, g, other or unknown
  misc_feature (516)..(516): "n" may be a, t, c, g, other or unknown
  misc_feature (539)..(539): "n" may be a, t, c, g, other or unknown
gctttgactcatttattaaaaaaggcttcatgtaaaccttgcatgagaagatgtccattacttactcaggatagagggcaaagagattatatacaaaaagtattttcaaggactatcttgttcttcctttataagaagttgaatttaatttttgaagtaattacttaggaagaaatgcagaggagttccacagaaaaagatggcaaccagaatgatattccgtcagccagatttttaaaattccttcactctgaaatttcttctttgtcagctaaaactgttttctgggtcagtttccttaggtgagccttgttcacattcagtatcaaaaccagctgacatttattattttggtttcattttcctttttgcggctttatggttctttcgacaatccatacgcaggttggttggtctggcctccaagaagttcctgctcatattacttcctactcctntccagaataagtcagaaccttgaagtcgtcatcatcttaggggaaaaggaaaatctangggcccttttcaagaatgagctn

SEQ ID NO: 10179 - DNA, 517 bp, Homo sapiens
  misc_feature (450)..(450): "n" may be a, t, c, g, other or unknown
  misc_feature (457)..(457): "n" may be a, t, c, g, other or unknown
  misc_feature (469)..(469): "n" may be a, t, c, g, other or unknown
  misc_feature (472)..(472): "n" may be a, t, c, g, other or unknown
  misc_feature (490)..(490): "n" may be a, t, c, g, other or unknown
  misc_feature (496)..(496): "n" may be a, t, c, g, other or unknown
  misc_feature (506)..(506): "n" may be a, t, c, g, other or unknown
gagatggagtttctctcttgtcgaccaggctggagtgcagtggcacgctcttggctccctgcaacctccatctccctgggtccaagccattctcctgcctcagcctcccgagtagctgggattacaggcacccgtcaccatgcccggctaatttttgtatttttagtagagacagggtttcaccacgttagccaggctgatcttgaactcctgacttcaggtgatccttctgccgcggcctcccagagtgctgggattacagatgtaagccaccgtgcccggccttctataagatcacagaattgataagggccagagctgggattcgaaacaagggctgcttatctctagagccctggcccttgtcccctcacctttgtggaggtggggtttagctggagctgaagggtagtctgccctcaggtagaagcatggtggggagagaaccanggagtangggtggggtgtnaanaccttcccttcacaattncttgangagtttttgnggggctttatt

SEQ ID NO: 10180 - DNA, 463 bp, Homo sapiens
  misc_feature (421)..(421): "n" may be a, t, c, g, other or unknown
  misc_feature (428)..(428): "n" may be a, t, c, g, other or unknown
  misc_feature (431)..(431): "n" may be a, t, c, g, other or unknown
  misc_feature (439)..(439): "n" may be a, t, c, g, other or unknown
  misc_feature (444)..(444): "n" may be a, t, c, g, other or unknown
  misc_feature (446)..(446): "n" may be a, t, c, g, other or unknown
  misc_feature (448)..(448): "n" may be a, t, c, g, other or unknown
aacattgggacacaggtttattgtgatgatttcttgaatgaaataagttagaagagatgtgtcaccaatgacaaccattcaccaagctctgtgtaagaattttcatgttatctcagttaatgttcccagagacacttgagacggggatcaaccccatttttaaaatttgagacagggtcttgctgtcacccaggctggaatgccgtgacatgatcatagctcactatagcctcaacctcctgggttcaagcaatccttctgcctcagcctccctagtaactaccatgcccggctaatttttatttttttttgtggagatgggttcttgctatgttgcccaggatggcctcgaactcctggcctcaagggatcctcctgccttggcctccaaagtgttaggattataggcgtgagccactgnacctggnctnaaccccanttttnangngacttggcttaaaga

SEQ ID NO: 10181 - DNA, 484 bp, Homo sapiens
  misc_feature (404)..(404): "n" may be a, t, c, g, other or unknown
  misc_feature (430)..(430): "n" may be a, t, c, g, other or unknown
  misc_feature (432)..(432): "n" may be a, t, c, g, other or unknown
  misc_feature (462)..(462): "n" may be a, t, c, g, other or unknown
  misc_feature (470)..(470): "n" may be a, t, c, g, other or unknown
  misc_feature (472)..(472): "n" may be a, t, c, g, other or unknown
  misc_feature (474)..(474): "n" may be a, t, c, g, other or unknown
cacagaacccactcaggattctttctggaaacaacctgggggactttgatgagaggctcaagccttctagctacctcacaggtcagactctgggccccaggaaccccttgccctgggcctgccctcagggaatgattcataattaagagaaaagccttgtgctttatgtttcttcctcctcctctaagcaggcggcaggggaaggtggaggggttggaaggggaatggggggaaccgactggagactgggattttgattgagaggccccattatccacactcttaaaaaaataaccgaatcttttccttttttatcttgaccaatctcatttcacgctccagaagaggaagggagggagggagggagtccggggccaggagggacagaggagtcagtattctgnattttcaacgctgcattaagcacatngncacggtaaccaggcagcaacaaagtgccancttaacangntnccaagggagc

SEQ ID NO: 10182 - DNA, 355 bp, Homo sapiens
  misc_feature (69)..(69): "n" may be a, t, c, g, other or unknown
  misc_feature (109)..(109): "n" may be a, t, c, g, other or unknown
  misc_feature (127)..(127): "n" may be a, t, c, g, other or unknown
  misc_feature (162)..(162): "n" may be a, t, c, g, other or unknown
  misc_feature (170)..(170): "n" may be a, t, c, g, other or unknown
  misc_feature (172)..(172): "n" may be a, t, c, g, other or unknown
  misc_feature (204)..(204): "n" may be a, t, c, g, other or unknown
  misc_feature (207)..(207): "n" may be a, t, c, g, other or unknown
  misc_feature (220)..(220): "n" may be a, t, c, g, other or unknown
  misc_feature (245)..(245): "n" may be a, t, c, g, other or unknown
  misc_feature (296)..(296): "n" may be a, t, c, g, other or unknown
  misc_feature (303)..(303): "n" may be a, t, c, g, other or unknown
  misc_feature (327)..(327): "n" may be a, t, c, g, other or unknown
  misc_feature (335)..(335): "n" may be a, t, c, g, other or unknown
  misc_feature (349)..(350): "n" may be a, t, c, g, other or unknown
  misc_feature (355)..(355): "n" may be a, t, c, g, other or unknown
atccaaagtttcatccattttataatcaatattagtaaaaaagaccaagacacatgggctgggtgcggnggctcatgcctgtaattacagcactttgggaggccgaggngggcggatcacctgaggncaggaattcgagaccagcctggccaacagggtganaccccatntntacttaaaacacaaaaattagcagggcatggnggngcacacctgttgncccagctacttgggaggctgaaacnggagaatcttttgaacccgggaggcggaggttgcagcgagccaagatcacnccactgnactccaacctgggtgacagactgngactctgncaaaaacaaaaacnnaaccn

SEQ ID NO: 10183 - DNA, 540 bp, Homo sapiens
  misc_feature (157)..(157): "n" may be a, t, c, g, other or unknown
  misc_feature (200)..(200): "n" may be a, t, c, g, other or unknown
  misc_feature (285)..(285): "n" may be a, t, c, g, other or unknown
  misc_feature (337)..(337): "n" may be a, t, c, g, other or unknown
  misc_feature (339)..(339): "n" may be a, t, c, g, other or unknown
  misc_feature (387)..(387): "n" may be a, t, c, g, other or unknown
  misc_feature (418)..(418): "n" may be a, t, c, g, other or unknown
  misc_feature (457)..(457): "n" may be a, t, c, g, other or unknown
  misc_feature (461)..(461): "n" may be a, t, c, g, other or unknown
  misc_feature (493)..(493): "n" may be a, t, c, g, other or unknown
  misc_feature (495)..(495): "n" may be a, t, c, g, other or unknown
  misc_feature (505)..(505): "n" may be a, t, c, g, other or unknown
  misc_feature (508)..(508): "n" may be a, t, c, g, other or unknown
  misc_feature (518)..(518): "n" may be a, t, c, g, other or unknown
gagggcaagtcttgctctgtcacccaggctggaatgcagtggcacgatttcagctcactgcaacctctgcctcccaggttcaagcgattcttgtgcctcagcctctcaagtagctgcaattaacaggtgtgtgccaccatgcctggctaatttttgngcttttagtagagatggggtgtcaccatgttgcccaggctggnctggaacttctgggctcaagtgatccacctgcttcagcttcccaaagtgctgggattacaggcgtgagccactgcgcccggcctntatcacacttcttatgccacccaggtaagcattttcatggggctggcttctntncctttttggagaacacggatcaagggctgaaactttggaatctacagnaccagccataatcaacccctttttccacaanacacacaaggcaagcatgcctggatccttttggacacangggncacatacatgccctaattacttgggagagatntncatacctttnttntgggggggcncacgttccttttcaaggccaaa

SEQ ID NO: 10184 - DNA, 534 bp, Homo sapiens
  misc_feature (347)..(347): "n" may be a, t, c, g, other or unknown
  misc_feature (379)..(379): "n" may be a, t, c, g, other or unknown
  misc_feature (383)..(383): "n" may be a, t, c, g, other or unknown
  misc_feature (398)..(398): "n" may be a, t, c, g, other or unknown
  misc_feature (440)..(440): "n" may be a, t, c, g, other or unknown
  misc_feature (449)..(449): "n" may be a, t, c, g, other or unknown
  misc_feature (462)..(462): "n" may be a, t, c, g, other or unknown
  misc_feature (476)..(476): "n" may be a, t, c, g, other or unknown
  misc_feature (484)..(484): "n" may be a, t, c, g, other or unknown
  misc_feature (514)..(514): "n" may be a, t, c, g, other or unknown
  misc_feature (532)..(532): "n" may be a, t, c, g, other or unknown
aaatagggacaaggtctcactatacttcccagactggtctccaactcctggcttcaagcaattctcctgcctcagcctcccaaaatgctggaattacaagcataagccaccccacctggccagtttcagtctattattattattattattataatttaagttctggaatacatgtgcagaacgtgcaggttacataggtatacatgtgctaaggttgtttgctgcacccatcgacctgtcatctacattgggtatttctcctaatgctatccctcccctagtctcccattccctgacaggccctggtgtgtgatgttcccctccctgtgtccatgtgttctcactgntcaattcccactgatgagtgagaacatgtggngttnggtttctggccttgngaaaagtttgctgagaatgatagtttccagctttatccattncctggaaangacatgaccggancctttttaatggcnggataagnattccatgggatatacgtgccggaatttcnttaatcccggctatcctnga

SEQ ID NO: 10185 - DNA, 528 bp, Homo sapiens
  misc_feature (19)..(19): "n" may be a, t, c, g, other or unknown
  misc_feature (25)..(25): "n" may be a, t, c, g, other or unknown
  misc_feature (57)..(57): "n" may be a, t, c, g, other or unknown
  misc_feature (128)..(128): "n" may be a, t, c, g, other or unknown
  misc_feature (140)..(140): "n" may be a, t, c, g, other or unknown
  misc_feature (148)..(148): "n" may be a, t, c, g, other or unknown
  misc_feature (156)..(156): "n" may be a, t, c, g, other or unknown
  misc_feature (160)..(160): "n" may be a, t, c, g, other or unknown
  misc_feature (213)..(213): "n" may be a, t, c, g, other or unknown
  misc_feature (292)..(292): "n" may be a, t, c, g, other or unknown
  misc_feature (319)..(319): "n" may be a, t, c, g, other or unknown
  misc_feature (342)..(342): "n" may be a, t, c, g, other or unknown
  misc_feature (392)..(392): "n" may be a, t, c, g, other or unknown
  misc_feature (456)..(456): "n" may be a, t, c, g, other or unknown
  misc_feature (488)..(488): "n" may be a, t, c, g, other or unknown
  misc_feature (494)..(494): "n" may be a, t, c, g, other or unknown
  misc_feature (506)..(506): "n" may be a, t, c, g, other or unknown
  misc_feature (509)..(509): "n" may be a, t, c, g, other or unknown
  misc_feature (512)..(512): "n" may be a, t, c, g, other or unknown
  misc_feature (525)..(525): "n" may be a, t, c, g, other or unknown
caaacaaataagttttatnggcatntaaaaacaaaattcacccaacattgaaacgtnctttaatatttatgttgttgttttcttgtttcttttttactcactgcagtatgaggaacaaatcacaaacncttactttgganaaacaganaccgtagngtanattttacaaaatcactttttaaaatctctgtattgggctcctcaaatacctanagccagtctttgcataaaatatcacagctttatctataaccttaaaattctgcagcagcctaaagatatggataagatntaccaccacttgctattctgaaatatncctattaccatatccaacctaangatagtatctaaaaaattctttcttccataggaagtctctgacaagctgntattcatttccttgacgttaaaagaatctggggccaacatttggattttatccgaaaaaaattnaaaaaaggttacccaccatggtcattttaagnacaatnggttttccaggnaantgngcccatttttttnagg

SEQ ID NO: 10186 - DNA, 503 bp, Homo sapiens
  misc_feature (328)..(328): "n" may be a, t, c, g, other or unknown
  misc_feature (367)..(367): "n" may be a, t, c, g, other or unknown
  misc_feature (394)..(394): "n" may be a, t, c, g, other or unknown
  misc_feature (419)..(419): "n" may be a, t, c, g, other or unknown
  misc_feature (422)..(422): "n" may be a, t, c, g, other or unknown
  misc_feature (444)..(444): "n" may be a, t, c, g, other or unknown
  misc_feature (475)..(475): "n" may be a, t, c, g, other or unknown
  misc_feature (481)..(481): "n" may be a, t, c, g, other or unknown
  misc_feature (494)..(494): "n" may be a, t, c, g, other or unknown
  misc_feature (501)..(501): "n" may be a, t, c, g, other or unknown
gagggctggggaaaatcttaatggccaaaacataaaacaaacctgcgtgcacacaaacgagacacaattacagaaagcatagagcctggctctccccctggcctcaaatcccccaggtttgagagtcattacttctgggggatggtgactagaaggtggtgggagggaggcttctaggagctggtgatggtttggtggtttcttcacttgggagcctgctcctgggtgagtgcgggtgaaaagtcatccagcaagaccttcgctcttctctgcaggcaggtaggttatccttgagccatggggatgacagaaagctcccactgctcancaggggtcccggctcctgcgcaggtctctacggactctnttctgtgacctgggcaatgcccaactnttttcaatattcaagctgtggcgtncancaaggccgttatgggaaggaangggcaaaaggatcaaagtaattgggaaccantgacancgggttaagggtnatgccanaa

SEQ ID NO: 10187 - DNA, 447 bp, Homo sapiens
  misc_feature (57)..(57): "n" may be a, t, c, g, other or unknown
  misc_feature (104)..(104): "n" may be a, t, c, g, other or unknown
  misc_feature (256)..(256): "n" may be a, t, c, g, other or unknown
  misc_feature (322)..(322): "n" may be a, t, c, g, other or unknown
  misc_feature (383)..(383): "n" may be a, t, c, g, other or unknown
  misc_feature (398)..(398): "n" may be a, t, c, g, other or unknown
  misc_feature (415)..(415): "n" may be a, t, c, g, other or unknown
  misc_feature (426)..(426): "n" may be a, t, c, g, other or unknown
  misc_feature (434)..(434): "n" may be a, t, c, g, other or unknown
  misc_feature (444)..(444): "n" may be a, t, c, g, other or unknown
  misc_feature (447)..(447): "n" may be a, t, c, g, other or unknown
atcatcaagtcttaccatttatttctttatggggttaaacaagagcagagaggcctntgccccacaatgcaacaaaacagaaagcagtacatatacagagactntcaccgaaacacagaggcagggtaagagggagggcagagacaactgaatcatagctgggtaagggaggaagggatgggggactactaggaaaccagtttggagactcagtcataggaactagtgcaagaaagtcctactcatgaagcacggngtagaaaatggcataagaaagctgcccggctctgctgtctgtgatggagggcaggggcagccgganaggtggtggaagattagggtggtggggtggatgggggcagtcaaatgactttgaggtggantgaggtgcccctttnccctgccctggcaaggncttgggctggnctgaccangggtcttctnggn

SEQ ID NO: 10188 - DNA, 544 bp, Homo sapiens
  misc_feature (156)..(156): "n" may be a, t, c, g, other or unknown
  misc_feature (435)..(435): "n" may be a, t, c, g, other or unknown
  misc_feature (471)..(471): "n" may be a, t, c, g, other or unknown
  misc_feature (515)..(515): "n" may be a, t, c, g, other or unknown
  misc_feature (540)..(540): "n" may be a, t, c, g, other or unknown
  misc_feature (543)..(543): "n" may be a, t, c, g, other or unknown
gagacagaattttgctcttgttgcccaggctggagtgcaatggcgtgatcttggctcactgcaacctccaccttccgggttcaagcaattctcctgcctcagccttccaaggagctgggagtataggcatgcaccaccatgcccggctaattttgngtttttagtagagacggggtttctccatgttggtcaggctggtctcgagctcccaacctcaggtgatctgcctgccttggcctcccaaagtgctgggattacaggcatgagccaccgtgcccagctgactttcaaacgaaagttcactttaccatcaaactcaaaatgtagagatatattcaatcgtgtgtttagtacagcttgtaaattcccattcaaagggtacactgtaaatagaatgcaggctcataacaagtatttttcaactcttaggatggntgaaagactgtctcagaaaatctgcaatgaactcanaaggacacttttttgtcagaaaaattcaccgttaactttaaaantacatggctgaggccccaaggcatngtna

SEQ ID NO: 10189 - DNA, 497 bp, Homo sapiens
  misc_feature (18)..(18): "n" may be a, t, c, g, other or unknown
  misc_feature (156)..(156): "n" may be a, t, c, g, other or unknown
  misc_feature (169)..(169): "n" may be a, t, c, g, other or unknown
  misc_feature (220)..(220): "n" may be a, t, c, g, other or unknown
  misc_feature (232)..(232): "n" may be a, t, c, g, other or unknown
  misc_feature (236)..(236): "n" may be a, t, c, g, other or unknown
  misc_feature (240)..(240): "n" may be a, t, c, g, other or unknown
  misc_feature (285)..(285): "n" may be a, t, c, g, other or unknown
  misc_feature (287)..(287): "n" may be a, t, c, g, other or unknown
  misc_feature (308)..(308): "n" may be a, t, c, g, other or unknown
  misc_feature (405)..(405): "n" may be a, t, c, g, other or unknown
  misc_feature (414)..(414): "n" may be a, t, c, g, other or unknown
  misc_feature (453)..(453): "n" may be a, t, c, g, other or unknown
  misc_feature (466)..(466): "n" may be a, t, c, g, other or unknown
  misc_feature (489)..(490): "n" may be a, t, c, g, other or unknown
  misc_feature (495)..(495): "n" may be a, t, c, g, other or unknown
gacagggtctcactctgncacccaggttggaatgcagtggtgcaatcctggtccactgcaacctccgcctcccaggctcaagcgatacacccacctcagcctcccgagtagctgggaccacaggcatgcgccattacacctggccaatttttttgnatttttggtaganatgagttctcaccatgttgcccaggctggtcttgaactcctgagctcaggngatccacccttntcancctntgaaagtgctgggattacaggcatgacccacggccttcggcccananacagtttctataaaagacggnttcttgccatctcagcacaccatcgcgaaggagtgacgggctctttcagagacatggagggccaggcaccttgtgaccacatgcacaagtgaccagnacacaaaantggtggaagcaactgggccctgggcgcctgacccaaggnggggcccatccangggaatgggatttggatggaganncccgngg

SEQ ID NO: 10190 - DNA, 279 bp, Homo sapiens
  misc_feature (190)..(190): "n" may be a, t, c, g, other or unknown
  misc_feature (199)..(199): "n" may be a, t, c, g, other or unknown
  misc_feature (202)..(202): "n" may be a, t, c, g, other or unknown
  misc_feature (225)..(225): "n" may be a, t, c, g, other or unknown
  misc_feature (233)..(233): "n" may be a, t, c, g, other or unknown
  misc_feature (253)..(253): "n" may be a, t, c, g, other or unknown
  misc_feature (270)..(270): "n" may be a, t, c, g, other or unknown
gggagacagggtctcactctcactcaggctggagtgcagtgttgcaatcttggctcactgcaacctctgcctcttgggttcaagtgattcttgtgcctcagcctcccgagtagctgagattacaggcatgtgccactgtgcctggctaatttttgtatttttagtagagacggggttttgccatgttggncaggctggnctnaaactcaaactcctgatcccagntgatccgnccgccttggcttcccaaatngctgggattacaggctntgagccacc

SEQ ID NO: 10191 - DNA, 555 bp, Homo sapiens
  misc_feature (451)..(451): "n" may be a, t, c, g, other or unknown
  misc_feature (479)..(479): "n" may be a, t, c, g, other or unknown
  misc_feature (517)..(517): "n" may be a, t, c, g, other or unknown
  misc_feature (526)..(526): "n" may be a, t, c, g, other or unknown
  misc_feature (537)..(537): "n" may be a, t, c, g, other or unknown
agattcatctttttaatgacatcctaaaattcagaggaggggccagcgggacctctgggctcagcggctgtgaaggagggacccgcaacacccgctaaggcaggtaattgcaagaaggcactcgcgagggggacttcaagcccctcttctatttcttcatataaaatcagggggatggggaaagctccaagggcgagggaagcagagagagtttctctcccagcctatggaataaggaagaggtgaggaaggggtgggtgctgggagcaagaaactgccaagtccaggacctgccctcacacagacacacacagcccgcacctgccctccctctaaaatctgcatccggggctgtaaggaagccccgtgttcaagcccccatctcttctcccttctagctggtaccaagttggtaatcaccactctgggtgatgtagcgaacccagggcanggcctggtaccacttttcttaatgatcntcatgtatcggacctggatccagaaaacggtgaaattnggggatctnaacttgacccnattgggggggccggcctt

SEQ ID NO: 10192 - DNA, 534 bp, Homo sapiens
  misc_feature (473)..(473): "n" may be a, t, c, g, other or unknown
  misc_feature (498)..(498): "n" may be a, t, c, g, other or unknown
  misc_feature (502)..(502): "n" may be a, t, c, g, other or unknown
  misc_feature (504)..(504): "n" may be a, t, c, g, other or unknown
  misc_feature (512)..(512): "n" may be a, t, c, g, other or unknown
  misc_feature (522)..(522): "n" may be a, t, c, g, other or unknown
  misc_feature (527)..(527): "n" may be a, t, c, g, other or unknown
ccaagtcttgccctgtcgcccaggctggagtgcaatggcgcaatctcggctcactgcaacctctgcctcctgggttcaagcaattctcctgcctcaccctcccgagtatctgggactacaggcatgtaccaccatgcccagctaatttttgtatttttagtagacatggggtttcaccatgttggccaggctggtctcaaactcctgaccttgggatccacccaccttggcctcctaaagtgctgggattacaggcatgagacaccacgcctggccggtagacccaaatcttaaagcacatactctactctagtggttcctaaactttagcatgcatcagaatcatttgtagactttgttaaaacacagagttttggttacactcctacggttttttaatcaagtaggtctggggtggaggctgacagctagagtttctaacaagttcccaagcccaactattgctggtccanaaaccccactttgagaaccactggnctancnccaacagnggtcaatagnttacngggttat

SEQ ID NO: 10193 - DNA, 486 bp, Homo sapiens
  misc_feature (3)..(3): "n" may be a, t, c, g, other or unknown
  misc_feature (41)..(41): "n" may be a, t, c, g, other or unknown
  misc_feature (68)..(68): "n" may be a, t, c, g, other or unknown
  misc_feature (140)..(140): "n" may be a, t, c, g, other or unknown
  misc_feature (177)..(177): "n" may be a, t, c, g, other or unknown
  misc_feature (191)..(191): "n" may be a, t, c, g, other or unknown
  misc_feature (221)..(221): "n" may be a, t, c, g, other or unknown
  misc_feature (329)..(329): "n" may be a, t, c, g, other or unknown
  misc_feature (367)..(367): "n" may be a, t, c, g, other or unknown
  misc_feature (392)..(392): "n" may be a, t, c, g, other or unknown
  misc_feature (394)..(394): "n" may be a, t, c, g, other or unknown
  misc_feature (415)..(415): "n" may be a, t, c, g, other or unknown
  misc_feature (452)..(452): "n" may be a, t, c, g, other or unknown
  misc_feature (459)..(459): "n" may be a, t, c, g, other or unknown
  misc_feature (479)..(479): "n" may be a, t, c, g, other or unknown
  misc_feature (483)..(483): "n" may be a, t, c, g, other or unknown
ganacagagtctagctctattgccccaggctggagtgcagngggacgatctcggctcactgcaacctntgcctcctgggttcaagcgattctcctgccttagcctcctgagtagctgggattacaggtgcccgccaccgngtccggataatttttggatttttagtaaagatggggnatcatcaaattggncaggctggtctcgaattcctgacctcaggngatccacctgcctcggcctcccaaagtgctggggttacaggcatgagccactgcacctagccagtcagggcacttttaaaagcaaaggtcctattcaaatgtaagggntccttatatgcaaagaggttacacgaagctgcagcagntagattaagagccaacacatccttntntgcccctgggacacatgagcnttaacaaactccacaaacttttcctttatcacccaanaatgaancctggtatgcttaaaaaccngggngaa

SEQ ID NO: 10194 - DNA, 517 bp, Homo sapiens
  misc_feature (451)..(451): "n" may be a, t, c, g, other or unknown
  misc_feature (464)..(464): "n" may be a, t, c, g, other or unknown
  misc_feature (480)..(480): "n" may be a, t, c, g, other or unknown
  misc_feature (482)..(482): "n" may be a, t, c, g, other or unknown
  misc_feature (497)..(497): "n" may be a, t, c, g, other or unknown
  misc_feature (513)..(513): "n" may be a, t, c, g, other or unknown
  misc_feature (517)..(517): "n" may be a, t, c, g, other or unknown
gagacagagttgtgctgttgcccaggctgtagtgcagtggcccgatcttggctcactgcaacctctgcctccaacgttcaagcaattctcgtgcctcagcctcctgagtagctgggattacaggcgtgcgtcaccacacccggctagtttttgtatttttagtagagatgggggtttcaccacgttggccaggctggtctcgaactcctggcctcaagtgatctgcccgtcttggcctcccaaagtgctgggattacacgcgtgagccaccgtgcccagcctgcataatgatcttttaaaaggcattacatactgtcaagtttacacgacacaattcacttaactatgatgaattatgaagttaaatgtcaagctcggtaaagtgtcagcattttctatgcgaatgacctatttgcagaaaagcacacaatggcaaaacaagtggttaatnacaaaaaccactnacaagagtgaatatcntntaggaaagtttcacntaaaaaaattaaccgnttan

SEQ ID NO: 10195 - DNA, 535 bp, Homo sapiens
  misc_feature (468)..(468): "n" may be a, t, c, g, other or unknown
  misc_feature (505)..(505): "n" may be a, t, c, g, other or unknown
  misc_feature (512)..(512): "n" may be a, t, c, g, other or unknown
  misc_feature (514)..(514): "n" may be a, t, c, g, other or unknown
  misc_feature (516)..(516): "n" may be a, t, c, g, other or unknown
  misc_feature (529)..(529): "n" may be a, t, c, g, other or unknown
  misc_feature (531)..(531): "n" may be a, t, c, g, other or unknown
cctatgaaaatgtttttaattttcatcttttggaaatacatttttcatttttatttccaccatacaaaaatgtgaaatatctaacaatgatctatctgaagcgggtggagcaaagcagcgccatgagcgtttgtcgttgctgtgatctgtttcaacggagaatgggctgggacatgttgtagatttgcacgatttcacacacacacacacacacacacacacacacacacacacacacagacacgtacgcacacacgctgccgtaccccgagaccgccatccaaacaaacgaacagagactctggaaagtgaacacagcgccacgcataagaacagaagttaacctttttactcgtacatcccccatgagaaactcacgtcttaggagaaaggaactctacataaatatgcccaaaggccagggcatacggcaagccctctcatgggtgggcatgagtggacatcttnctgaaggaaggacaagcttgaaagcgcatggtttcangcagctntngngggaagcagggangnccaa

SEQ ID NO: 10196 - DNA, 558 bp, Homo sapiens
  misc_feature (452)..(452): "n" may be a, t, c, g, other or unknown
  misc_feature (469)..(469): "n" may be a, t, c, g, other or unknown
  misc_feature (489)..(489): "n" may be a, t, c, g, other or unknown
  misc_feature (504)..(504): "n" may be a, t, c, g, other or unknown
  misc_feature (549)..(549): "n" may be a, t, c, g, other or unknown
  misc_feature (552)..(552): "n" may be a, t, c, g, other or unknown
agagattcagggtgccatttttatttcccatggagctgaggacctgagcacaggcagccaccagggctgctcagaccctcccgaccttcaggggtgggagtggttttggagttctgatcttgggtaggcaggcctgtcatattgccagaaatacaggcatagaggcaagagagagaagaagaggagaagaagatagcaggaagtaaaggggacaatgaagagagctaagggactccttccttcttcctcctggcactgtctccttcctctttctgcctccacaccaatctcttggccaccagctggaatgtcaaacagtggatggtgacagcaggcagggaaggggccagctgcaaggcaggcccaggcaggaggccggcagcaggaggaacaggatgacacccttgggaagcagttggtgatgggcagggcacacagatggccctgctganggctttttcgtacgaanggtcttccatctccaaggcnacacgtgaagtcttntccaactgggcattgggcttgactgccgccccggatcttcaaganggncaaaaa

SEQ ID NO: 10197 - DNA, 509 bp, Homo sapiens
  misc_feature (477)..(477): "n" may be a, t, c, g, other or unknown
  misc_feature (480)..(480): "n" may be a, t, c, g, other or unknown
  misc_feature (484)..(484): "n" may be a, t, c, g, other or unknown
  misc_feature (491)..(491): "n" may be a, t, c, g, other or unknown
  misc_feature (496)..(496): "n" may be a, t, c, g, other or unknown
  misc_feature (498)..(498): "n" may be a, t, c, g, other or unknown
  misc_feature (500)..(500): "n" may be a, t, c, g, other or unknown
gcaacacaagtcaatctttattgaaaactgcagtattaatacataacaattcttgttacaataaacgtgcttttgagatttttaaatctgagctcatctcatcagattgcataaaaaattaaaatagtatcaattgacacctaactgaactggctcaggatggaaattccattccttggcatggatacgtaagttcaatgcagaggtgagggatgcctttaacactggaagacaatgctgacttagcttaaaaaaagtaccgagagaacggtgtaaaaaacggtatttaaaaatcatttttaaaaaaacaaaaaggaaccgtttcttctttagttacaatccatgaggctctctagggcctctccgtgtggccagcacagcaaccctgctaggagcacaaacggctggcctgagatctggcccagctgccttgcccactggtctgcatagggactcatgggcacagcctgtggtgangangganaccctgncatgncnancctgggagc

SEQ ID NO: 10198 - DNA, 554 bp, Homo sapiens
  misc_feature (487)..(487): "n" may be a, t, c, g, other or unknown
  misc_feature (491)..(491): "n" may be a, t, c, g, other or unknown
  misc_feature (507)..(507): "n" may be a, t, c, g, other or unknown
  misc_feature (521)..(521): "n" may be a, t, c, g, other or unknown
  misc_feature (525)..(525): "n" may be a, t, c, g, other or unknown
  misc_feature (545)..(545): "n" may be a, t, c, g, other or unknown
agtagacacagggtcttgctatgttgccaaggctagtctcaaactcctggcttcaaaggaccttcccatctcaacctcccaagcaaccagcattacagagatgagcagctgtgcctggctgaattcttttttttttttttttttttgagacagggtctcaatccgtctcccaggctggagtgcaatggcacaatctcagctcactgcaacctccacctcctgggttcaagtgattttcctgcctcagcctccctagtagttgggattacaggcactcgccaccgcaaccagctaacttttgtatttgtagtagagacagggtttcaccacgttggccaggctggtctcaaactcctgacctcaggtgatctgcctgcctcggcctcccaaagtgctgagattccggcgtgagccactgacccggcctgaattcatttttggataaaaatccaaaggagtttataatgcctgcaataaaaatcattcntatnccttttaacatcttantggccaaacacatnattngcaattaaaaataacccccnaaaaaaatt

SEQ ID NO: 10199 - DNA, 539 bp, Homo sapiens
  misc_feature (40)..(40): "n" may be a, t, c, g, other or unknown
  misc_feature (229)..(229): "n" may be a, t, c, g, other or unknown
  misc_feature (331)..(331): "n" may be a, t, c, g, other or unknown
  misc_feature (468)..(468): "n" may be a, t, c, g, other or unknown
  misc_feature (474)..(474): "n" may be a, t, c, g, other or unknown
  misc_feature (503)..(504): "n" may be a, t, c, g, other or unknown
  misc_feature (526)..(526): "n" may be a, t, c, g, other or unknown
  misc_feature (539)..(539): "n" may be a, t, c, g, other or unknown
gacacagagtcttgctctgtcacccaggctggagtgcagnggcacaatctcagctcactgcaacctccacctcctgggttcaagcgattctcctgccgcagcctcctgagtagctgggattacaggtgcctgccaccacacctggctattttttttttaatgagactgagtttcactcttgttgcccaggctgggatgcaatgacgtgatcttggctcactgcaacctntgcctcccgggttcaagcaattctcctgcctcagtctcctgagtagctgatattacaggcatgtgccaccatgcccagctaacttttttgtatttttagtanaaacggggtttctccatgttggtcaggctggtctcaaactcctgacctcaggtgatccacccacctcagcctcccaaagtgctgggattacagacgtgagccactgcgcctggccctaatttttggatttttagtanaaacangggttcactatgttggccaagctggcttnnaacttctgacctcaggggaacnggttactttgccn

SEQ ID NO: 10200 - DNA, 547 bp, Homo sapiens
  misc_feature (534)..(534): "n" may be a, t, c, g, other or unknown
  misc_feature (538)..(538): "n" may be a, t, c, g, other or unknown
  misc_feature (547)..(547): "n" may be a, t, c, g, other or unknown
gatggtggaaatcattttattctcatacacaggttattacagcacaattaggaagagacaatcacaactcacacaatgctatattcaaattatgccaaagtcccaacatattcatttcatttgcaagttaattcctaaaagatcagagcagagtgatacacaagtttattaacacagactacaacgtcaatgaagcctcctggcattgtcggaaatagaaaacatgtataaaaatcttcgaaatgcaggttaaaatgcaaatccaagtgaaaggaaaaagcactactgtgaagcctaacggcaattatttcccttcaaaggaggtttgtgtccagctggagagaaggcctggtggacagaagacaaaggaaggcaaaattcctaagggagaaattcaaaaaaatgatgggggtgcttgccctctgctgggcctctttgcagcgacttcaacttaatgcataacgccgtaaggttgtaagaaaagcaacttttggcttgatcttaaaaaagctgatttcttttggcagcatattncggngagaactgn

SEQ ID NO: 10201 - DNA, 552 bp, Homo sapiens
  misc_feature (492)..(492): "n" may be a, t, c, g, other or unknown
  misc_feature (547)..(547): "n" may be a, t, c, g, other or unknown
agatagagtctcgctctgtcacccaggctggagtacagtggcgcaatcttggctcactgcagcctccacctcctgggttcaagcaattctccctgcctcagcctctcaagtacctgggattacaggcacatgctaccatgcctggctaatttttttatttttggtagagacagggtttcaccatgttggccaggctggtctcaaactcctgacctcaggtgatccgcctgactcagcctcccaaagtgttgggattacaggcgtgagccaccgcacctggcctggtccatttccttttaaccctgcctttccaatgagaacctgggagatgattaaaatattccattttatatgtacactgcactttaaaaatttttttaatttaactttttgagacaagggctccctctgttgcccaggctggagtgcagtggcacaagtctttggtcactgcagcctcaaccttctggactcaagcaatccttccatctnaagcttccaagtagctgggctactgggcacatggcccaaaaccagttaattctgnatttt

SEQ ID NO: 10202 - DNA, 577 bp, Homo sapiens
  misc_feature (396)..(396): "n" may be a, t, c, g, other or unknown
  misc_feature (407)..(407): "n" may be a, t, c, g, other or unknown
  misc_feature (430)..(430): "n" may be a, t, c, g, other or unknown
  misc_feature (442)..(442): "n" may be a, t, c, g, other or unknown
  misc_feature (444)..(444): "n" may be a, t, c, g, other or unknown
  misc_feature (461)..(461): "n" may be a, t, c, g, other or unknown
  misc_feature (499)..(499): "n" may be a, t, c, g, other or unknown
  misc_feature (522)..(522): "n" may be a, t, c, g, other or unknown
  misc_feature (524)..(524): "n" may be a, t, c, g, other or unknown
  misc_feature (535)..(535): "n" may be a, t, c, g, other or unknown
gcctctgctaggccagtatatttctgtacaaacaagataatgcaagatttgacagttaaggctttgaagcacagcacacaaaatgaaacaatttaaaaccccttcataaaaatgggaaaaattcccaggccaaaggaaaaaaaaagccttcacagaaagagactgacactcgactccccccctgctgaggtgtggccagtgagtctgggtgtgagctgccacctgacagccagctctgaggtatcaaaggagctccgagtgcaagttgaagacttcagcaagccagcccccggcccccacacccgttcataggcagtcggaatgcagatctcggtggcaggtgggctcttgcacaagtccagagtgataaaacaatcacagatgactaaatgccanggactgggtgnaagcaggtactggcttgcagctngggcacttctgncnttattagacctggtggnaccatgacgtgaggagaacggagcacagttccttccgngcttctgccgggcttgttaaggngngcatggttgancctggcaagcatttggattttggagtctcactcttaggccaa

SEQ ID NO: 10203 - DNA, 590 bp, Homo sapiens
  misc_feature (522)..(522): "n" may be a, t, c, g, other or unknown
  misc_feature (582)..(582): "n" may be a, t, c, g, other or unknown
  misc_feature (585)..(585): "n" may be a, t, c, g, other or unknown
ctctttctttctctctctccttctctctctctcttttatttgtttatttatttatttttttgccctttgtgcttctccttttcctgcctgaaatgtaaacatggtggctggagttccagcacgtctagagaacatgaaagtggcagagcaaaggagcagaaagctagaaagagctggattccctgattcacaatggtaccccggtaccctaaaccagccctgggttccttatctctgtattttctttcacatgacagagaaataaacccttgtctctgttattatttggattcgttgtttcatgcagaaacattaaatcttgactgaataccaacacctaatcagaggcagaagccagctacccacactctgcacccagagtcatagattcacagagctattgccttaatggatcatcctcacacctagttcacaagatcaacgacaggctggcagcttaaagaattcccgggggaacaaggcattggaaaagtcaaggttcctggggccacccatccctangggatttggattctatgaaggcttgggtgaaggttgggaaaggaatttttaaaaactttnccnggggg

SEQ ID NO: 10204 - DNA, 570 bp, Homo sapiens
  misc_feature (412)..(412): "n" may be a, t, c, g, other or unknown
  misc_feature (468)..(468): "n" may be a, t, c, g, other or unknown
  misc_feature (488)..(488): "n" may be a, t, c, g, other or unknown
  misc_feature (536)..(536): "n" may be a, t, c, g, other or unknown
  misc_feature (550)..(550): "n" may be a, t, c, g, other or unknown
aaactagatttttatttttattatatttccatgtgaagacatcacccaaatgtcagcggagcaaaagactttatggtcagataccaaaggcgtacagttgatcccactttggaataaatgcccagaaggtaataagcattatcagtgagtgagagctctaggcacaaaataagttctcattcagaaagtggacagagatatgaagcagtgaaacatatagctttaaaaactggaaatcattcatgacatttgttttcaaagtaaacattatctgcatttcaagaactgtaattttcaaaagtagaatcaggcctgattaagtaatatttatgacttacagataaaattcaaaaataaaaatgaaaactcttctggcccttgaagagatagaaaactatatttttttccctgnatggcccagagattatcagtattcatccctaaggtcgcttaaaaaaaggtattttnaatcggctttctggtctgcncttttacatagcaaacgggttatatggcctcttgctgagtgaaaggangataattcctgctnaatgaaagaactccatttcc

SEQ ID NO: 10205 - DNA, 469 bp, Homo sapiens
  misc_feature (382)..(382): "n" may be a, t, c, g, other or unknown
  misc_feature (393)..(393): "n" may be a, t, c, g, other or unknown
  misc_feature (396)..(396): "n" may be a, t, c, g, other or unknown
  misc_feature (420)..(420): "n" may be a, t, c, g, other or unknown
  misc_feature (432)..(432): "n" may be a, t, c, g, other or unknown
  misc_feature (440)..(440): "n" may be a, t, c, g, other or unknown
  misc_feature (453)..(453): "n" may be a, t, c, g, other or unknown
acaattagggtcatttaactatttaattgctttttgagattattgctgaaattaggaagggagcattgaaatgggaagggggaggttagagaagacagagatttaaaagaagcaagtaccattttccaagtataaaactcgtaatattaaaagtgacatagcagtatattcacatgactacttaagtctaatgcagaaacaagacagtacagtttttgcagaggccgatgtgacatctgcatgcaacatgatactattaagtgtctctacccacctctgctacagagtagctgctatatgcacacatacacaaaaatacacaatgaaaagcctacaaaaggtggtaagtccaactaagggtcttaaatggaaaattaaaggnggctccagtanggncctttggaaaaccccttttccctnggcccatggtgncccagccnaaaggaaccaagngctcggggctgggtct

SEQ ID NO: 10206 - DNA, 285 bp, Homo sapiens
  misc_feature (3)..(3): "n" may be a, t, c, g, other or unknown
  misc_feature (27)..(27): "n" may be a, t, c, g, other or unknown
  misc_feature (114)..(114): "n" may be a, t, c, g, other or unknown
  misc_feature (136)..(136): "n" may be a, t, c, g, other or unknown
  misc_feature (148)..(148): "n" may be a, t, c, g, other or unknown
  misc_feature (163)..(163): "n" may be a, t, c, g, other or unknown
  misc_feature (215)..(215): "n" may be a, t, c, g, other or unknown
  misc_feature (225)..(225): "n" may be a, t, c, g, other or unknown
  misc_feature (240)..(240): "n" may be a, t, c, g, other or unknown
  misc_feature (249)..(249): "n" may be a, t, c, g, other or unknown
  misc_feature (262)..(262): "n" may be a, t, c, g, other or unknown
  misc_feature (278)..(278): "n" may be a, t, c, g, other or unknown
  misc_feature (284)..(284): "n" may be a, t, c, g, other or unknown
canggtaaggcttttgaaagatttatngaaataaattatctttgcctaaaaatttacctgtcacctttttcaattacttttcaacattctaaaaactttccgttatgtaaaatncatttaaactttgccaataatngtagataatacnggattcttcccaaanggactaccacaaaacaaagctttcaaagagtaaaaaaaaaaaaaaaaaaaangtaatccaanggggcataaaactgnggtctgtancctatgacttcanggttcaaatccttaangttaanc

SEQ ID NO: 10207 - DNA, 560 bp, Homo sapiens
  misc_feature (462)..(462): "n" may be a, t, c, g, other or unknown
  misc_feature (471)..(471): "n" may be a, t, c, g, other or unknown
  misc_feature (557)..(557): "n" may be a, t, c, g, other or unknown
  misc_feature (560)..(560): "n" may be a, t, c, g, other or unknown
cctggtgcagccagatgttctaacttttggacaaatgagcgtggtcagtaatgtacaataactcttgagtctgttactttggcctagctaagcccatctggccctcgggcatcctgcaagatgacagacagaagagcaagggcactatcagaaatggaacaggctgccccctactcctcccagcctctaccagtacacagagacagactggagatagagcattcgcagccagttggcatcttggttcttttgtcttctgaaaataaaaataagtgcttgtcttgtctttgggggtcaaagagaaccgcactaatttatttcctcgagggggcttttctggaggagaggatcctcaagtcctgtgccaaggtttcacgctgtttggccacacgccaggcctttcttctggatctggtctacacgtccagagatgatggaggaattgcatcagcatcatatgcncagtgaaanggtggctttttgtccaaaaaaggccatttccgggcctggtacatggcctaagggcctggcggaagtttgaaaagctggcttcaaanagn

SEQ ID NO: 10208 - DNA, 549 bp, Homo sapiens
  misc_feature (368)..(368): "n" may be a, t, c, g, other or unknown
  misc_feature (504)..(504): "n" may be a, t, c, g, other or unknown
  misc_feature (521)..(521): "n" may be a, t, c, g, other or unknown
  misc_feature (543)..(543): "n" may be a, t, c, g, other or unknown
gaaggacagggttaccgagtttatttcttggtgcctccaagagctcatggaaaagcagcacagtgagcaacaagcaacagtggtcagtaaatgtatatgactcaacacattgccacagtctcagcttggctgtgtggtacatgctgccaagggtcgggtgccaagagagagcagaatgaagccaggtccccaaggaagtgagggcccaaaatagggagtgtgggtgatgagggtggagttcaaatccagatgtcagagctacaatcgcccccagggtagcggagctcatgggcaagggctgggccaaggggctccttcccgaagtccaccaggaagttggggttcaacttcagccctccttttactgngtctacatcaacctgcagcatcacagagccttcctgatgagatcagggtaaaactgcttggcccaagccttgtcaacgacctggtgatgtaaaagcctttccatccagctgaactggacattttaagggcttcaancccccgttttccttggncccttagggctttggttggacntttatt

SEQ ID NO: 10209 - DNA, 553 bp, Homo sapiens
  misc_feature (405)..(405): "n" may be a, t, c, g, other or unknown
  misc_feature (412)..(412): "n" may be a, t, c, g, other or unknown
  misc_feature (438)..(438): "n" may be a, t, c, g, other or unknown
  misc_feature (448)..(448): "n" may be a, t, c, g, other or unknown
  misc_feature (451)..(451): "n" may be a, t, c, g, other or unknown
  misc_feature (490)..(490): "n" may be a, t, c, g, other or unknown
  misc_feature (497)..(497): "n" may be a, t, c, g, other or unknown
  misc_feature (505)..(505): "n" may be a, t, c, g, other or unknown
  misc_feature (522)..(522): "n" may be a, t, c, g, other or unknown
  misc_feature (542)..(542): "n" may be a, t, c, g, other or unknown
  misc_feature (552)..(552): "n" may be a, t, c, g, other or unknown
aacagttgataattttattatttgccaataatatgttcttctgatgtgatgcatataatttaaaattttctcatatcctaagtgtagtttttacatgatacagaaagtacagtgaaaaaaattacctgttgcgtataagagaggcaacatagatccaaacagacaaaacatttttggggtatgggtgtatgtatacagctaaagcaaattcaacattaggaacatcaatattatgtactccagtactatacacagcgtcaattaaaggcttcacttcagaataaggcatgtgaagaggaaatccagagaacctgtagtctcccagctgttttagcagttctgctctgtggcatcttctacatcttctccttgacttttttctaacagaggcaagaagtgacgcanagtagangtaccatacctattcccccgagtcanatggcgtggnctncagtccatgactgatctttaacctgctggaggacttggntactatnggcctatngggggctaagggtcctnggttctatacattctggctnggaaccgttnt

SEQ ID NO: 10210 - DNA, 505 bp, Homo sapiens
  misc_feature (1)..(505): "n" may be a, t, c, g, other or unknown
nnnnnnnnnnnnnnnnnnnnnnnnnnnnnnnnnnnnnnnnnnnnnnnnnnnnnnnnnnnnnnnnnnnnnnnnnnnnnnnnnnnnnnnnnnnnnnnnnnnnnnnnnnnnnnnnnnnnnnnnnnnnnnnnnnnnnnnnnnnnnnnnnnnnnnnnnnnnnnnnnnnnnnnnnnnnnnnnnnnnnnnnnnnnnnnnnnnnnnnnnnnnnnnnnnnnnnnnnnnnnnnnnnnnnnnnnnnnnnnnnnnnnnnnnnnnnnnnnnnnnnnnnnnnnnnnnnnnnnnnnnnnnnnnnnnnnnnnnnnnnnnnnnnnnnnnnnnnnnnnnnnnnnnnnnnnnnnnnnnnnnnnnnnnnnnnnnnnnnnnnnnnnnnnnnnnnnnnnnnnnnnnnnnnnnnnnnnnnnnnnnnnnnnnnnnnnnnnnnnnnnnnnnnnnnnnnnnnnnnnnnnnnnnnnnnnnnnnnnnnnnnnnnnnnnnnnnnnnnnnnnnnnnnnnnnnnnnnnnnnnnnnn

SEQ ID NO: 10211 - DNA, 540 bp, Homo sapiens
  misc_feature (464)..(464): "n" may be a, t, c, g, other or unknown
  misc_feature (495)..(495): "n" may be a, t, c, g, other or unknown
  misc_feature (516)..(516): "n" may be a, t, c, g, other or unknown
  misc_feature (527)..(527): "n" may be a, t, c, g, other or unknown
  misc_feature (529)..(530): "n" may be a, t, c, g, other or unknown
  misc_feature (532)..(532): "n" may be a, t, c, g, other or unknown
gagatggagtctcgctctgtcacccaggttggagtgcagtggcgtgatctcagctcactgcaagctctgcctcccgggtccacgccattctcctgcctcagcctcccgagcagccgggaccacaggcgcccgccaccatgcccaactaattttttgcatttttagtaaagacagggtttcaccatgttagccaggatggtctcgatctcctgacctcatgatccacctacctcagcctcccaaagtgctgggattacaggcgtgagccaccatgcccagcataaaattgctaatttttgacataaggcaatttctttctttttttgtttgagatggagtctcgctcagtcacccaggctggagtacagtggtgcgatctcagctcactgcaagctctgcctcccaggttcacgccatgctcctgcttcagcctccaagtagctgggaccacaggcgcccggcancgggcccagctattttttttggaatttaggnaaaacggggcctaacatcttncccggaagggntnnanttctgacc

SEQ ID NO: 10212 - DNA, 539 bp, Homo sapiens
  misc_feature (472)..(472): "n" may be a, t, c, g, other or unknown
  misc_feature (492)..(492): "n" may be a, t, c, g, other or unknown
  misc_feature (506)..(506): "n" may be a, t, c, g, other or unknown
  misc_feature (515)..(515): "n" may be a, t, c, g, other or unknown
  misc_feature (517)..(517): "n" may be a, t, c, g, other or unknown
  misc_feature (528)..(528): "n" may be a, t, c, g, other or unknown
  misc_feature (536)..(536): "n" may be a, t, c, g, other or unknown
atttttttttagacacagtctcgctctgtggcccaggctggagtgcagtcgtgcgatcccagctcactgcagcctctgcctcccaggttcaagcgattctcctgcctcagcctccccagtagctgggattacagggaccgtgccaccatgcctggctaatttttgtatttttagtagagatggggttttaccatgttggccaggctggtcaagaactcctgatctcaggttatctgtgttgcccgtcacagcagccactagccacatgtggctactgggtcctgaaaatgtgggtggcaaaacatacacccaattttgaatacttaatacaaaaaagagtacaaaatatctaatgatgttaattatatgttgaaataacttttagaaatttgtgttaaaatatatagtgaagattaatctcacctttttttttttctttggtgagacagggtctactgtcgccaagctggantgcaatggcgtgaaccttgnttactggaaccctnaacttacangnttaaagggaancttccccntaa

SEQ ID NO: 10213 - DNA, 547 bp, Homo sapiens
  misc_feature (478)..(478): "n" may be a, t, c, g, other or unknown
  misc_feature (492)..(492): "n" may be a, t, c, g, other or unknown
  misc_feature (500)..(500): "n" may be a, t, c, g, other or unknown
  misc_feature (512)..(512): "n" may be a, t, c, g, other or unknown
  misc_feature (535)..(535): "n" may be a, t, c, g, other or unknown
  misc_feature (547)..(547): "n" may be a, t, c, g, other or unknown
aagagacaggatctcattctgttgcccagagtggagtgcagtggcatgatcgtagcttactacaacctcaaattcctgggctcaagtgatccttctgcctcagccttccaaagtgctgggattataggcatgaggccactgcgcccagcctcgttagtcatttatctaccaaatacatggaaaactcacagaatcagagggtcttatcaccaaatctatgtttgctttgcaaaaggtcaggtcctgcattttcaaaatgttccttgtgctctgttatgctttatatttcatagcacagcaacgcccccttcacaacgactggtgatcatgttaccaatttctgtccatgtatctgaatgagggttataaacttcaactgagtccaaggtacctggagccaaaaaatcatggctggaagatcgacctccagaaacatacagaagaccattgactgccacaacacacatgcctgctctangcactttcattgangcaacttnaacccacttttnctctttaaaaggaaatttttctnccggttggaaan

SEQ ID NO: 10214 - DNA, 542 bp, Homo sapiens
  misc_feature (485)..(485): "n" may be a, t, c, g, other or unknown
  misc_feature (503)..(503): "n" may be a, t, c, g, other or unknown
  misc_feature (516)..(516): "n" may be a, t, c, g, other or unknown
  misc_feature (518)..(518): "n" may be a, t, c, g, other or unknown
  misc_feature (532)..(532): "n" may be a, t, c, g, other or unknown
  misc_feature (535)..(535): "n" may be a, t, c, g, other or unknown
  misc_feature (539)..(539): "n" may be a, t, c, g, other or unknown
caggaaaaaattatttaatagtataacaaaatgcaaaataaagtacccaagttacaaaacataaattcctttggttcatgatcacaccactatttttaccttccacatagctacagacatcacaccctcaaagtgaagtcaaactgtccccctcatactgaagatgtcatgccaaaaccatcacataccccactgttcagtgaaactgttggcaacttacatggaacagagctgtggggtaggaaaaagggaaaagggttgcgttaaaaaaaatggggagactctacacatgcagaacaagttagtgggagggagtgctctgctgggtcaacacgccatgaaccacacccctattcgtgctacatgaggctgagtccttgctacaaccacacagaaatacagacaatcaagtgaacctgagcacccccagggataacagaagaaaaatacagagaagcagaggagagaaagaatggcagcaagangcagatcacagaatccangggacacctagtncnaacctggtttaccnatngggnaag

SEQ ID NO: 10215 - DNA, 529 bp, Homo sapiens
  misc_feature (3)..(3): "n" may be a, t, c, g, other or unknown
  misc_feature (465)..(465): "n" may be a, t, c, g, other or unknown
  misc_feature (480)..(480): "n" may be a, t, c, g, other or unknown
  misc_feature (491)..(491): "n" may be a, t, c, g, other or unknown
  misc_feature (509)..(509): "n" may be a, t, c, g, other or unknown
  misc_feature (511)..(511): "n" may be a, t, c, g, other or unknown
  misc_feature (524)..(524): "n" may be a, t, c, g, other or unknown
  misc_feature (529)..(529): "n" may be a, t, c, g, other or unknown
ganaaggagttttgctgttgttgcctaggctggagtgcaatggcacaatctcagctcactgcaacctccgcctcccgggttcaagccattctcctgcctcagcctcccgagtagctgggattacaggcatgcaccaccaggcccagctaatttttgtatttttagtagagacggggtttctccatgttggtcaggctggtctccaactcctgacctcaggtgatctgcctgcctcagcctcccaaagtgctgggattacaggcatgagccaccacagccaggctatttttggaattttctaaagcacaaaacacataatgaaaatacagcttcaaatttccttccacatatattcttgagactaattacaaagttaaagtgaagggtgtttttttgtttccagagcatcttttttagagagaagtaggtatagatggagttgctatacataaagcactgaaaagnggctctttcaggatnggaaacaacantttcctttaaaataaccntntgggggccaaaanaaagn

SEQ ID NO: 10216 - DNA, 554 bp, Homo sapiens
  misc_feature (475)..(475): "n" may be a, t, c, g, other or unknown
  misc_feature (526)..(526): "n" may be a, t, c, g, other or unknown
  misc_feature (532)..(532): "n" may be a, t, c, g, other or unknown
  misc_feature (535)..(535): "n" may be a, t, c, g, other or unknown
  misc_feature (544)..(544): "n" may be a, t, c, g, other or unknown
  misc_feature (553)..(553): "n" may be a, t, c, g, other or unknown
caattattaaatgtttggcactttattaattaaataagctccaaaattaattacatacaaatcaaaggaataagaaacaataaatagtttattcagcaaacacctctctgcagcagccggcagctctgaggccgaggctggcgtcctgtggcagagggcctgtggattgccatgctcgctcccaggggtggctcaacagggacacaggtctactccttccacatcgggtttccggaacaacaactgaactctcattcattaccatcccattcattaccatttttttttacatacacgaaacacaccgcaatgtatagactaataagccaagagctttattgatgcagcaggcactttacaatgagcccaagagtgtccaccttctctgggaagacaggatgtctgtacaaactcttgggtttttttccacttcaaaaacacaagctttcccgtttaccacagcccttggatctgnacctggccaaaccattccttccccaaggcacacagggacctttggaccaanaccagnccngcaacttgnaaaaccggna

SEQ ID NO: 10217 - DNA, 537 bp, Homo sapiens
  misc_feature (18)..(18): "n" may be a, t, c, g, other or unknown
  misc_feature (125)..(125): "n" may be a, t, c, g, other or unknown
  misc_feature (172)..(172): "n" may be a, t, c, g, other or unknown
  misc_feature (199)..(199): "n" may be a, t, c, g, other or unknown
  misc_feature (247)..(247): "n" may be a, t, c, g, other or unknown
  misc_feature (307)..(307): "n" may be a, t, c, g, other or unknown
  misc_feature (390)..(390): "n" may be a, t, c, g, other or unknown
  misc_feature (395)..(395): "n" may be a, t, c, g, other or unknown
  misc_feature (483)..(483): "n" may be a, t, c, g, other or unknown
  misc_feature (500)..(500): "n" may be a, t, c, g, other or unknown
  misc_feature (512)..(512): "n" may be a, t, c, g, other or unknown
gagacggagtctcactgngtagcccaagctggagtacagtggtgtggctcactgcaacctctgtctctggggctcaagcgattctcatgcctcagcctcccaagtagctgggactacaggcttgngctaccatgtccagctaatatatatatatttttttattttagtaganacggggtttcaccatgttgcccagggnggtctcgaactcctgagctcaggagatcagcccgactcggcctcccanagtgctgggattaccagcatgagcaaccatgcccggcctaatttaagttttttttaatgngatgttgaagatgcttcagaaatgactagtcactctcacatgactataccactgctgcatgaggcataaggtaccttccctgncctgnacaccacaacgcaccacaactgacacgtcgtggggcccttcacagacacctgtggatggaatgaatgaagggcaaccattacatcccnggacagaaccttggaanctgggcattgtnccaaggcccggccggaaaaatggct

SEQ ID NO: 10218 - DNA, 544 bp, Homo sapiens
  misc_feature (443)..(443): "n" may be a, t, c, g, other or unknown
  misc_feature (464)..(464): "n" may be a, t, c, g, other or unknown
  misc_feature (493)..(493): "n" may be a, t, c, g, other or unknown
  misc_feature (523)..(523): "n" may be a, t, c, g, other or unknown
  misc_feature (531)..(531): "n" may be a, t, c, g, other or unknown
  misc_feature (544)..(544): "n" may be a, t, c, g, other or unknown
gaaacggagtctcattctgtcacccaggctggagtgcagtggtgtgatctcggctcactgcaacctccacctcccaggctcaagcgattctcctgcctcagcctcccgagtggctgggactacagacatgtaccaccacacctagctaatgtttgtattttttagtagatatggtgttttactatgtttgccaggctggtctttaactcccgacggaccccaagtgatctgatcacctcggcctcctaaagtgctgggattacaggtgtgagtcaccgcgcccagcctatgtattttttatttttatttttttgttgcagagatggtgaggatgtcttgctttgttacccaggttggtcttgaatttgtggctttaagtgatcctcccaccttggcctccaaagtgctcgggttacaggcgtaagccaacgtgcctggcctgnatttattggaattcctttttncattctcatcttaatgcattttccaaatngagaaggacatccttctggcttacactttnaaaaattnccgttttcatggn

SEQ ID NO: 10219 - DNA, 512 bp, Homo sapiens
  misc_feature (435)..(435): "n" may be a, t, c, g, other or unknown
  misc_feature (439)..(439): "n" may be a, t, c, g, other or unknown
  misc_feature (451)..(452): "n" may be a, t, c, g, other or unknown
  misc_feature (461)..(461): "n" may be a, t, c, g, other or unknown
  misc_feature (476)..(476): "n" may be a, t, c, g, other or unknown
  misc_feature (497)..(497): "n" may be a, t, c, g, other or unknown
gtggtattaaaacatatatttatattataaatttccattctgaaaagcagatcaaaatgacactggaccatccagtcagttatggagtaatgggcttcctccaaagagaactgacttggcagaaatttaggttggtaggaatgtgattaacatggagtaaacgagatcaggttgtcagtataattttcataaggcttctacccactccagttgtaaggaatagtactgagggaactccaacagaatgtcttagaaggatgcttctcagagacaaagggtctctaagtttaactcttgacccctcttctccttacctaaagcttggggaagaaaataaatatttaatttttaactattcagagctttgggcacattataataattaaatattctggaggttaaatttctgacccttggcttataaattttctaacntacnttttaaaaaggnntcaatggcncctttttcagtaggncccccttgaaatttaaacctnggtctttcatatttt

SEQ ID NO: 10220 - DNA, 520 bp, Homo sapiens
  misc_feature (458)..(458): "n" may be a, t, c, g, other or unknown
  misc_feature (480)..(480): "n" may be a, t, c, g, other or unknown
  misc_feature (497)..(497): "n" may be a, t, c, g, other or unknown
  misc_feature (509)..(509): "n" may be a, t, c, g, other or unknown
  misc_feature (512)..(512): "n" may be a, t, c, g, other or unknown
  misc_feature (514)..(514): "n" may be a, t, c, g, other or unknown
  misc_feature (517)..(517): "n" may be a, t, c, g, other or unknown
agcaattatgagagcaaatatttattatgttccagacactaaatcgatgcattacatttagagacacttagttttacacagtgatcttaatagttaggtacagtcttaaatcccaatttatatttcaggaaaaagaaactgagaaagtattcatcatgattagaaaacaacaggcaaggtttgagctcaaatactctggacataaaatcttcactctgaatacacatattgctcatattttcctctccttgattccttgatgtacctggggtatcctgagcaacacactgacataccctccaagaacctttagttgatgttggtggtggtcatgggggtggttcctatggactacctaggtagcatggatggtggctaacaggctttgggcctcttcacatcagtgataaagtgaaacatggataaatgggaaggcaaggatgttatacccatactgncgggctttaggagggattaggnaactttctctggaaatntgaaaaagaggnaangngtnaat

SEQ ID NO: 10221 - DNA, 552 bp, Homo sapiens
  misc_feature (515)..(515): "n" may be a, t, c, g, other or unknown
  misc_feature (533)..(533): "n" may be a, t, c, g, other or unknown
ccaggaaacagaaaatgtctttggtctggtattaatatcaaaagaatttaactttaaaactgatcccaataagcatggcccttacacagttcatgaccaatatttagttatatgaaaatggttcattctcttctagaatctaatccagtgcagtcatctggtgaaagactggaagtcagaagacttttcaaaagcttctcactgaaatggtaatttggtaacacgggataaacagaattttgcataaatagcagacctttagtcactgaataccccattaaacagtactgctggaccatgatacttatatctgggagatgacttagttttaaattttttatgcagtttcttttcttgaaggaaaaacttccagacttcagaattttggaagctgaacgatgagcaggtttttcatattttgctgctcagacatttttcctatttctcagactttgcagttcttttcttaggtgctttagagcacctaaaatatcagcttgctggggggtcattcngggctttctgagagtccngaccggaaagtctggttgg

SEQ ID NO: 10222 - DNA, 286 bp, Homo sapiens
  misc_feature (64)..(64): "n" may be a, t, c, g, other or unknown
  misc_feature (157)..(157): "n" may be a, t, c, g, other or unknown
  misc_feature (238)..(238): "n" may be a, t, c, g, other or unknown
  misc_feature (240)..(240): "n" may be a, t, c, g, other or unknown
  misc_feature (243)..(243): "n" may be a, t, c, g, other or unknown
  misc_feature (259)..(259): "n" may be a, t, c, g, other or unknown
  misc_feature (262)..(262): "n" may be a, t, c, g, other or unknown
  misc_feature (277)..(277): "n" may be a, t, c, g, other or unknown
  misc_feature (283)..(283): "n" may be a, t, c, g, other or unknown
cccaagagccaagcagactttatttctgcagcaatctctgctggtcagggtgcctgcactcctntacccactgcccttcatggctgctgcagtggccgcagctgtggcccatggccagccacactgtcaaggttcagcgatgctgcagtcatagcanaagttgaagttggtggggggtgggggcacagggggtggccgctcggggatgggcacgttctccagctccagcagacgcagntnggnctccatggtcagcagntgntccaggtccagccgngtctgntcg

SEQ ID NO: 10223 - DNA, 534 bp, Homo sapiens
  misc_feature (445)..(445): "n" may be a, t, c, g, other or unknown
  misc_feature (459)..(459): "n" may be a, t, c, g, other or unknown
  misc_feature (483)..(483): "n" may be a, t, c, g, other or unknown
  misc_feature (488)..(488): "n" may be a, t, c, g, other or unknown
  misc_feature (507)..(507): "n" may be a, t, c, g, other or unknown
  misc_feature (519)..(519): "n" may be a, t, c, g, other or unknown
  misc_feature (532)..(532): "n" may be a, t, c, g, other or unknown
aaagaatgtgctgcttatatgcaatgggcttattattcctgttgttaattggaattggtatacagacattttccaatccttcaggtttcaactggcaaatgccagcagacatacccacagagccagagctcctcaggctcctccacgtccaacggcgtctcacagtcctgaggatgaggacctgggtgaggggagcacgggagacacagccatcaaggcatccacctccaggacagacaccagccaagaaccccctcagggcaaggcctctcacaagtccaactccacggattccaccgtaagtgctgtcaactggatgcgcatttacaaaatctgagttttctcaaagaagctgaagctttccgtgtcctcagtgattctggactcccagcgccgtaccactccctgccagccacacagggggacccacaggaagcaggccttncccgtggcgggccntgctgctatccggcttccttctgngcaancgtcctgaccgggaaaggntgagccaaccantggatcctggctnga

SEQ ID NO: 10224 - DNA, 488 bp, Homo sapiens
  misc_feature (321)..(321): "n" may be a, t, c, g, other or unknown
  misc_feature (372)..(372): "n" may be a, t, c, g, other or unknown
  misc_feature (421)..(421): "n" may be a, t, c, g, other or unknown
  misc_feature (458)..(458): "n" may be a, t, c, g, other or unknown
  misc_feature (462)..(462): "n" may be a, t, c, g, other or unknown
  misc_feature (471)..(471): "n" may be a, t, c, g, other or unknown
  misc_feature (478)..(478): "n" may be a, t, c, g, other or unknown
  misc_feature (485)..(485): "n" may be a, t, c, g, other or unknown
  misc_feature (488)..(488): "n" may be a, t, c, g, other or unknown
cggagggcagaacaaattcagactttattgtcagggagaggaaaaaggggagggccgtgggtggggggcctgggttgctacattgtcaagcagaaagagttgatgggaaggggaagaccagtgtaggccagacccctcccgggtcggcggctgaagggttgacgatacggaaaccacggagtcgggggtgggggagaggtgtcacacccccgcccgagttgtgcagtggaggtgactggtgggaggggacagccatgaggtctaggaacttgaatcggggaggctacagactcggcgaatcctgcgaaggggaagggcggnggcgaggcttctattgctttttgctcacagttttgcggaaggcgaggcggnggtgggcttggactggacaccccttgcccccctcggtaccccttgggcnatggtgctggtgaaaagaatggaacccggacttggangaanaaagccaanggaaagnctattgnggn

SEQ ID NO: 10225 - DNA, 471 bp, Homo sapiens
  misc_feature (422)..(422): "n" may be a, t, c, g, other or unknown
  misc_feature (438)..(438): "n" may be a, t, c, g, other or unknown
  misc_feature (449)..(449): "n" may be a, t, c, g, other or unknown
  misc_feature (452)..(452): "n" may be a, t, c, g, other or unknown
  misc_feature (455)..(455): "n" may be a, t, c, g, other or unknown
  misc_feature (457)..(457): "n" may be a, t, c, g, other or unknown
  misc_feature (461)..(461): "n" may be a, t, c, g, other or unknown
aaatcttatttcagaaaacttcctcttggggtaggaaagtacacatgaagcagcaaagtaacgaagaaaaacttaaatagggccttcagagatcccacacactacaaagattctgccaagccataagataagtgtgaagcccagtatatgtccagcttttctcctcaggacatcttcagtgtttcttctcttttaaacaccacatcaggttctagccacagacttgtgttttgggtgtgcctgctttgaggggtccatgcccagtgtgtctgctggtgacccaggactcagcagtaatgactaacggccgcccttcaggatcacagatgtgcttggtggtggtggcaaagcatggcacttgtgtgcagtgatgagaagcagcacacggcaaggctgagccctttatcagcaggcctccgtanagcgtgtctgcgttgncagctgccaanggnctnantggntggccgaccc

SEQ ID NO: 10226 - DNA, 530 bp, Homo sapiens; identical to SEQ ID NO: 7493
  misc_feature (1)..(530): "n" may be a, t, c, g, other or unknown

SEQ ID NO: 10227 - DNA, 527 bp, Homo sapiens
  misc_feature (107)..(107): "n" may be a, t, c, g, other or unknown
  misc_feature (197)..(197): "n" may be a, t, c, g, other or unknown
  misc_feature (423)..(423): "n" may be a, t, c, g, other or unknown
  misc_feature (433)..(433): "n" may be a, t, c, g, other or unknown
  misc_feature (462)..(462): "n" may be a, t, c, g, other or unknown
  misc_feature (474)..(474): "n" may be a, t, c, g, other or unknown
  misc_feature (504)..(504): "n" may be a, t, c, g, other or unknown
attcaacaaaagccttttattcattcaaaaattaaccattgggtttattccgcagatattaaaaaaaaaaaaaaaaaaaagaggggggcaaggcttcccatcacagngcccttaagttaattcacttgctatccagggatggcctagcagaggggtgtctgggaaacgctgccagaaatgtggtggcccagggcctntgaggactcacagccccctcctcgcctccccgctccagcctccctccggaccacccgtccggtggggttgcagcccccaggtgcgttggcggcttaccaccaccagggggcgcgccgcgcttccttagctcccttaaaattaaatgctgaaaccgcgctgggaacagggtgactttccgcctggcgggtgggcaatggaggctttttccagagacaagcctgcctnttccaggaanggatcccaggcattccgaccttcccaacnaacccctttcgnaaaaacccaaggttctggaacccaggggcncttgtttaggaacggcttgtaaa

SEQ ID NO: 10228 - DNA, 533 bp, Homo sapiens
  misc_feature (395)..(395): "n" may be a, t, c, g, other or unknown
  misc_feature (482)..(482): "n" may be a, t, c, g, other or unknown
  misc_feature (489)..(489): "n" may be a, t, c, g, other or unknown
  misc_feature (513)..(513): "n" may be a, t, c, g, other or unknown
  misc_feature (519)..(519): "n" may be a, t, c, g, other or unknown
  misc_feature (528)..(528): "n" may be a, t, c, g, other or unknown
cgagacggagtctcgctctttctcccaggctggagtgcagtggcgcaatcttggctcactgcaagctctgcctcccaggttcacgccattcttctgcctcagcctccccagtagctgggactacaggcgcccgccaccacgcctggctaattttttgtattttctttagtagagacggggtttcaccatgttagccagcatggtctcaatctcctgacctcgtgatccgcctgccttggcctcccaaagtgctgggattacaggcatgagccatcgtgcccggcctgaattcaccttccttatggggaacaatctgaagtaaagttgagctctacctagttagggctaaatggaactgttccatttgatttactatatataaaaactaaaatcanggttctgcaacttaactgggaagtgcatcaaaaataagataggggctgggattgggggttacacctataatcctaacacttgtgganggccaanatggaaaagtgcctgaaggccaanaagttnaagaaccanctggg

SEQ ID NO: 10229 - DNA, 535 bp, Homo sapiens
  misc_feature (194)..(194): "n" may be a, t, c, g, other or unknown
  misc_feature (389)..(389): "n" may be a, t, c, g, other or unknown
  misc_feature (396)..(396): "n" may be a, t, c, g, other or unknown
  misc_feature (411)..(411): "n" may be a, t, c, g, other or unknown
  misc_feature (473)..(473): "n" may be a, t, c, g, other or unknown
  misc_feature (484)..(484): "n" may be a, t, c, g, other or unknown
  misc_feature (487)..(487): "n" may be a, t, c, g, other or unknown
  misc_feature (513)..(513): "n" may be a, t, c, g, other or unknown
  misc_feature (532)..(532): "n" may be a, t, c, g, other or unknown
aagggcagaagcactttaatcctagagggagggtgaggcactgttgaaaagagaagcaaactttggcaggggtggccattctgccttgctgagtcatgggctgagatacggaagtcactttcaatcattttctacttctcccagggcactcagacaaaatcagtgcaaggtatatggaagtacagatgtactgnatcagactagtggaggtgaaaaggtttctgcagtataattaaccagttaatatgcagcatgaaagggaaaagtggacattactttggcacctgcaaacgtaaaaagtgggagtaaagagagaaggaaatatttactagtgagtactttacggtgaggcaaaaagtagtatccgttccctttcaccaagacactgnccactgnccactggccacaggngactcaaatcaaacccagaaccaccaccccttcattcttctcttcatcttattcagaacaantattatgctantanccatgactaagtccctggggaaactnttcaaaagaattggctttnggt

SEQ ID NO: 10230 - DNA, 257 bp, Homo sapiens
  misc_feature (198)..(198): "n" may be a, t, c, g, other or unknown
  misc_feature (201)..(201): "n" may be a, t, c, g, other or unknown
  misc_feature (211)..(211): "n" may be a, t, c, g, other or unknown
  misc_feature (228)..(228): "n" may be a, t, c, g, other or unknown
  misc_feature (238)..(238): "n" may be a, t, c, g, other or unknown
  misc_feature (256)..(257): "n" may be a, t, c, g, other or unknown
aagacagagtctcgctccgttacccaggctggagtgcagtggtgccatctcggctcactgcaacctccgcctcccagggtcaagtgattctcagcctcctgagtagctgggcctacaggcgtgtgccaccatgtccggctaatttttgtacttgtagtagagatgcggtttcaccacataggccaggctggtcttganctnctgacctcangtgatctgcctgccttngcctcccaangtgctgggattacaggcnn

SEQ ID NO: 10231 - DNA, 522 bp, Homo sapiens
  misc_feature (52)..(52): "n" may be a, t, c, g, other or unknown
  misc_feature (101)..(101): "n" may be a, t, c, g, other or unknown
  misc_feature (131)..(131): "n" may be a, t, c, g, other or unknown
  misc_feature (189)..(189): "n" may be a, t, c, g, other or unknown
  misc_feature (201)..(201): "n" may be a, t, c, g, other or unknown
  misc_feature (292)..(292): "n" may be a, t, c, g, other or unknown
  misc_feature (313)..(313): "n" may be a, t, c, g, other or unknown
  misc_feature (398)..(398): "n" may be a, t, c, g, other or unknown
  misc_feature (421)..(421): "n" may be a, t, c, g, other or unknown
  misc_feature (446)..(446): "n" may be a, t, c, g, other or unknown
  misc_feature (472)..(473): "n" may be a, t, c, g, other or unknown
  misc_feature (514)..(514): "n" may be a, t, c, g, other or unknown
aatccaaacaccaacttgaacaagagactttcagttttaaaacattttaagngggaaaccctgcctgtcaatgcatcattattgcccttcttgattgctgncttggtagatgattcactgcccctccctanaagaggactatgtgtcatctgcctgccccatgacctcagccttggccacatgacttgnggtaccagtctntacagaagaaggatgcctccttatatgcaaactcaggtgtggccatgtgatctgcactggccaatgaaatgtgggcacaagtgacacctgntatttccaagcataagcttanagcctatgaatggtttgccaggtttgcctttcctccttcacccttcctgggtataggacagaagacaggaaggagcagaactatngcagaccccagttgacacacagnacaagcaagcaataagccttgctgntgcaccctgggggtttgctttacagnntaacctagtttaaaagactgggaccgtctttacatgggatnccccaact

SEQ ID NO: 10232 - DNA, 538 bp, Homo sapiens
  misc_feature (472)..(472): "n" may be a, t, c, g, other or unknown
  misc_feature (474)..(474): "n" may be a, t, c, g, other or unknown
  misc_feature (490)..(490): "n" may be a, t, c, g, other or unknown
  misc_feature (521)..(521): "n" may be a, t, c, g, other or unknown
  misc_feature (527)..(527): "n" may be a, t, c, g, other or unknown
  misc_feature (531)..(532): "n" may be a, t, c, g, other or unknown
caattgcacagatatttattgggtggcaccatgcaagttaaacaactctttgcaaggcactgtgaagttaaatacaacaggcaaataatgtcctttcaaagggaatgttgttccttagtacagaacaatggccaccagggtttaggcatgctctcctcccacctggaggctcccactgacatctgaattcttctttccacaggttgccttggattcagtgacctttctttggagattttgaggaattttctgctgacctgacttcttcttcttcttcttgttcttcttcttttacttctctttcatcttgattttctttctcttctttagactcctttcttgatgtcatgactaattcctctagatctttattttttataagggtatgatgaagtttctcatatgcatcttcaaacttctcctctgcctgctggctctattttcaacctcctgatatggaagagaagacccncnaaattgaaaggggtgnaaaaagatttttggatttggaactcaatttntaaaanggcnngggaat

SEQ ID NO: 10233 - DNA, 536 bp, Homo sapiens
  misc_feature (463)..(463): "n" may be a, t, c, g, other or unknown
  misc_feature (475)..(475): "n" may be a, t, c, g, other or unknown
  misc_feature (535)..(535): "n" may be a, t, c, g, other or unknown
gagagggagtttcactcttgttgcccaggctggagtgcaatggcgcgatctcggctcaccgcaacctccgcctcctgggttcaagcaattctcctgcctcagcttcccgagtagctgggattacaggcatgcgccaccacatccagctaattttgtatttttagtagagacagggtttctccatgttggtcaggctagtctcgaactgctgaccttaggtgatccgcctgcctcagcctcccagagtgctgggattacaggcgtgagccaccgtgcctggcaggaccggtggtttttaatcttcgagtctcaatgcctgtggagaatttgacgaaagctatgggtatctacccaaattaacatccacgtacacaaaaatttggtgtacaatgctgggagtagcggggagggggagtagcacagattcccaggctttggggatgggggtgaagatttatgaacncaggttggtttnaatccaaccagaatcctaaggttttttcccatggttgagggggttttaatgggggaatgna

SEQ ID NO: 10234 - DNA, 548 bp, Homo sapiens; identical to SEQ ID NO: 5579
  misc_feature (1)..(548): "n" may be a, t, c, g, other or unknown

SEQ ID NO: 10235 - DNA, 530 bp, Homo sapiens
  misc_feature (70)..(70): "n" may be a, t, c, g, other or unknown
  misc_feature (144)..(144): "n" may be a, t, c, g, other or unknown
  misc_feature (194)..(194): "n" may be a, t, c, g, other or unknown
  misc_feature (441)..(441): "n" may be a, t, c, g, other or unknown
  misc_feature (457)..(457): "n" may be a, t, c, g, other or unknown
  misc_feature (487)..(487): "n" may be a, t, c, g, other or unknown
  misc_feature (491)..(491): "n" may be a, t, c, g, other or unknown
  misc_feature (505)..(505): "n" may be a, t, c, g, other or unknown
gccctctgagaaataattgtttaattgttattatattttttttccaagacagtcttcatctgtcacccanactggagtgcagtggcgcaatcttgcctcactacaacctctgcctcctgggctcaagcgattttcatgcctcancctcccaagatgctaggattacaagtgtgtgccaccacgccctgctcctntgagaaataaatgagtaaaatgcaccccctgtgagtgagatgatgcatctgacttgcaggaataaaccaagtgacatctggagatcactcatggaagctggcctggaacagggttgtgatttagcgagggaaagcccagtaacctgtggtgtttcctgtcttgcttctcccatagtgacttctggaaattcagggcctccttggtcacatcaatctcccgcttgatggcattgatgtgctgggtggnctcgctggcccttttncttcggtcatttaagaagggattgggttcnttgnaaaattcggtggantcactacctggtaattttaaactcc

SEQ ID NO: 10236 - DNA, 511 bp, Homo sapiens
  misc_feature (253)..(253): "n" may be a, t, c, g, other or unknown
  misc_feature (451)..(451): "n" may be a, t, c, g, other or unknown
  misc_feature (463)..(463): "n" may be a, t, c, g, other or unknown
  misc_feature (466)..(466): "n" may be a, t, c, g, other or unknown
  misc_feature (483)..(483): "n" may be a, t, c, g, other or unknown
  misc_feature (490)..(490): "n" may be a, t, c, g, other or unknown
  misc_feature (499)..(499): "n" may be a, t, c, g, other or unknown
  misc_feature (506)..(506): "n" may be a, t, c, g, other or unknown
cattgcccaagctggcctcaaattcctgggctcaagtgatcctccagcctcccaagtacaggcacatgccacaacacctggcccgaattatcattcttgccacataataaaggggagcatgtttccactggtggaatgtcgtactaaaacatcagaggctcataaaataattacatagttaataaagttttaagaaaattattaactataggcaacattttttcatgaccttctaagaatcaaggtggttcanagcatctgacccactgcttaatcaagctctcctatataattaaaggttactaggtggctttgactaaaattatgaaaagggacggaaatgtcttgtggagacacagtatgaatgatagagcaagactgcttcacgaaaatgtaaatgatcaagttattttttcccaaggtttaggaatccctgaagggtctgaacttntaaatgctaacntgnccaggccccatttaccntccgggncccaaggcnttcctancatat

SEQ ID NO: 10237 - DNA, 548 bp, Homo sapiens
  misc_feature (437)..(437): "n" may be a, t, c, g, other or unknown
  misc_feature (480)..(480): "n" may be a, t, c, g, other or unknown
  misc_feature (487)..(487): "n" may be a, t, c, g, other or unknown
  misc_feature (492)..(492): "n" may be a, t, c, g, other or unknown
  misc_feature (514)..(515): "n" may be a, t, c, g, other or unknown
  misc_feature (544)..(544): "n" may be a, t, c, g, other or unknown
  misc_feature (548)..(548): "n" may be a, t, c, g, other or unknown
ctttaaaataccctcaggccagtcccaagcatagcctggccctgaagtgccaattccagcacccccgtgggccaccctagacaccttggccagatctggacactcagggctgagattcaactaggaggcagaccacggaagcaagtttggaggggacagtccctgacagaggctagagcatcatccaagtggaggagatgagacagagggaagggagagggaggcctaaggatttccccagagggggaggtgcatgactgggcagggaaagcagcctgctcgcctggcggctgccaccatctctctcatcggtgggccctcagaccttgccccattgcttagggagacaatgactggccacagacacacccccacacacatttccagggtagacagaaggtaaaaaacaaaggtggttgctcccagcactgcctggnctgggagctccaactatcagagtccagtgaacaagccattatnggcaagnttggnccgtaaaggtggctggtggtgnngaatacttgggtgggtaaccaatgaaaanccgn

SEQ ID NO: 10238 - DNA, 472 bp, Homo sapiens
  misc_feature (416)..(416): "n" may be a, t, c, g, other or unknown
  misc_feature (435)..(435): "n" may be a, t, c, g, other or unknown
  misc_feature (442)..(442): "n" may be a, t, c, g, other or unknown
  misc_feature (463)..(463): "n" may be a, t, c, g, other or unknown
  misc_feature (467)..(468): "n" may be a, t, c, g, other or unknown
  misc_feature (472)..(472): "n" may be a, t, c, g, other or unknown
gcaaccaattcagatttttactggacattcatgacagaatgagatgtgcatccagctgcatcgcccagcccatccgctgcccagggcagctgacgagcagaaacacactctgcagtggcccttgtccgtgccggggccctcgcccgcagcaccgcacgttctttgtaggagcagaacccgaaactcagagcacagcttgccctgataactgtcttcccagctggcagccctctagaagatgtgggaaatgacacattcctgtccagacacaagccacagtcacccccctcccgagggcgtccacggcctgagggacccggctccattcagcagagccgcagcgctcaggtcctctcggcaacccacgatcacggcccacgtggtcctgcccatgcccccgctgccacgccccctgntgccacgcatgccccccgnttgccangcatgcccgggaacaaccagnagcnnggcn

SEQ ID NO: 10239 - DNA, 536 bp, Homo sapiens
  misc_feature (350)..(350): "n" may be a, t, c, g, other or unknown
  misc_feature (442)..(442): "n" may be a, t, c, g, other or unknown
  misc_feature (499)..(499): "n" may be a, t, c, g, other or unknown
  misc_feature (504)..(504): "n" may be a, t, c, g, other or unknown
  misc_feature (524)..(524): "n" may be a, t, c, g, other or unknown
  misc_feature (532)..(532): "n" may be a, t, c, g, other or unknown
cccatggtatgtttttaattctgaaaattaactgaaggagacaagagacaatttaaaattacagcacctctgatgaatagttaaatggatcatttatcctacagggataaactgtaaccaaaacagattgtggggctctagactccggacagcaccaaaaattcaagttgcatatgaagtcctaatacttacagttgatttccattcagtattcggtattttgctcacctgagaatagatactccccagagtgtatagaggcccctgtatattcaatgatgaccacaaagaatcaaacagaaatcagaaatgacagtccatggctctatggtttttaatgaatagtttgngtagattttcccatgaaacacccctgatcttagttgggtgatttatagacctatgatgttggtggtgatcagctaagcaaactagccaaacngaagtaatttcaaattaaggccttttactttgggctattactcattattgggatggngggtnaaggggaaaatcccaatttntggccctnacca

SEQ ID NO: 10240 - DNA, 550 bp, Homo sapiens
  misc_feature (456)..(456): "n" may be a, t, c, g, other or unknown
  misc_feature (468)..(468): "n" may be a, t, c, g, other or unknown
  misc_feature (492)..(492): "n" may be a, t, c, g, other or unknown
  misc_feature (516)..(516): "n" may be a, t, c, g, other or unknown
  misc_feature (533)..(533): "n" may be a, t, c, g, other or unknown
  misc_feature (541)..(541): "n" may be a, t, c, g, other or unknown
  misc_feature (549)..(549): "n" may be a, t, c, g, other or unknown
actaattttattaatttctataacaaattaccccaaaacttagtagcataagataaccatttattatgtgaatggattctgtgggtgaggccttcagacagagcacagttagcttaattttgtacattgtggggaatttagacagggcatgtccaggatgacttgctacttctcctcaaactttgtagcctctcctaggagactcactcagatgcctggcgattgctcttggctgtcagttggaggcctcagtgcccatccatgtgggcttctccatggtctctctgtgtgggctcctttgggctccttcacagcctgatgactggcttctccagaatgagtgtcccaaaaagagcaagccagatggaagctgtatcaccttttcttattctagcctcagaagtcccatagcaacacgtttcctggacactattctttagaaagtgagtcaccaanggcatattcaanggggaaaaggaattaagaatctancctttgggggaaaaagggttaaanaattggccaagaagttngggccttntgagtatnt

SEQ ID NO: 10241 - DNA, 469 bp, Homo sapiens
  misc_feature (355)..(355): "n" may be a, t, c, g, other or unknown
  misc_feature (435)..(435): "n" may be a, t, c, g, other or unknown
  misc_feature (438)..(438): "n" may be a, t, c, g, other or unknown
  misc_feature (442)..(442): "n" may be a, t, c, g, other or unknown
  misc_feature (466)..(469): "n" may be a, t, c, g, other or unknown
aagagacagggtctcacactatgctgcccaggctggactcgaactactaggcccaaagccatcctcctgtgtaaaccacccgagtagctgggagtacaggtgtgcaccaccacgcctgggctttgtagcatgtttaaaggaacctaggtgatttagtcaaaagagaacactgcatgaaccaaggcctcaggtgcttcttgctgccttcatttccacagaggagaacacagggatttagaggagatggaaacattttctaggcagttattgaataacggatctttggaggagttcgtggagtagtgtaaccagaaagtctttaaaattaaacccttctaatcgtttgtaagtgtanatggggggacttggaaatctccggggcctaatcatgctcgcaaaaggagtgacattaatagctttggagaagggggcttnctnttcntttccaggttaagtcaaccgtacnnnn

SEQ ID NO: 10242 - DNA, 519 bp, Homo sapiens
  misc_feature (351)..(351): "n" may be a, t, c, g, other or unknown
  misc_feature (384)..(384): "n" may be a, t, c, g, other or unknown
  misc_feature (431)..(431): "n" may be a, t, c, g, other or unknown
  misc_feature (447)..(447): "n" may be a, t, c, g, other or unknown
  misc_feature (455)..(455): "n" may be a, t, c, g, other or unknown
  misc_feature (463)..(463): "n" may be a, t, c, g, other or unknown
  misc_feature (472)..(472): "n" may be a, t, c, g, other or unknown
  misc_feature (480)..(480): "n" may be a, t, c, g, other or unknown
  misc_feature (511)..(511): "n" may be a, t, c, g, other or unknown
cggagcgtaggtgtgtttattcctgtacaaatcattacaaaaccaagtctggggcagtcaccgcccccacccatcaccccagtgtgcaatggctagctgctggcctcctccatctggtccctccagcctcacagcctcctcctgaagccctttccttccaggctccagaagagcaggagacaaacacaccccactgaggcccagctttaataaagtgcctgatacagagccaggggacagaacccaggtgatacagctcccgacagccatcccaggacgacagagggtcgagggagaccctcggaagcccccagtgactccagacaaaggggcaagccccaaaggcgcctncaacagttggaaaacctccctgctagagggcanaaaaggaggcctggccctttaagagcccagctaatggcaactggctnaagggcttaaaaaacnagctttanggtttggncccgtttcnttaaaagnccccaaccttgaaggagtttggccaaaaaanccctaaag

SEQ ID NO: 10243 - DNA, 563 bp, Homo sapiens
  misc_feature (400)..(400): "n" may be a, t, c, g, other or unknown
  misc_feature (423)..(423): "n" may be a, t, c, g, other or unknown
  misc_feature (552)..(552): "n" may be a, t, c, g, other or unknown
  misc_feature (557)..(557): "n" may be a, t, c, g, other or unknown
atcttttaacgttataattttatttcaaagaaaacagaaacagaacaaaaacaacctttgcatttgagggaggagattattttacagttttggaaaagaataagaacaattgtatcaggaaacaaatgattatgacagaaactcgcatccgacagctgcagtgaatccacgaggacacagaccatgctggtggccacagcagggccacaggtgaatccacaaggaaacacagaccatgctggcagccacggcagggccacagggcacggtctccatgtgttaatgtttaatgtcagcattttcatatggacagaaatcacgaagaaatcctgcaaaaatggcatcaatatgaacaaacccttgttataaaaagcaaaatattgataggaacaatatcttncagcgtgtgcgtttcacatttangctttactggatgaaactaagtcaaaattagaagcactgggctatcttccaccgacatatattttactggatataaccttcaagggttttcttaaccataggcttaaaaggattcttttttcccaatgngaccngacccc

SEQ ID NO: 10244 - DNA, 563 bp, Homo sapiens
  misc_feature (460)..(460): "n" may be a, t, c, g, other or unknown
  misc_feature (465)..(465): "n" may be a, t, c, g, other or unknown
  misc_feature (504)..(504): "n" may be a, t, c, g, other or unknown
  misc_feature (515)..(515): "n" may be a, t, c, g, other or unknown
  misc_feature (524)..(524): "n" may be a, t, c, g, other or unknown
  misc_feature (555)..(555): "n" may be a, t, c, g, other or unknown
  misc_feature (561)..(561): "n" may be a, t, c, g, other or unknown
gagcaaatgttgatttattacctcaggttgtaggcatttacaagacaaaacggagacatccagtgtgattccaagcaggctcatggactagtgcttaccataacccaggtgcaccagcaatctgggatatggtctcccacagaagcactgcatacagagaaggtgcatttatttattcagtagacagcaagatttcccagggagaggaaaaccgccctgccccacctctaccctggcttcccagacttctaaggtctttattcagcagtgactttcatttgatgaggtggctctcctctctcacgtcaccctgtcggccaccttgaccaataggtcaagggagacttctgccagctcgcttctgctctgctgatggcctcatcctgccactgtggcttttcaggctcttcctcctcttgccctggcggacgtggggccccactctggctttcttctttgnaccangcccttgcaatggattcttgctgcttgtaggaaaaaccngcttcttggangagcctttnttaaaacaaacctgggtgggccaaaactaanggtgcnct

SEQ ID NO: 10245 - DNA, 513 bp, Homo sapiens
  misc_feature (393)..(393): "n" may be a, t, c, g, other or unknown
  misc_feature (425)..(425): "n" may be a, t, c, g, other or unknown
  misc_feature (462)..(462): "n" may be a, t, c, g, other or unknown
  misc_feature (481)..(481): "n" may be a, t, c, g, other or unknown
  misc_feature (487)..(487): "n" may be a, t, c, g, other or unknown
  misc_feature (498)..(498): "n" may be a, t, c, g, other or unknown
  misc_feature (507)..(508): "n" may be a, t, c, g, other or unknown
aaaggataacatagatttatgtttatttgcattttatgtttccttatggttcatatgagtttattggaaaattagcaacatacacatcattttggggaatggaaagtgaggcagagtaagccagaacattcactgtaacattataagcaagtagaataaattgataataccttcaccagtaatgcactttccctagtggaaataaattatttgtataaatagcctcttgatgtttgtgtgttatttagttatacaaatcacatttttcttttttacatatggcactttaatgttagtactgaaaatgttttttctgacattttttcagtaattgtcatttacatcaaatatgcagctagagctaatagaaaaacagttaaaacaatttgttgnaatggtgagatatttataaggaaacatttatnaaagatcttctgtaagacagcttaaacttgaaaatcntatcaggccttaaaagcantcaagnggttttaccanccaaaggtnngaagc

SEQ ID NO: 10246 - DNA, 559 bp, Homo sapiens
  misc_feature (493)..(493): "n" may be a, t, c, g, other or unknown
  misc_feature (499)..(499): "n" may be a, t, c, g, other or unknown
  misc_feature (506)..(506): "n" may be a, t, c, g, other or unknown
  misc_feature (517)..(517): "n" may be a, t, c, g, other or unknown
  misc_feature (537)..(537): "n" may be a, t, c, g, other or unknown
  misc_feature (550)..(550): "n" may be a, t, c, g, other or unknown
  misc_feature (559)..(559): "n" may be a, t, c, g, other or unknown
gttgttgctgctgtttttactcggacaatgcttattttacagcggaattgacaaataaagccttattttacacatccgaagaaacaccatcacaggaggtttgtaggtcggctgtgtgctttccaaaacagcaaaatagattcttcccatccaaccccctttcctcttgtagagtagggtgtggctcgtggggcttcgtctctctgcaggcacagaaactggcagacctggtccctcctgagcgggccctgctcaagggaatggtgccagattttgaacacaggtaaacaggctccttcataacaacactgtgcatttctgtgtcattttgtttattgctcactgagttgttgccacctcagctcttggtggaaaacagtgggtgtccagaaattgctgacacaagaagatggattgcctatggtccgttagggacacagggcagccccagccagatcccactggtccatgcagggcatcgcagtagaaactnaacgtnccacttngtaacaggctncaagacaccaattccggcancatgggaaagaantaaaccttn

SEQ ID NO: 10247 - DNA, 569 bp, Homo sapiens
  misc_feature (507)..(507): "n" may be a, t, c, g, other or unknown
  misc_feature (519)..(519): "n" may be a, t, c, g, other or unknown
  misc_feature (530)..(530): "n" may be a, t, c, g, other or unknown
  misc_feature (557)..(557): "n" may be a, t, c, g, other or unknown
  misc_feature (562)..(562): "n" may be a, t, c, g, other or unknown
gagatggagtcttgctctgtcacccaggctggagtgcagtggcatgatcttggctcactgcaacctccgcctcctgggttcaagtgattctcctggctcagcctcctgaggagctggcattccaggcatgtgccaccacacccagctagtttttgtatttttagtagagatggagtttcaccatgttgggcaggctggtcttgaactcctaacctcaggtgatctgcctgcctcggcctcccaaagtgctgggattacaggtgtgagccacagcgctcaatctttccttctttcaagctgcaaataaatttatggaaaatgtgaacactcatcttctaatgcttccagaaaaatgaaattgagtaaaatggaagtgatggcataattcttctttcagggctatggagctcttgaagaattttactggtaataaagatcaccagcagcatggacacccagaagagaattgcaaagaagtaagtgggaaagaagatgtcaacataggcncgtatgactacnggggaaaatgncgtctttaaacaatggcaattggagcnttaantggccct

SEQ ID NO: 10248 - DNA, 532 bp, Homo sapiens
  misc_feature (492)..(492): "n" may be a, t, c, g, other or unknown
  misc_feature (499)..(499): "n" may be a, t, c, g, other or unknown
  misc_feature (511)..(511): "n" may be a, t, c, g, other or unknown
  misc_feature (519)..(519): "n" may be a, t, c, g, other or unknown
  misc_feature (521)..(522): "n" may be a, t, c, g, other or unknown
  misc_feature (526)..(526): "n" may be a, t, c, g, other or unknown
gctgaaagtgcatttagcaaagaactaagatataaaactgttaaatactcatatgatatacacatacatcagaaagaatttggcaataagttaacaccagcaatgtctggaggttgggttattcgattttttttgtttcccttttctttactctatccagaagcaggggctataattgtcacgggacccttgggatgtcgatttgccagccagaaacctctgtggcaggcagcgccttctgcctgagtattgctcgcgcccacagggctcgttccacccacttggcctggcaggctgcgcttggctcacactactggcctcgatctcacacctgccaagggggagccaggcacggagtggcaaagagtgtatgagcgaatgagcatggggtccagccactgtgcacagccacgcatgctagctgctgtggcaaggcagacagcttcaggcaccagcacaagtgccagcttcatgcaaggctttggcttggancaaatgntccacacatggntttaactntnngcanctggat

SEQ ID NO: 10249 - DNA, 539 bp, Homo sapiens
  misc_feature (524)..(524): "n" may be a, t, c, g, other or unknown
gagacggagtcttgctctgtcacccaggctggagtgcagtggcacgatgtcagctcactgcaagctccacctcccaggttcatgccattctcctgcctcagcctcccgagtagctgggctacaggcccagcaccacacccagctaatttttttgtatttttagtagagacggggtttcatcgtgttagccaggatggccttgatctcctgacctcatgatccacccgcctcggcctcccaaagtgctgagattacaggcgtgagccaccgcgtccggccatgatttactcttttttttgtaatttttcaaactaccatataataaacatgtctttctttacttttttttgagacaaggttttgctctgatgactgggctggagtgcagtggggcgtgagcacagctcactgcagtcttgacctcctgggccttgatcgcctgggtcttgaccttctgggccgaccttgagccctctgggcttaacaatcccctgcttaacctttgagtactggaccataacggngtaccatgttggtaa

SEQ ID NO: 10250 - DNA, 555 bp, Homo sapiens
  misc_feature (442)..(442): "n" may be a, t, c, g, other or unknown
  misc_feature (448)..(448): "n" may be a, t, c, g, other or unknown
  misc_feature (462)..(462): "n" may be a, t, c, g, other or unknown
  misc_feature (490)..(490): "n" may be a, t, c, g, other or unknown
  misc_feature (517)..(517): "n" may be a, t, c, g, other or unknown
  misc_feature (522)..(522): "n" may be a, t, c, g, other or unknown
  misc_feature (531)..(531): "n" may be a, t, c, g, other or unknown
aagctctcaaccagttttatttttcctcacaatgaacggaagaaaaaggcagaaataaatggtagggtcatttgctagtagaaaagaaagctgggattccccatttactttggagactgaggagaaagaactgctttccccactcgtgtctgggcaaagggtgtgcccagatgttggcaaaggaaccagacaaaatcaacagccagcagttttctgttccaaacagttagctcctctacagtccagagggaagctattcctgagttcattcaaggtgacagcggaagtgtttctctccttctgcttggcccaactgtgcctgagggctgatggatccagaccttgtaaacattcagctaggtgtaacataaccagaaaggctgaaggaaggctcttggccttcccagcttgagaagtaggggcctcatgtgtatctggtggnctgcanagcccaaagcaganagctatgatgaataaaatattttaatgntttctaaaataactcctttatatccanggatncttcagtanggccctattatcctaaagctcttg

SEQ ID NO: 10251 - DNA, 570 bp, Homo sapiens
  misc_feature (406)..(406): "n" may be a, t, c, g, other or unknown
  misc_feature (460)..(460): "n" may be a, t, c, g, other or unknown
  misc_feature (511)..(511): "n" may be a, t, c, g, other or unknown
  misc_feature (535)..(535): "n" may be a, t, c, g, other or unknown
  misc_feature (546)..(546): "n" may be a, t, c, g, other or unknown
  misc_feature (550)..(550): "n" may be a, t, c, g, other or unknown
  misc_feature (553)..(553): "n" may be a, t, c, g, other or unknown
  misc_feature (565)..(565): "n" may be a, t, c, g, other or unknown
gagacagagtctcactctgtcacccaggctggagtgcagtggtgcaatcttggctcactgcaacctccacctcctgggttcaagcaattctcttcctcagcctcccaagcagctgggattacaggcacgcaccaccacgcccagctaatttgtgtatttttagtagagatggggtttcatcatcttggccaggctagtcttgaactcctgacctcaagtgatccacctgcctcagcctccccagcgtgctgagattacaggcgtgagccaccacgcctggccaagttggctttcttttacacaacatgatgcctagtggattcacccatgtttctgtgtgcatccgcagttcattcctttttattgggtaggtagcattccattgtgtgaacacgccatgatttgnttactcattccactcctgagggacatttgagttttttccccttaagctttttgnaaattcaagcaccctttcataatttggcttcatctttcttcaagggaatcnctttttttttctcaaaaggatccngaacaataggnattnaanccttcctggaancgggc

SEQ ID NO: 10252 - DNA, 566 bp, Homo sapiens
  misc_feature (520)..(520): "n" may be a, t, c, g, other or unknown
  misc_feature (544)..(544): "n" may be a, t, c, g, other or unknown
  misc_feature (549)..(549): "n" may be a, t, c, g, other or unknown
  misc_feature (562)..(562): "n" may be a, t, c, g, other or unknown
gtatttttagtagagatggggtttcactgtgttaatcaggatggtctcgatctcctgacctcgtgatctgcccgcctcagcctcccaaagtgctgggattacaggcgtgagccaccgcctctggcctctgtgaaggctttcacaatgccctgggtcacctcaccagagaacatgcagctccgaatactggggctcccaccagcctgggagacccaggagagcagggctcggggctgactcatctgtgtccccagcttctgccagcacagggcctggccctcaggagacctcacaggatgtggctgaaaggacctgaatgcacccccagctggggccacattcctgtcccaacacgccagtgcccaccctctgccttggttgcccaggagacccagctgtctccttcctgccctgctgagctgaggccactgggagacagatttacacagaaagtcacaccgggggtgaagggcttttggaggctcaaacgactgtgggaacttggtattgggagcgcaanccaaccttgggggacaagggaagnttttnggccaaaaacccntaat

SEQ ID NO: 10253 - DNA, 570 bp, Homo sapiens
  misc_feature (486)..(486): "n" may be a, t, c, g, other or unknown
  misc_feature (531)..(531): "n" may be a, t, c, g, other or unknown
  misc_feature (546)..(546): "n" may be a, t, c, g, other or unknown
  misc_feature (550)..(550): "n" may be a, t, c, g, other or unknown
  misc_feature (569)..(569): "n" may be a, t, c, g, other or unknown
gagatggagtctcactctgtcgcctaggctggagtgcaatggcgtgatctcagctcaccacaacctccacctcctgggttcaagcgagtctcctgcctcagcctcccgagtagctgggattacaggccacaaccacgcctggctaatttttgtattttttagtagagatgggcttttgccatgttgaccaggctggtcttgaactcctgacctcaggtgacccgcctgcctcagcctcccaaagtgctgggattacaggtgtaagccaccgcactcagccatgcctgctgtttctcaaaaccaagacctgggggaagtggagaaagatggatgttttggaaatgaatgggctcaagaccaacaagagtgattgcaggtctcagatagtgcctctcccaccctagtcccgacctcctgaggaacccttcaggacatggcctgcaaaagactagggtgagcagggtatggcaccaagcacccattggnccagttggtgccacgcattcccgtgactgggaagagacaacgtanactggacttaccctntaanggggttaaacccggggggnc

SEQ ID NO: 10254 - DNA, 447 bp, Homo sapiens
  misc_feature (105)..(105): "n" may be a, t, c, g, other or unknown
  misc_feature (114)..(114): "n" may be a, t, c, g, other or unknown
  misc_feature (240)..(240): "n" may be a, t, c, g, other or unknown
  misc_feature (387)..(387): "n" may be a, t, c, g, other or unknown
  misc_feature (410)..(410): "n" may be a, t, c, g, other or unknown
  misc_feature (422)..(422): "n" may be a, t, c, g, other or unknown
  misc_feature (424)..(424): "n" may be a, t, c, g, other or unknown
  misc_feature (427)..(427): "n" may be a, t, c, g, other or unknown
  misc_feature (429)..(429): "n" may be a, t, c, g, other or unknown
  misc_feature (439)..(439): "n" may be a, t, c, g, other or unknown
gagacagagtctcattctattgcccaggctggagtgcaatggcacaatcttggctcactgcaacctctgcctcctgggctcaagtgattctcctgcctcagcctnccgagcagncgggactacaggaatatgccaccacacccagctaatttttatatttttagtagagacagggtttcaccatgttgatcaggctggtcttgaactcctgacctcaggtgatccacctgccttggcctnccaaagtgctgggaatacagacgtgagccactgcgcctggcccctcattcttgaaagacggattttctgggtacacaattctaggctatcactattttctcccaggactttgaagatattatttactatctttctggcttccactgntgcttttaatcaactacttattntcttctttccananaancnctttcttttntgccttaa

SEQ ID NO: 10255 - DNA, 562 bp, Homo sapiens
  misc_feature (474)..(474): "n" may be a, t, c, g, other or unknown
  misc_feature (550)..(550): "n" may be a, t, c, g, other or unknown
cttctcttttttgtcgcccaggctgagtgcaatggtgcaatcacggcttactgcagactcgacctcctgggctcagcctcctgaatagctgaggctacaggtgtgcaccaccacgcccagctaattatttgtacttttttgtagaggcagggtttcactatgttgcccaggctggtctcaaactcccgggctcaagcaatctgtccaccttggccttccaaagtgctgggattacaggcttgagccaccgccccagccccttcgtcttctatatttagaaacagtgttcttggaagcagacagatgctctgaggcctgagctcgtgtttatggcaagcaacacagccaaccatgcacagggaggtcatgtctggattagaatggccgacccattctaatgctctaaacgacgcattttcaaaagctttgacactggatcttaagaaaataagtaaactccttggtacaaaagcncttaagaaaattaattacattaaacacagttcaggaagcaccgtgtgatctggccatgccaggcaggcaaaggggntttcaggggggc

SEQ ID NO: 10256 - DNA, 545 bp, Homo sapiens
  misc_feature (263)..(263): "n" may be a, t, c, g, other or unknown
  misc_feature (373)..(373): "n" may be a, t, c, g, other or unknown
  misc_feature (413)..(413): "n" may be a, t, c, g, other or unknown
  misc_feature (440)..(440): "n" may be a, t, c, g, other or unknown
  misc_feature (451)..(451): "n" may be a, t, c, g, other or unknown
  misc_feature (490)..(490): "n" may be a, t, c, g, other or unknown
  misc_feature (495)..(495): "n" may be a, t, c, g, other or unknown
  misc_feature (509)..(509): "n" may be a, t, c, g, other or unknown
  misc_feature (518)..(518): "n" may be a, t, c, g, other or unknown
agagacaaggtctcgctctgttgcccaggccagaggactgtggcaccatcaccactaaatgcagcctcgacctcctgggctcacgttatcctcccacctcagcctcctgagtagctggactacaggtgcacaccaccacacccagctaagtttttatttttttagagacagggtcttgctatgttgcccaggctggtctcaaactcctggtctcaagcaatcctcccgccttggccttccaaagtgctgggattacaggctgnttttaacgtgtattatcttattactagtatatattacttgttgccccgtctgcccaaaaaagacaccactgaagtgtatatatgttgcaagttcctctccagtgaccctnctaccaactccacagagtcagctactagtaacagcatggngtatccttctagaactttccacaagcncacacaaccgngtaaatatgaaggttcccagaccaacctgcccacccggnttttnaaaaaaaaaaaagngggaatttnccaaaggcctggtttgaacggttcccc

SEQ ID NO: 10257 - DNA, 563 bp, Homo sapiens
  misc_feature (392)..(392): "n" may be a, t, c, g, other or unknown
  misc_feature (398)..(398): "n" may be a, t, c, g, other or unknown
  misc_feature (434)..(434): "n" may be a, t, c, g, other or unknown
  misc_feature (475)..(475): "n" may be a, t, c, g, other or unknown
  misc_feature (528)..(528): "n" may be a, t, c, g, other or unknown
  misc_feature (538)..(538): "n" may be a, t, c, g, other or unknown
agataaatctgttcagataagctccttatgaatccttcagatcgatgttcttgaggaaaacagtcaagctaaacagcaatgatgacttttatggtaaaggatgagctgatcactagctaagctacttagtcaccatcctgggagatgagctcacaggcaccaaggctttgcttcctgtggcctgctagttacagtgaaccagctccatggattgacaagggtacacaggatgacagcagagcaaaggagtttgccaagtatttgttctgtcattaagtattcaaaagaacatatatttttcttcatggaacataactttctaagaatgaaatttggggacttgaatgattcaaggtcaaatattaaacattagctccttcaccaatacctgncattgncattagaaaggaaggcctcttggttacgctactggngattcacaagggtcctttgtcggccaagaaggcccctttgnggcttggctttaactggcaatggaagcctaaacttttgcccttaggcatctanggctttccanggttggaagttgcaacccaatggtg

SEQ ID NO: 10258 - DNA, 554 bp, Homo sapiens
  misc_feature (419)..(419): "n" may be a, t, c, g, other or unknown
  misc_feature (474)..(474): "n" may be a, t, c, g, other or unknown
  misc_feature (483)..(483): "n" may be a, t, c, g, other or unknown
  misc_feature (491)..(491): "n" may be a, t, c, g, other or unknown
  misc_feature (530)..(530): "n" may be a, t, c, g, other or unknown
  misc_feature (539)..(539): "n" may be a, t, c, g, other or unknown
gaaacatgagctcacttggtgctctctggcctctttattcccatctccttaggctgaccctgacaagtgccagggccaggcttggaccaagcagtcaactgagtcagcctgccctgggaaccaggcaggggagggagcttacggacgggctaggctcaggagagtaagagagagcagatgaagggcagaagtccgtggccgcagaggcagctgagcatgagggatggagcgtgctgctgtcctgcaggtgccgttagccctgttttgcactggtggattgatctgctcaggcgcacagggagatggcacagcaggacccgccgcccagcctcgctgagggcatgctcccgcctcacctccagaggctgttgggcggaagccgaaaagctgcagcagttggggccagcgtgggactggangcccaggtgaatcttgtggggcaagggacggagcttaagctgtcccggcccgggnccttcccanccaaaggncctaaaaccttagcctttaatccttggggggtttgcttntccctgaancctggggttttctga

SEQ ID NO: 10259 - DNA, 575 bp, Homo sapiens
  misc_feature (479)..(479): "n" may be a, t, c, g, other or unknown
  misc_feature (521)..(521): "n" may be a, t, c, g, other or unknown
  misc_feature (559)..(559): "n" may be a, t, c, g, other or unknown
  misc_feature (575)..(575): "n" may be a, t, c, g, other or unknown
gggccaggccgggggaaggtgagggttggaaggcagaaggaagtgacaaaggccacctcagcacagcagtgagaggagctgaggccaagggaggcagtcacacaccctagctctgcaagacctccaagatggcccggaggatggcagcagctgccaccgccccggggtctggctgctccagccgtgctgagctgatataactggctcttccggctccagcttccatattcttggtggcctcggctgcagcttcggcactcttgactgctttggtcaggacttgtaacagatcagctcctgggctcttccaggcttggagctcctgccccgctgcccacagagaacccagcatagtcctgtcccctggagcagccttgccatacttctgcatggcttccaggcccggcatccatggcagcagaccaggctgggaagctggtcttggccttcagggcttgtgcaaccccagtcaggaacangccataaacgccccaaatgaaccttccatcttttcaagagcngaccgacaacttggaaaacaacttgcaaggcttgcaanggggtgggccctcctn

SEQ ID NO: 10260 - DNA, 550 bp, Homo sapiens
  misc_feature (422)..(422): "n" may be a, t, c, g, other or unknown
  misc_feature (470)..(470): "n" may be a, t, c, g, other or unknown
  misc_feature (542)..(542): "n" may be a, t, c, g, other or unknown
  misc_feature (545)..(546): "n" may be a, t, c, g, other or unknown
  misc_feature (550)..(550): "n" may be a, t, c, g, other or unknown
acaattctcatattttattttgttaatgcatgataaaaaattaacgtcatcattcagatccattatttggaatgaagaatttagtatttcctgactgcctaatttggcactttgaggaatttcctctgcacgctgagccccaaaatgcactattttctagaccaaaaatgaaaacgtgcgtatatacaagtgagctgaaaagttacaacacaagatgatcattttggtgaaaaataatccccccaaataagcagcatgtcatgtccttagaatatgttacactagaaagctagtaaaaattcaggctaaggaggcaatttagagttcaagttttatcacatatcagcaaagttttagccttcccttaaaaacagacaccttcaaagtgaaatcttgccagaagggttgatttttaattatgngtatatacaaacttctctattttaacattcaacatattcaggattaantctagaaaggagctatagctgattattaaaccaaatggttaggaccgaaggaaattgggcccccaattcatnganncctn

SEQ ID NO: 10261 - DNA, 476 bp, Homo sapiens
  misc_feature (56)..(56): "n" may be a, t, c, g, other or unknown
  misc_feature (85)..(85): "n" may be a, t, c, g, other or unknown
  misc_feature (101)..(101): "n" may be a, t, c, g, other or unknown
  misc_feature (106)..(106): "n" may be a, t, c, g, other or unknown
  misc_feature (285)..(285): "n" may be a, t, c, g, other or unknown
  misc_feature (297)..(297): "n" may be a, t, c, g, other or unknown
  misc_feature (326)..(326): "n" may be a, t, c, g, other or unknown
  misc_feature (457)..(457): "n" may be a, t, c, g, other or unknown
  misc_feature (476)..(476): "n" may be a, t, c, g, other or unknown
attttaatattttttattaagggctataaaaaatacccagaaagataaataaatgngatgcaatgatatctggcctaatatgaanaactttctttcactgnattgntttccttcacaatggccttcaaatcacaggaggcagtgattccatgccatttcctcttcttttattacacgctacaggatttctgaatcagtatccccgccctcagtcttctctttataaatcaaagtcattttcaatccaccgtttaaagggagcgtatttttttcttttccacgaanaggactctttgnttcactatggagggagaaaaaaaaattgnggcagaaaattattaagtatcatcgccatttttataaaaaatcatatcagaccataagccctacctttctcttaatttactattcctggatatgaaaaatggagctgatttggcaactcagttcctccatnccaggagccagggcagatn

SEQ ID NO: 10262 - DNA, 495 bp, Homo sapiens
  misc_feature (415)..(415): "n" may be a, t, c, g, other or unknown
  misc_feature (456)..(456): "n" may be a, t, c, g, other or unknown
  misc_feature (482)..(482): "n" may be a, t, c, g, other or unknown
  misc_feature (491)..(491): "n" may be a, t, c, g, other or unknown
ctgagacggagtctcgctctgttgcccaggctggagtgcagtggcgggatcttggctcactgcaagctccgcctcctgggttcatgccattctcctgcctcagcctcccgagtagctgggactacaggcgcctaccaccacgcccggctaattttttgtactttagtactagagacggggtttcaccgtgttagccaggatgctctcgatctcccgaccttgtgatttgcccgccccggcctcccaaagtgctgggattacaggtgtgagccacggcgcccggctggtggttttcatatatttacaatgttgtgcaaccaccaccccattatctaattccagaacatagcccgtcaccccaaaaaggaaccttgcatccatcatcagtcactctctatttcccctaccccacttncctggcaatcactaaatcactttttggtcatatgccattgnttaataatggacatttcatataaatnatacacaangggg

SEQ ID NO: 10263 - DNA, 473 bp, Homo sapiens
  misc_feature (21)..(21): "n" may be a, t, c, g, other or unknown
  misc_feature (74)..(74): "n" may be a, t, c, g, other or unknown
  misc_feature (84)..(84): "n" may be a, t, c, g, other or unknown
  misc_feature (86)..(86): "n" may be a, t, c, g, other or unknown
  misc_feature (98)..(98): "n" may be a, t, c, g, other or unknown
  misc_feature (152)..(152): "n" may be a, t, c, g, other or unknown
  misc_feature (160)..(160): "n" may be a, t, c, g, other or unknown
  misc_feature (202)..(202): "n" may be a, t, c, g, other or unknown
  misc_feature (209)..(209): "n" may be a, t, c, g, other or unknown
  misc_feature (259)..(259): "n" may be a, t, c, g, other or unknown
  misc_feature (344)..(344): "n" may be a, t, c, g, other or unknown
  misc_feature (395)..(395): "n" may be a, t, c, g, other or unknown
  misc_feature (407)..(407): "n" may be a, t, c, g, other or unknown
  misc_feature (420)..(420): "n" may be a, t, c, g, other or unknown
  misc_feature (436)..(436): "n" may be a, t, c, g, other or unknown
  misc_feature (453)..(453): "n" may be a, t, c, g, other or unknown
  misc_feature (457)..(457): "n" may be a, t, c, g, other or unknown
  misc_feature (471)..(471): "n" may be a, t, c, g, other or unknown
gccaaaacaaactttattgcnccaaaaaggaaaacaaaaaaaacaaaaaaacttcatttatatacagtcagatntaaagacatntntttgactcctgngcatatatttcctcaactcaagattagggcataaaagtcaggctgctatgccanacatgctntgccctatggcagggccaaggagaggattgtcacttgaaagngggaacncttaaatggatgacagacaacactggacccacagaccaagagcattcttntaagccctggagtagctcgaggaatggaagagggaaattggaagcagggtcccttttcgatcttcatgtgaagagacccagcctnttcaagggtatccaagataaacttcgttccccaaagcccaccaatccctgnccagtcctttgntttctgccttccnaataggacattctccnttggggccaagcccccnttgnacaaaatcctccangg

SEQ ID NO: 10264 - DNA, 497 bp, Homo sapiens
  misc_feature (417)..(417): "n" may be a, t, c, g, other or unknown
  misc_feature (462)..(462): "n" may be a, t, c, g, other or unknown
caggtttttatttttttatttcttatattttttaagacggagtttcactcttgttgcccaggtgcagtgcaatggcatgatctcgactcactgcaacctccacctcccaggttcaagggattctcctgtctcagcctcccaagcagctgggatcacaggcatgcaccagcacacccagccaattttgtatttttagtagagacagggttcctccatgctggtcaggctagtctcgaactcccgacctcaggtgatacacccgcctcggcctctcaaagtgctgggattacaggtgtgagccaccatgcctggcccctggggacacttttttcagaggccagatgtcaacttccatctccacatgcctcaagtttacacatcattgcatctcagcacagagccccatcatgtaagggntactttgggttattctggccctgtgagaagaaactattggcagcnaaagccatactggcctttggcaacttttcccaagt

SEQ ID NO: 10265 - DNA, 489 bp, Homo sapiens
  misc_feature (480)..(480): "n" may be a, t, c, g, other or unknown
  misc_feature (488)..(488): "n" may be a, t, c, g, other or unknown
gagacagagtcttgctctgtcacccaggctggagtacagtggcatgatctcaactcaccacaacctctgcctcctggttctcctaaatcgctgaagcgtttctcctgcttcagtctcccgagtagctggggttacaggcacaagccaccacgcctggctagttttttgtatttttagtagagttggggtttcaccatgttggccaggctggtctcaaactcctgacctcaagtgatccgcccacctcggctccccaaagtgctgggattacaggcgagagccaccacacctggcataaaatacattctttaaattcatattatctgcttctttttacttcttttaatgtggctcctggaaaatctaaaatttgattttagatctatggctccattatagcattcctattgggcagtgctggtcttcctttccatgagaaccctttagctgggaaaagtttttctggactaattttttttnaaattttna

SEQ ID NO: 10266 - DNA, 491 bp, Homo sapiens
  misc_feature (376)..(376): "n" may be a, t, c, g, other or unknown
  misc_feature (409)..(409): "n" may be a, t, c, g, other or unknown
  misc_feature (466)..(466): "n" may be a, t, c, g, other or unknown
  misc_feature (480)..(480): "n" may be a, t, c, g, other or unknown
aaagaagcccaaacacattttcttgctgtatttatgttgaattccccatctacaatgagcagtcacgaagatggtcttcttcagggcaacatggtcacaggactggggcaatccaggggactgagagggagcgtgaggatgggaggtggggctacctcctgctgtttcacattagagacaaactgtaacacagtccatgggcctgcaaccgtccccttttattatctggcataacgcgtgatgtagttgtccactttattctggaagtcctccttgtcctgcaaatgatgttctgtagcttcaatattcagtggatcatcaaaattcaaaaatcagtaaacaaagagtttaatccccaaacgacatcctttaatgntctcatgggagcccaaccagtgcccgcaattgnatggtctctcagtaactcagacatatttccctggctttgggaatgttggggtgccanatcttggtcaggcntttacttttgg

SEQ ID NO: 10267 - DNA, 495 bp, Homo sapiens
  misc_feature (430)..(430): "n" may be a, t, c, g, other or unknown
  misc_feature (451)..(451): "n" may be a, t, c, g, other or unknown
  misc_feature (461)..(461): "n" may be a, t, c, g, other or unknown
  misc_feature (481)..(481): "n" may be a, t, c, g, other or unknown
  misc_feature (493)..(495): "n" may be a, t, c, g, other or unknown
gagacggagtttcactcttgtcacccaggctgaagtgcaatggcatgatctcagctcactgcaacctctgcctcctgggttccagcgattctcctgcctcagcctccagagtagctgggattgcaggcacctgccaccacgcctggttaatttttgtatttttagtagagacggggtttcaccacgttggccaggctggtcttgaactcctgacctcaggtgatctgcccaccccagcctcccaaagtgctgggattacaggcgtgagccactgcacccagccaaaacgtttttataaagaggttttaaaaagatggttatgtgtatattatgtgtattttataattaaaaagttgggggaaacattttaaaatagtgaccatacccaattgttggtaaggctgggggcaaccggaattcataccactgntaatagaaatgaaaaaccggncaactacttnggaacagtttggcaagttcntttctttctttnnn

SEQ ID NO: 10268 - DNA, 431 bp, Homo sapiens
  misc_feature (404)..(404): "n" may be a, t, c, g, other or unknown
  misc_feature (410)..(410): "n" may be a, t, c, g, other or unknown
  misc_feature (413)..(413): "n" may be a, t, c, g, other or unknown
  misc_feature (422)..(422): "n" may be a, t, c, g, other or unknown
  misc_feature (424)..(424): "n" may be a, t, c, g, other or unknown
  misc_feature (426)..(426): "n" may be a, t, c, g, other or unknown
  misc_feature (428)..(428): "n" may be a, t, c, g, other or unknown
ggatacatcaaaggtctttattagcataggaacaacacacggtgtgcatctgtgtgttccccaaatgcacacaaaccctgtctctctcaagaatcactgatgtatttcatcgtagagttgagaatttctaggccatgaagctttctcagttgagcagcaaatctgggctcagctgtgcacagcttccccagagcaatgcctgcgttcacctgcacggccgtcttctgtgtgtcactgcctgcaagctttaacaagacctgcaaaaggtccgtctttagcagggaagacgcaacgttgggcacctccatgcagttaccaaggcagagggcagcgttgcccaccagaacctcatcctccgagctgagcagcttcatcataacgctcaactttttatccagtcttantacttnttnccgagcttnangnanacc

SEQ ID NO: 10269 - DNA, 499 bp, Homo sapiens
  misc_feature (442)..(442): "n" may be a, t, c, g, other or unknown
  misc_feature (444)..(444): "n" may be a, t, c, g, other or unknown
  misc_feature (467)..(467): "n" may be a, t, c, g, other or unknown
  misc_feature (480)..(480): "n" may be a, t, c, g, other or unknown
  misc_feature (485)..(485): "n" may be a, t, c, g, other or unknown
gagtctcgctctgttgcccaggctgaagtgcagtggcgcgatctgggctcactgcaagatctgcctcccgggtttacgccattcttctgcctcagcctcccaagtagctgggactacaggtgcccgccgctacgaccggctaattttttgttattttttttagtagaggcggggtttcaccgtgttagccaggatagtctccatctcctgacctcgtgatccgcccgcctcggcctcccaaagtgctgggattacaggcgtgagccactgcgcctggcctaatttttacttcgtctggcttgttcactactttggcccaacagctggcttaacccgcatctcgcctgacacactagaatgacacagtggaatttttggatggtaggtttatgtggcttcaaaaacaggaagtttctactctaggtcctaactagaaggattncnttagaaacataaaatgcaaattnagcaatctataanaagtnggtaaaaaaagtcc

SEQ ID NO: 10270 - DNA, 473 bp, Homo sapiens
  misc_feature (388)..(388): "n" may be a, t, c, g, other or unknown
  misc_feature (408)..(408): "n" may be a, t, c, g, other or unknown
  misc_feature (423)..(423): "n" may be a, t, c, g, other or unknown
  misc_feature (425)..(425): "n" may be a, t, c, g, other or unknown
  misc_feature (445)..(445): "n" may be a, t, c, g, other or unknown
  misc_feature (447)..(447): "n" may be a, t, c, g, other or unknown
  misc_feature (470)..(470): "n" may be a, t, c, g, other or unknown
ctttcccatttggaacaagtgcccatcaaaggcttaggagatataaaagatgtacaagaacaactccaagatcccttttaagagtctttcatctttctgtaaaaactaaaccaagatacataacatatgagtgtcacatatcgcatgctaattcagaagcaagctatatgaagcaataggaaacacagagccgtcagagcgggaaagccctggaggcacgagtcagcgatgacaccacagggtattcaaggagcaccaatggcctgcaggtggcagaaacaatggaggaaccagcctgagtcaaggaggactcactaggtaagcttgggaaatagggctgaagacgtggactgagcagtcgatggaaggctcggaagtcagacatggntcacctgcgacaggggcctnaacaagagaccggtntnaaggcactggtttaaggccntnggtttaaaaccccggttgccttnaac

SEQ ID NO: 10271 - DNA, 445 bp, Homo sapiens
  misc_feature (380)..(380): "n" may be a, t, c, g, other or unknown
  misc_feature (400)..(400): "n" may be a, t, c, g, other or unknown
  misc_feature (403)..(403): "n" may be a, t, c, g, other or unknown
  misc_feature (423)..(423): "n" may be a, t, c, g, other or unknown
  misc_feature (434)..(434): "n" may be a, t, c, g, other or unknown
  misc_feature (438)..(438): "n" may be a, t, c, g, other or unknown
  misc_feature (443)..(443): "n" may be a, t, c, g, other or unknown
cacagtcctacacataatttatggtattcagaacatcactttataaactgttgccaaattaccacttaaacactaatatccaaatacagaatttagaaaattattttaaattttaactctaccatccccccgagctctcggctatgaatttagtctgggaagagggctccgtaataggccactgaggtcctctgtcccaccacatcatcctcccccgaaaactagctgcccgactgctctaccagacttgggctagaatttggcttcacggtggcaatgggaccacctgggccctacagtgtggcaaaatcaacttgcccacaaaccccatcccaggtgctgggatgctaacacactgaagctgaaagaccacacttggntttgccacagatcaagctgnatntgactagacaggctggtctntaccctatttnctgnaaaangc

SEQ ID NO: 10272 - DNA, 493 bp, Homo sapiens
  misc_feature (11)..(11): "n" may be a, t, c, g, other or unknown
  misc_feature (26)..(26): "n" may be a, t, c, g, other or unknown
  misc_feature (58)..(58): "n" may be a, t, c, g, other or unknown
  misc_feature (89)..(89): "n" may be a, t, c, g, other or unknown
  misc_feature (94)..(94): "n" may be a, t, c, g, other or unknown
  misc_feature (127)..(127): "n" may be a, t, c, g, other or unknown
  misc_feature (140)..(140): "n" may be a, t, c, g, other or unknown
  misc_feature (147)..(147): "n" may be a, t, c, g, other or unknown
  misc_feature (177)..(177): "n" may be a, t, c, g, other or unknown
  misc_feature (222)..(222): "n" may be a, t, c, g, other or unknown
  misc_feature (265)..(265): "n" may be a, t, c, g, other or unknown
  misc_feature (269)..(269): "n" may be a, t, c, g, other or unknown
  misc_feature (299)..(299): "n" may be a, t, c, g, other or unknown
  misc_feature (309)..(309): "n" may be a, t, c, g, other or unknown
  misc_feature (323)..(323): "n" may be a, t, c, g, other or unknown
  misc_feature (332)..(332): "n" may be a, t, c, g, other or unknown
  misc_feature (393)..(393): "n" may be a, t, c, g, other or unknown
  misc_feature (420)..(420): "n" may be a, t, c, g, other or unknown
  misc_feature (442)..(442): "n" may be a, t, c, g, other or unknown
  misc_feature (461)..(461): "n" may be a, t, c, g, other or unknown
  misc_feature (470)..(470): "n" may be a, t, c, g, other or unknown
  misc_feature (480)..(480): "n" may be a, t, c, g, other or unknown
ggctttggctntagagcatttattgnaaacaaaattgaggtaaaagaagctgacccanaacccacgcccgtccaggctggggaagtctntactngccccacaccaggccccgagcaccgcgggcccnaagcagcccccanaggacanacgggccctgcgcactgaggtagctgcatnttaagcccccatgagtacaactgcccagggctgcccaattcccanaggggaggaggagagagaggcaggcagggggagccccggcttnaggnggggcacaccccacacccttaacaaacctnccagcctttngggctgggcacttnctgcctggncacccagccagccatggggcaacggggtggccaccaaaagcgggccttcttgggtccaagncacttgttgttcaagcaatccttgggnaccccttgggaagcaagttaanccagacgttttgaaggtanttggggtcnggataaccgnggccctaatgttc

SEQ ID NO: 10273 - DNA, 429 bp, Homo sapiens
  misc_feature (371)..(371): "n" may be a, t, c, g, other or unknown
  misc_feature (383)..(383): "n" may be a, t, c, g, other or unknown
  misc_feature (398)..(398): "n" may be a, t, c, g, other or unknown
  misc_feature (405)..(405): "n" may be a, t, c, g, other or unknown
  misc_feature (407)..(407): "n" may be a, t, c, g, other or unknown
  misc_feature (416)..(417): "n" may be a, t, c, g, other or unknown
cttggtacatgattttataggaagcacatttgtgttcaagtgaaggcagaggcgtccaccccaagtcaccagagcgcaggtgcagagaggaaaagctgtcagctagtgccagcctccaagggccagcgctacccttcaacagctggaggcaccactgtgcgaggctttccacaccggcctccctcaggaacaagacatcctcaccaggcaggggtgaggtatgggctccaggactggcttcagcaggcaccaggctggggcaccagctggggcctgggtacgcccagaaggtcacacagacggttgcgctgctctctcaccactgcaagctctgcgtcccacgcagtgtcactgagcacagtcaccacctngtccaagacatncgggcccacgaagtnacttgangngaaccatgnnttggaccccttg

SEQ ID NO: 10274 - DNA, 490 bp, Homo sapiens
  misc_feature (358)..(358): "n" may be a, t, c, g, other or unknown
  misc_feature (395)..(395): "n" may be a, t, c, g, other or unknown
  misc_feature (414)..(414): "n" may be a, t, c, g, other or unknown
  misc_feature (419)..(419): "n" may be a, t, c, g, other or unknown
  misc_feature (423)..(423): "n" may be a, t, c, g, other or unknown
  misc_feature (439)..(440): "n" may be a, t, c, g, other or unknown
  misc_feature (473)..(473): "n" may be a, t, c, g, other or unknown
gagacagtcttgccctgtcgcccaggctggagtgcagtggcacaatctcggctcactgcaagctctgcctcccggattcatgccattctcctgccgcagcctcccaagtagctgggactacaggcgcccgccaccacgcctggctaattttttttttgtatttttagtagagacaggttttcaccgtgttagccaggatggtctcgataccctgacttcctgatccgcccgtcttggacatgttacttttatgggcagaaaacagcactacaaagttgtttcaggaaagtctggctgtgaagctggcaggaaaggagagagtggctgggtgaagaaaccgggttgaacaatgttttgnttttttcggatgggaggtatctgaacatgactaaatnccgatggacagaattgatngaaangganaattgccaaaagagcnnaaggcattttggaaaagaaggaggaggacccanggtcctaaggggaaggt

SEQ ID NO: 10275 - DNA, 520 bp, Homo sapiens
  misc_feature (415)..(415): "n" may be a, t, c, g, other or unknown
  misc_feature (434)..(434): "n" may be a, t, c, g, other or unknown
  misc_feature (475)..(475): "n" may be a, t, c, g, other or unknown
  misc_feature (486)..(486): "n" may be a, t, c, g, other or unknown
  misc_feature (498)..(498): "n" may be a, t, c, g, other or unknown
  misc_feature (503)..(503): "n" may be a, t, c, g, other or unknown
ctcagcagaaaatgatacagtttatagaaaacctccccgcccctcccacaccccaattaaaaactacaaaaaaatctcccctccttccctacgatgtcatggtagtctgactcctccagtggcactgcagctctggagtggccagctcaccacagcaccctccacttcaccttggggagaggagggatgctggtggttaaggaggttaaaaccattagttccagtaatgccagttcccaaacatgcacttccttcctttcccccaaggtctgggaccaaggagaaagggaccgaaatgagtccagccatgaggagcaactcgaggagagaaaatatagcccaaggaggttagaagagttccaatatacctcctcccttcccccaccttaaaaaagaaaaaaaggcagtttaaggnatttattacccccaaaatnggttccccttaaggcttgaaaaaaggaccaagatgccagcnttgagggagtnctgaaaactcanagctnatctatccttgagcctc

SEQ ID NO: 10276 - DNA, 475 bp, Homo sapiens
  misc_feature (136)..(136): "n" may be a, t, c, g, other or unknown
  misc_feature (197)..(197): "n" may be a, t, c, g, other or unknown
  misc_feature (411)..(411): "n" may be a, t, c, g, other or unknown
  misc_feature (414)..(414): "n" may be a, t, c, g, other or unknown
  misc_feature (418)..(418): "n" may be a, t, c, g, other or unknown
  misc_feature (433)..(433): "n" may be a, t, c, g, other or unknown
  misc_feature (444)..(444): "n" may be a, t, c, g, other or unknown
  misc_feature (463)..(463): "n" may be a, t, c, g, other or unknown
  misc_feature (471)..(471): "n" may be a, t, c, g, other or unknown
aatcagggtttgactactttggaggacaggctttagggagaaacctgttgtgcttgtttttttttttttttttccaggggtggcggggggggttggcagttggcatttctcttatgcctgctccagctctatccanagacgtggcatcatagagacatcccgatctcctctgtggaggtcatcggactgtacggaanatggggatgggatagaagaaaatggactggcaaccagctctgcagggaaatacaggcatacactcacaagaaacaccgtgctttatcacccataacaaaaagaaaacgaaatgtcaatactctgccctagcgatatctgtgcgaggcaaaaaaagaaaaaagcaagcaagcaaaccagcaagggctttggcgtttgggaaaaattatttaacancanttgnttgcacctttggaanacccctggggnttccaaacccggccaatcntgttgggnaggg

SEQ ID NO: 10277 - DNA, 543 bp, Homo sapiens
  misc_feature (445)..(445): "n" may be a, t, c, g, other or unknown
  misc_feature (466)..(466): "n" may be a, t, c, g, other or unknown
  misc_feature (485)..(485): "n" may be a, t, c, g, other or unknown
  misc_feature (491)..(491): "n" may be a, t, c, g, other or unknown
  misc_feature (518)..(518): "n" may be a, t, c, g, other or unknown
  misc_feature (522)..(522): "n" may be a, t, c, g, other or unknown
  misc_feature (543)..(543): "n" may be a, t, c, g, other or unknown
agcatgcaattttttattggtttctaaatctatttgtacacttaatatgctagtattaatttcacaaacagtataaagaatgtactccaatgatattacgcggcaactactcacctgaaaaagaaaacattgtctctgaaataattcctaattatacaattttgcaaataagcactataaatattaaaatgttaagacttcagtgtataatgtcaataacatcctgcctttttaaaaattgcttaaaacatttgttaaagatcatgcaaaataaacactgtattaaaatgctagattacactcaaacatcaaggcaatgaaacacaaaagagcaactatttagcacaatgactggcccagtaaataacttaatcagcatattaataaaaacccactgagtgataaacatcgaaaatgtaacactgaatctagataatagcgcatntggcgatctaccatctaccgncctaactggacttgggggnaacccnccggaatcattctacataaatgagctntgtnaaacgataccatattcattgn

SEQ ID NO: 10278 - DNA, 519 bp, Homo sapiens
  misc_feature (428)..(428): "n" may be a, t, c, g, other or unknown
  misc_feature (451)..(452): "n" may be a, t, c, g, other or unknown
  misc_feature (455)..(455): "n" may be a, t, c, g, other or unknown
  misc_feature (462)..(462): "n" may be a, t, c, g, other or unknown
  misc_feature (472)..(472): "n" may be a, t, c, g, other or unknown
  misc_feature (485)..(485): "n" may be a, t, c, g, other or unknown
agtgggggaagggtgagagctcagcactcactgctttattatcacagtaggtgacaaaggccgcagggagagggggaaaggtccagagctgtggagaaagaaggggctccctgtctccagggtttgtttaaggttttctccatggcctagggcccagccacttccctcactggcctcaaagccctggagttgagccctctaggcagtcaagggcaggcaggagatgggccagagagggggaggatgtgttctttaggtacagaatccctgaccacggggtccagtgcctgtgggccaaccaccaggaagctgtgcatgcccacagcccgaggcccctggtaatcgcagaggtaattatccccaacatgggctgccactactggttccatatgaacaagccccaaggccttctggaaaatgccggggtnccgcttgggccaaccacaacctnngangtcaacnccaaatcaantggtcaccccagnccaaggccttcaagatgcctttaaccgtcggcaa

SEQ ID NO: 10279 - DNA, 548 bp, Homo sapiens
  misc_feature (474)..(474): "n" may be a, t, c, g, other or unknown
  misc_feature (505)..(505): "n" may be a, t, c, g, other or unknown
  misc_feature (547)..(547): "n" may be a, t, c, g, other or unknown
ggagatggagtttcactcttgttgcccaggctggagtgcaatggcatgatctcgctcactgcaacctccgcctcccaggttcaagtgattctcctgcctcagcctcccgagtagctgggattacaggcgtgcaccaccacacccagctaatttttgtatttttagtagagacagcgtttcaccgtgttggccagcctggtctcgaactcgagacctcaggtgatccccctgcctcggcctcccaaagtgctgggattacaggcgtgagccaccacgcccggcgtcctttgtaaggtttctatccactatgaattcttcgatgttttgcaaggtttgaattttgagtaaagaccttgccacattggttacatttgtaaggtttgctccagtatggattgccatatgggtaagttagggttgaacgaacactgaaggctttccacactcattacacctataagggttttttccagngggaattcttctatgatttgcaagatgggangttttgaagtgaagaccttgccaaattcgttacatttggaang

SEQ ID NO: 10280 - DNA, 545 bp, Homo sapiens
  misc_feature (523)..(523): "n" may be a, t, c, g, other or unknown
ggctttttaaaaatttacttattacttgttcttagcaaattaagacaattacaataaaacatcagctaactgggttcttgtgagaaaactgaggtcagcttggaaaggagttccccgagtggagttcccagcggcccgcggctgacggccagatctgtcctgaggggtcgtgggagcccagcgcctgccttgagggaaatgaacactgaaaacaggatttgggagcagtattggattgacagcagagaagggactgtttgtaagggcagtttctcactgaagctgctaccattttcctttgtaaagaagtcatccacctcctcccagcggtgcccattttcaagacgctgcccgagcctcttaaaacagcttcttgaaagggtttttccacaacgggttctggaatgttctgcttcagctctggaggatgctctaaattagttcaccatgatgaagttagatttgcagtgagctataactccgtcacagggtcatgctcgccttccgtttgatggtacctgcnagctgcattctcaggatgggga

SEQ ID NO: 10281 - DNA, 529 bp, Homo sapiens
  misc_feature (145)..(145): "n" may be a, t, c, g, other or unknown
  misc_feature (384)..(384): "n" may be a, t, c, g, other or unknown
  misc_feature (389)..(389): "n" may be a, t, c, g, other or unknown
  misc_feature (401)..(401): "n" may be a, t, c, g, other or unknown
  misc_feature (415)..(415): "n" may be a, t, c, g, other or unknown
  misc_feature (454)..(454): "n" may be a, t, c, g, other or unknown
  misc_feature (459)..(459): "n" may be a, t, c, g, other or unknown
  misc_feature (476)..(476): "n" may be a, t, c, g, other or unknown
  misc_feature (503)..(503): "n" may be a, t, c, g, other or unknown
  misc_feature (507)..(507): "n" may be a, t, c, g, other or unknown
  misc_feature (510)..(510): "n" may be a, t, c, g, other or unknown
  misc_feature (524)..(524): "n" may be a, t, c, g, other or unknown
gagatggagtctcgctctgtcgcccaggcttcctgggttcacgccattctcctgcctcagcctcctgagtagatgggactacagacgcccgccaccatacccagctaattttttcatacttttagtagagacaaggtttcactgngttagccaggatggttttgatctcctgacctcgtgatccacctgccttggcctcccaaagtgctgggattacaggcgtgagccaccatgcccggactcaaggtttgaattttcaacataacttaagaaaccctcatcctttggggggatgaccgtgagtgcagtttaaaaaaaagaaaagaaaccctcctatgaattaaacaggtcttggttagagggcaaagttctccttctaattanaatgnaagggacctganaactctattcatgnctaaattgcaagggccataaaggggccaactcattatanggggncaataaagaatctggtngatagatgaattaaaaacgacctgggnaaanaanccggtttaaatttnccatc

SEQ ID NO: 10282 - DNA, 512 bp, Homo sapiens
  misc_feature (417)..(417): "n" may be a, t, c, g, other or unknown
  misc_feature (436)..(436): "n" may be a, t, c, g, other or unknown
  misc_feature (466)..(466): "n" may be a, t, c, g, other or unknown
  misc_feature (468)..(468): "n" may be a, t, c, g, other or unknown
  misc_feature (494)..(494): "n" may be a, t, c, g, other or unknown
  misc_feature (502)..(502): "n" may be a, t, c, g, other or unknown
  misc_feature (508)..(508): "n" may be a, t, c, g, other or unknown
aaccaacttagttcagcatccttatctcattatgccttagctacttgaaggtgatctatgcatcctctttcacacttaaataatcaagaggtgaacctggcaaatttatacttatacttcaagatttaggttgaagttatcattctctatgaatactcccatgtgcatggttcatttattacagtgctgtaattactctttttttaaagttgtttaattttctttttttttattatactttaagttttagggtacatgtacacaacgtgcaggtttgttacatatgtatacatgtgccatgttggtgtgctgcacccattaactcgtcatttaacattaggtatatctcttaatgctatccctcccccctccccccaccccacaacaggccccagtgtgtgatattccccttcctgngtccatgtgttctcatcgntcaattcccacctatgagtgagaacatgcngnggttgggtttctggccctgggtcagnttgcccanaatganggtt

SEQ ID NO: 10283 - DNA, 558 bp, Homo sapiens
  misc_feature (451)..(451): "n" may be a, t, c, g, other or unknown
  misc_feature (499)..(499): "n" may be a, t, c, g, other or unknown
  misc_feature (518)..(518): "n" may be a, t, c, g, other or unknown
  misc_feature (523)..(523): "n" may be a, t, c, g, other or unknown
  misc_feature (534)..(534): "n" may be a, t, c, g, other or unknown
  misc_feature (546)..(546): "n" may be a, t, c, g, other or unknown
  misc_feature (554)..(554): "n" may be a, t, c, g, other or unknown
atttaaatacatttatttgaaccggcctgggggaggcttgatgttgatgggttggtgattaaagcctcccaaagccaatccttggcatggcctttgggactcaaaacacaggatctgactggtgggcacaataccatcttgaacgcccacaaaaaggtttggttttgttgccaaagggcaggtggctccaggcagggctgatggtggcagggtggggtgaggacaggacaagagatctgggtgtggaaggatggccgggtttctgcagcagcaggaggaaagggtgggagcacacaggcacagaacactgtgagcaggactgccaggccagtgtcacaagcgctaccatctgggtgtagacagacctgagctgacaaagctgggggagcaaggccaacggctttaaacacaagctcaggggcttggggtttatcccgagggcacagggcanccatgtagggtggagttggcatgagttaagcctgggctgggtgtgtanactggacaaaagtgggtanggcangcagtgaccancttgtgtgcaanaaactttntggc

SEQ ID NO: 10284 - DNA, 556 bp, Homo sapiens
  misc_feature (425)..(425): "n" may be a, t, c, g, other or unknown
  misc_feature (448)..(448): "n" may be a, t, c, g, other or unknown
  misc_feature (470)..(470): "n" may be a, t, c, g, other or unknown
  misc_feature (476)..(476): "n" may be a, t, c, g, other or unknown
  misc_feature (530)..(530): "n" may be a, t, c, g, other or unknown
  misc_feature (538)..(538): "n" may be a, t, c, g, other or unknown
  misc_feature (541)..(541): "n" may be a, t, c, g, other or unknown
gcaaagattgttggaaataatccttctcttgtacctagaaacataggtgcaaatttctgatatctttgttttatctgcattcctgcctttcatgaaagtccctcttgattgtgctgaggctgtggctcagcgaagacactgaataaatacgatagccactgttgcttgttgcttgtccaagtcttcctggcttctgctgcaagagggggatatggagaaggtgggccagggtgtgtggacccgggcagaatctggggaagaagcctgccattcgtctttctttcccacaccaccgaacccactgcccttcccacccccacagcccttttatgaaatcagacaacgtggtaggtggaaaacagcagggcctttcctctgggttttcaaccagaagtgatattccacaagttttaactggttactgngaagtccaagcggccagaattgngaaaatgtcactggaacactgnagccgnggaccttaaagaccgtaggccttttaaaatttggtaaaaattttgggagggctnttacaagnggnaattttttttttttt

SEQ ID NO: 10285 - DNA, 551 bp, Homo sapiens
  misc_feature (473)..(473): "n" may be a, t, c, g, other or unknown
  misc_feature (537)..(537): "n" may be a, t, c, g, other or unknown
  misc_feature (539)..(539): "n" may be a, t, c, g, other or unknown
aaatacttgcattttatttcaggccaaagcccctccactctgaactaaatgccatgacagtcccacagcataggctggtagtaaaagagcccacagacagggtaggatagccagaggagggaggagtgggcgacagggaggggaaggatcacacacacaaacctaagagtagagcaatgcagaatgcctgtggcactcggctcctaccagctctggctctcagtggagatgaagaatggcagcaggaggacagaatgcctcattgtctgaaggagagcgtgttgtttctcatctccatccccagagccctctctttcaggcaggcagaaacaaagcccttgcaccccactgcactgcgcaacacagcagagacgctggtggcggaagccctggaggcagggagctgctaccaaaggagaagaaaaggattccaaaaagaaaggagcccactctaaccctgcggaaaagatggncacatgtctgctttataacccgaagaagacagtaccagccccggacaggctttccaaaataaangnccctgggcttgt

SEQ ID NO: 10286 - DNA, 539 bp, Homo sapiens
  misc_feature (176)..(176): "n" may be a, t, c, g, other or unknown
  misc_feature (213)..(213): "n" may be a, t, c, g, other or unknown
  misc_feature (332)..(332): "n" may be a, t, c, g, other or unknown
  misc_feature (408)..(408): "n" may be a, t, c, g, other or unknown
  misc_feature (453)..(453): "n" may be a, t, c, g, other or unknown
  misc_feature (458)..(458): "n" may be a, t, c, g, other or unknown
  misc_feature (494)..(494): "n" may be a, t, c, g, other or unknown
  misc_feature (505)..(505): "n" may be a, t, c, g, other or unknown
gagacagggtcttgctctgttgcccaggctggagtccagtcacaagctcttggctcacggcaacatccccctcaggctcaggcgatcctcccacctcagcctcccaagtagctgggactacagatgggtgccaccaccatgcccgcctggctagtttttttttttttttttttganacggagtctcgctctgtcccccaggctggagtgcagnggtgtgatctcggctcactgtaagctccacctcccaagttcacgccattcttctgcctcagcctcccgagtagctgggactacaggcacctgccaccatgcccagctaattttttttgnatttttagtagagacggggtttcaccgtgttagccgggatggtctcaatctcctgacctcgagatccgcccgcctnggcctccaaaagtgctgggattacaggcgtgagccaccggccagncctgnctggctagtttttggaatttttggaaaaatggggcntggtatgttgnccaagctggcttgaactctgagcttaagggtccc

SEQ ID NO: 10287 - DNA, 548 bp, Homo sapiens
  misc_feature (455)..(455): "n" may be a, t, c, g, other or unknown
  misc_feature (477)..(477): "n" may be a, t, c, g, other or unknown
  misc_feature (501)..(501): "n" may be a, t, c, g, other or unknown
  misc_feature (548)..(548): "n" may be a, t, c, g, other or unknown
gctagttattaagaacaaagggcatgtgtcgtaacaggggatctaattactgtaagccagaatgattgctgaaatgtcaaaatgtaagattgaatgaggctatttaaacattttagtatattttgtcttactgaaattgataaaaaaaaaaaactggcaatgtaactaaatgcgtaactaattacttgaaataaaaagattacttgaaattcaaattaagaaaaatccatttaaatatatttgtgggtgataatctccatctgcatccatttatataaaacttaaaatgccaaaaaataaagaccaatattaatctctttatttctgaatgagatgaaatcactgacatgtttgatgcttccactattagaatataccctttaaacacgaaaagaacaactgcaggagctttaacatccattatcatgggtgaacatctttgttacttctaaagncatcacacctatttgggaggtnaaaaacctgaaattaaaagcttgnaccaaatgctgggtttaaaaaggcaatttaattctgcattctggaan

SEQ ID NO: 10288 - DNA, 554 bp, Homo sapiens; identical to SEQ ID NO: 5801
  misc_feature (1)..(554): "n" may be a, t, c, g, other or unknown

SEQ ID NO: 10289 - DNA, 565 bp, Homo sapiens
  misc_feature (519)..(519): "n" may be a, t, c, g, other or unknown
  misc_feature (528)..(529): "n" may be a, t, c, g, other or unknown
  misc_feature (549)..(551): "n" may be a, t, c, g, other or unknown
  misc_feature (556)..(556): "n" may be a, t, c, g, other or unknown
aggtgcaaacctggtttattacgttctttggttaaatattgtttctacatcctttcagagcattaggagaacaaagataatatttgatagaaagactgaaaacacatcctttgcttttcagagaaaagactgaatttacactggtactgttagaaattcttataattaggctagacgtataagaagttagggcttttgctgttgcttgtatgttttgaaaaatacattcccctgggctagccaacatcactgtcctgagacccagaccttcaggagtctcttgataaaggctgctccgcacatggtcagaaaagtcgggtcagctcatcatgtcgagactgcatggttcagtgttgccatcactgcgcaacgcctctgccacatctcttctgaatcagacagattttggggtgaacctggctctggtcttgacggacaggttctggtccactccttcattaaggttcttgaagcactgggccaaggacctcctgcttggggaagggctggctggttatnaacttggtnntaagttactggaaaaccttnnnatggncccggataa

SEQ ID NO: 10290 - DNA, 512 bp, Homo sapiens
  misc_feature (443)..(443): "n" may be a, t, c, g, other or unknown
  misc_feature (472)..(472): "n" may be a, t, c, g, other or unknown
  misc_feature (474)..(474): "n" may be a, t, c, g, other or unknown
  misc_feature (483)..(483): "n" may be a, t, c, g, other or unknown
  misc_feature (490)..(491): "n" may be a, t, c, g, other or unknown
  misc_feature (511)..(511): "n" may be a, t, c, g, other or unknown
aaacacaaaatagtctttatttgtcaacgaaggctacacgggatcacttctggttttgtttttatgcttttttttttctagaaggtatctacatctgcatttatttacagccttgttggtatttacacagtcaagatacagtgttagaaacacaaaagtgttgagaaaaaaacttctcaaaattagttccagacttcaggaaaatgatttccacatggtaaggccagagtctccagtgttggtcatccagaagcagcttggtacagactccttttgccgaagctgcgggttcagaggtgctcagaacaacaggtggatttagaaaagtgggattctggtgttgggtgaatccagggctgctggggcaccgccagacacctgaggctcagctcctgccaggacggcccagcgtgctccaaactaagccttccttggctggtcgncctcagaataaatcacatttcttggggancnagaaggtcncctaagnnccttgcctttggcattccana

SEQ ID NO: 10291 - DNA, 585 bp, Homo sapiens
  misc_feature (121)..(121): "n" may be a, t, c, g, other or unknown
  misc_feature (435)..(435): "n" may be a, t, c, g, other or unknown
  misc_feature (447)..(447): "n" may be a, t, c, g, other or unknown
  misc_feature (451)..(451): "n" may be a, t, c, g, other or unknown
  misc_feature (466)..(466): "n" may be a, t, c, g, other or unknown
  misc_feature (488)..(488): "n" may be a, t, c, g, other or unknown
  misc_feature (514)..(514): "n" may be a, t, c, g, other or unknown
  misc_feature (537)..(538): "n" may be a, t, c, g, other or unknown
  misc_feature (549)..(549): "n" may be a, t, c, g, other or unknown
caggctataaataagaattgaccttttcgtgggtcacacatttgttgctgaagtcttcctgtggggctgggaaaagagtcaaaaccatgaatcttgaatattcttcctgggaaaaactcanaacgccaggtggcgtctctgcagacagctgtgtcccgatgccccatttctgggccctgccggaaggctgacactatggagcttgtgctccgtgatgcccagggcttctgtgaatggctaaactgcattttgtaattctctttttaaagagcttgcctctttctggagcttccaccctcttccttcatccctataaaaacagatctatttttggcaggtacatacactgagccagattctcacactgcaaggaggcaggggagtgcaggggaagcaacctggggaaggggaaagagtgcagggaggagacgactngcccttgactgnaccncaagttgaactgggngctacttggaagtcaagccttncgagtgaacccttgaaaccattcatnggggcttaaggttcccatgggcnntcaactatccngggcttaagggtgaccttttgggggtttttggaaaa

SEQ ID NO: 10292 - DNA, 459 bp, Homo sapiens
  misc_feature (113)..(113): "n" may be a, t, c, g, other or unknown
  misc_feature (432)..(432): "n" may be a, t, c, g, other or unknown
  misc_feature (435)..(435): "n" may be a, t, c, g, other or unknown
  misc_feature (441)..(441): "n" may be a, t, c, g, other or unknown
  misc_feature (445)..(445): "n" may be a, t, c, g, other or unknown
  misc_feature (447)..(447): "n" may be a, t, c, g, other or unknown
  misc_feature (453)..(453): "n" may be a, t, c, g, other or unknown
  misc_feature (456)..(456): "n" may be a, t, c, g, other or unknown
gccatggcaacacaggtttatttacaccataccctggatgcaaggtggggcagggttgcggggagggagagggagtacagtgatgtcaagagcacagggctcctggccttcanaccagtcctcagctacattgctgcaggcaaggccggcaccagcccccaggctgagtcatgggtaaaggccaagagctgaaacaagagtttctcatgcaccaggcacatttataaagcaacccatccacctggagcccaaaactgggttgacagattccagagaggcaaggtccttgatgaccccataactcccactgcccctttaacaagggactcttaacaccttatgataacccaaatcctaaacactgttgcctctgccgcctcttccagacacagaaggcatgatcctgctgaacactggcctcgagggaactgnggntgaaancccngngcccantgntca

SEQ ID NO: 10293 - DNA, 560 bp, Homo sapiens
  misc_feature (394)..(394): "n" may be a, t, c, g, other or unknown
  misc_feature (425)..(425): "n" may be a, t, c, g, other or unknown
  misc_feature (449)..(449): "n" may be a, t, c, g, other or unknown
  misc_feature (498)..(498): "n" may be a, t, c, g, other or unknown
  misc_feature (510)..(510): "n" may be a, t, c, g, other or unknown
  misc_feature (530)..(531): "n" may be a, t, c, g, other or unknown
  misc_feature (544)..(544): "n" may be a, t, c, g, other or unknown
  misc_feature (547)..(547): "n" may be a, t, c, g, other or unknown
  misc_feature (560)..(560): "n" may be a, t, c, g, other or unknown
ctttttttcttttttttttagacggagccttgccttgttgcccaggctggagtgcagtggtgcgatctcagctcactgcaacctccacctcctgtattcaagtgattcttcagcctcagcctcccaagtagctgggattacaggcatgcgccactacacccggctaatttttgtatttttagtagagatgggatttctccatgttggccaggctggtctccaactcctgacctcaagtgatccacctgcctcagcctcccaaagtgctgggattacaggtgtgagccaccgcgcctggcaatacttacattttcttttctgaaaagtgagtgtgagaagacaaagcaatcctacactaaatttattacggaaaatgtttcttcctggtagtttnaagtgatcacataagtcagcttatgttaatngctctactatagagtatgagatantccagagatcccactttaaggaagacacagccttgggggctggccaggnttactggagctnggacctgaaattcctggtcnnaacctttactttnagnttttgaataccan

SEQ ID NO: 10294 - DNA, 571 bp, Homo sapiens
  misc_feature (464)..(464): "n" may be a, t, c, g, other or unknown
  misc_feature (482)..(482): "n" may be a, t, c, g, other or unknown
  misc_feature (485)..(485): "n" may be a, t, c, g, other or unknown
  misc_feature (502)..(502): "n" may be a, t, c, g, other or unknown
  misc_feature (507)..(507): "n" may be a, t, c, g, other or unknown
  misc_feature (551)..(551): "n" may be a, t, c, g, other or unknown
agacacagtctcgctctgtcacccaggctggagtgcaatagcgtgatctgggctcactgcaacttccacctcatgggttcaagcaattctcctgcctcagcctcccaagtaggtgagattacaggcacttgtcaccatccccagctaatttttgtatttttagtagagaaggggtttcaccatgctggccaggctggtcttgaactcctgacctcaagtgatccacccccctcagcctcccaaagtgctgggattacaggcttgagccaccacgcccggctcccatagctgctttttgtagttttctggggatatcaggggcagactgggtcataaaatgtcctcccaaaaggggtttgtctctcctttgaggcaggatcagtgatattatacttccgattgcttcaactaaatgcccttgaaacaaacctggattcttatctttatcctgagaatctttcctnacctggtcatagatacangcnttttcaaacaattcttnatccnttcaacgaacaagggccctttgaacctttcttcccaaggcctantgggcctttggaaaatcccc

SEQ ID NO: 10295 - DNA, 500 bp, Homo sapiens
  misc_feature (430)..(430): "n" may be a, t, c, g, other or unknown
  misc_feature (467)..(467): "n" may be a, t, c, g, other or unknown
  misc_feature (482)..(484): "n" may be a, t, c, g, other or unknown
  misc_feature (489)..(489): "n" may be a, t, c, g, other or unknown
  misc_feature (492)..(492): "n" may be a, t, c, g, other or unknown
acatatcatataaatatatttgttcaaactacaaagggatggatatcagggggaagcttttattgctgtggggggacctggagagggaggggggccttggaaatggggatacctgggaccacttgttccccccattcctcacagaaggcacaaatacattatttctttccatgtgaggagatgcgaggagaggatacagaatacaggaatcctcaaaaatacaaaaaacccctccaaactgaatacctaaggttatggaaaaggctagggtggggcacagaagtcaatgggggaacagaaagaggaaccaatgaaactgagaaccaaaagggacctgagaggccatgatgtccatgctgctgcctctgtgcagaccccagagaaaactcaggtaaaccaacggaaactccaaataagaaagggtaggggngccccaagaattggctttggggcatcagaccaaggantgtgaatgtaattgnnngtgtncanggctgggt

SEQ ID NO: 10296 - DNA, 567 bp, Homo sapiens
  misc_feature (503)..(503): "n" may be a, t, c, g, other or unknown
  misc_feature (506)..(506): "n" may be a, t, c, g, other or unknown
  misc_feature (529)..(529): "n" may be a, t, c, g, other or unknown
aatacaaatctactggtgcttaaaactcagagcttaggaaacacagcctaggtaaagaccaatcttcttgctgcatatttcacagtattgaattctttcttggtgagttctccatacaagttatgaagcaggataaaagtcagtcttatattaagtcattgtaaatacggccttaatttcaatcaccaaagaaatgtatttttgttgtataccatggttgcagcatgttttattaaaactaattatatcaatagctacctgtagagtatcaacttaaaaattataatgccatttctatgaagtcattacttttataggactagcctgtgtcatatgtgtgatcaatattggtttaatgcagaaacaaaggcagctgggtgtccaagcaagccacttttctgggtcagggtttcagtggtaccatagatggctgccagtctcaatgtcactttggcccatttatctttataaatcataccatatagcttcgatatttccatccnttnaactggagggccggccccggggnttacgcctggaatcccagcccttttggaggccgaggcg

SEQ ID NO: 10297 - DNA, 515 bp, Homo sapiens
  misc_feature (46)..(46): "n" may be a, t, c, g, other or unknown
  misc_feature (79)..(79): "n" may be a, t, c, g, other or unknown
  misc_feature (107)..(107): "n" may be a, t, c, g, other or unknown
  misc_feature (229)..(229): "n" may be a, t, c, g, other or unknown
  misc_feature (231)..(231): "n" may be a, t, c, g, other or unknown
  misc_feature (235)..(235): "n" may be a, t, c, g, other or unknown
  misc_feature (240)..(240): "n" may be a, t, c, g, other or unknown
  misc_feature (431)..(431): "n" may be a, t, c, g, other or unknown
  misc_feature (436)..(436): "n" may be a, t, c, g, other or unknown
  misc_feature (439)..(439): "n" may be a, t, c, g, other or unknown
  misc_feature (468)..(468): "n" may be a, t, c, g, other or unknown
  misc_feature (483)..(483): "n" may be a, t, c, g, other or unknown
  misc_feature (491)..(491): "n" may be a, t, c, g, other or unknown
  misc_feature (514)..(514): "n" may be a, t, c, g, other or unknown
cgggtgcaagtcgtttattcgggagctgattcctggaatcacgganaggtggtgaggaagacagccagggaaggagganagctgctgagggccacgcgaatgagctntggccagggagccaccaagagtcagtgtaggatgcacctcggaatcatgccactaagggcatggaggctggagtggtaaggaagctggggtatttccactcaatctgggctcttattgttananaggngcctntggaaggcatcgaacccctgaaactttcagtctaagctgtccatgtgcagatgatgtcagagaaagccctcagggagagagtcacaggtccttggtgaaggaagtcatctgcctgtacaggaactgtcctccagtagaccaacggaaaagtgtgctggacataaacaacaccacactgaccaaaggcccanaaganctntggaacttgcaaccaggcgcttaaaactngcacaaggtgaaagnctcagganttaaagtccaaaatttgatgggna

SEQ ID NO: 10298 - DNA, 581 bp, Homo sapiens
  misc_feature (390)..(390): "n" may be a, t, c, g, other or unknown
  misc_feature (427)..(427): "n" may be a, t, c, g, other or unknown
  misc_feature (526)..(526): "n" may be a, t, c, g, other or unknown
  misc_feature (541)..(541): "n" may be a, t, c, g, other or unknown
  misc_feature (561)..(562): "n" may be a, t, c, g, other or unknown
  misc_feature (565)..(565): "n" may be a, t, c, g, other or unknown
  misc_feature (567)..(567): "n" may be a, t, c, g, other or unknown
gagactgagtctcgctctgtcgcccagactggagtgcagtggcacgacctctgctcactgcaaactccaattcccaggttcacaccattctcctgcctcagcctcccaagtagctgggactacaggtgcctgccaccacacccagctaattttttgtatttttagtagagatggagtttcaccatgttagccaggatggtcttgatctcctgacctcatgatccgcccaccttggcctcccaaagtgctgggattacaggcatgagccaccgcacccgacgaggtctgatggttttataaggggctctccctgcttcgcttaacacttctccttcctgctgccttgtgaagaagatgccttgcttctctttcaccttctgccatgattgnaagtttcctgaggcctcccagccatgctgtgaactgngaagtcaattaaacctctttcctttataaggtacctagtcttcgggcagtctttacagcagtatgaacctggattaatatcctagtaatcaatcctttnccaagcatgggaagnctacctgcacaatttctttnnagncnctttaactcttggc

SEQ ID NO: 10299 - DNA, 578 bp, Homo sapiens
  misc_feature (510)..(510): "n" may be a, t, c, g, other or unknown
  misc_feature (515)..(515): "n" may be a, t, c, g, other or unknown
  misc_feature (517)..(517): "n" may be a, t, c, g, other or unknown
  misc_feature (541)..(541): "n" may be a, t, c, g, other or unknown
  misc_feature (543)..(543): "n" may be a, t, c, g, other or unknown
  misc_feature (571)..(571): "n" may be a, t, c, g, other or unknown
ctggaattatttatccaggcagaagtataagaatggaattaaattatcttttgagtttctcttaatccaaaggcttaaatcccttgccagtaaaaaggacaaaacaaaaagaatataaatttttttctataggactcatgactccaggaaaatacacaaatccctttttagaaaaatctgatgttttcacttggtatatttccatctcttctttatcccctccacacctggagctcccactgaatttcttaagacagactctcagccggtgtaattagatgggagaattacatggagttacatggggtgagatgctggccctctgggatctctgggttcggagaaggtgccagggtggagaggcagaacaagtgggattgtgcatgataacatctcaagtgattttctcagtcagaagataaagcatattggtaagaagggcatctacagcgaagcttgcattgagacagttacaattgcacactcattttaaaaacaaactggccaagnaattncngctggcgtttaaccctgggaagangngaacagctgggagtggtttccccccaanccatggg

SEQ ID NO: 10300 - DNA, 463 bp, Homo sapiens
  misc_feature (377)..(378): "n" may be a, t, c, g, other or unknown
  misc_feature (410)..(411): "n" may be a, t, c, g, other or unknown
  misc_feature (418)..(418): "n" may be a, t, c, g, other or unknown
  misc_feature (422)..(422): "n" may be a, t, c, g, other or unknown
  misc_feature (445)..(445): "n" may be a, t, c, g, other or unknown
ccagtcgggttggagtttatttctgccagagcctggaggctgggagggtaaaggacactcctttagtcccagagggaagctccgaaccctcagagcaaccagaagggagggcagagcatgggcagcagcaggagtgagaggggtccccttgtcctgcccctttgcaagggttcaaggctggtggaggcctggggcttctgtcgctcaggagttcaggggtggacgcagaaatgggggaaggagagtggctacgtagagagtgagagcgagattcctaaaaagatgcacagagagaccctcagagaggccaagaaagatggtgaaaaggtaaggaaagaaaaggaaggaagaaaagaaaaaaaagaaaagagaaaccnnagggaaatgggttgcactggcttaagaatggnngaagganccgnccaattcctttcctaaggctatngaatcaataccgggggaa

SEQ ID NO: 10301 - DNA, 517 bp, Homo sapiens
  misc_feature (458)..(458): "n" may be a, t, c, g, other or unknown
  misc_feature (464)..(465): "n" may be a, t, c, g, other or unknown
  misc_feature (480)..(480): "n" may be a, t, c, g, other or unknown
  misc_feature (485)..(485): "n" may be a, t, c, g, other or unknown
  misc_feature (498)..(498): "n" may be a, t, c, g, other or unknown
  misc_feature (505)..(505): "n" may be a, t, c, g, other or unknown
atttatttccactctaatctttgtttcccctattctgctagcttgggtttagttcttctttttgtaggtcctttaaagtgtatagttaggtgactgatttgagatctttcttttattttttatttttatttatttatttttttttgagatggagtctcactctgtcgtgcaggccggtatgcagtggtgcaatctcggctcactgcagcctcaacttcctggttccagtgatcctcccacctcagcctcccaagcagctggaaccacaggagggtaacaccacaaccagctgatttttgtattctaggtagaggtggggcctcactacgttccccaggctggtcttgaactcctgaactcaagtgatccacctgccttggcctcccaaagtgctgggattacccgcctgagccactgcggccagccagttgggcaagtgttttcttttttttcttttntctttnntttttttttgggaanggagnctcactttgttgnccaagcntgaatgcatggc

SEQ ID NO: 10302 - DNA, 596 bp, Homo sapiens
  misc_feature (544)..(544): "n" may be a, t, c, g, other or unknown
  misc_feature (551)..(551): "n" may be a, t, c, g, other or unknown
  misc_feature (584)..(584): "n" may be a, t, c, g, other or unknown
ctttctttctatcttctctctctctctctctctctctctctctctcccccttcctccctccctccctctctctctctctgagagatggggtctcactatcttgcccaagctggtcttgaactcctgggctcaaatgatcctcctaccttggcttcccaaagtgctgggattaaaggtatgagccactgcacccgccaatttttaataagcattattttaagtaagcaaacactctctacagcatagaaattgcttatttgttctaggcattgttcaagaagtgggatcctgtttgtggctcccagagtctctgaggtagaaaccactagagatgaagaaatcgaggcagacagatgaagtaacttggctgagtgcaccagcaggcaagaggcagacctggggttcaaacccagccagcaggactccagagaatggggctcacaagccgctttgctataccgcttttggactacctgggcagctgaaatgcaaatcttaaggcccacctggttaagcacacttttcaaggccttgaactggaaangacccancagggcccttaagagcagccgattaaccacccntggtggtgggac

SEQ ID NO: 10303 - DNA, 553 bp, Homo sapiens
  misc_feature (485)..(485): "n" may be a, t, c, g, other or unknown
  misc_feature (493)..(493): "n" may be a, t, c, g, other or unknown
  misc_feature (495)..(495): "n" may be a, t, c, g, other or unknown
  misc_feature (506)..(506): "n" may be a, t, c, g, other or unknown
  misc_feature (545)..(545): "n" may be a, t, c, g, other or unknown
  misc_feature (550)..(550): "n" may be a, t, c, g, other or unknown
  misc_feature (552)..(552): "n" may be a, t, c, g, other or unknown
gaaatgagacagttagtttttatttattccacttttgttctaggtttcactgaagaaatgttggtttcacagtgctgcccagattcccctgggctgttatctgcatattactttctgtctgatgggtcctctgggtagctgatacagacatggagttcaaagagcaagagatgactaagcgtgactcctgggaaaaataaaagtgggtagaagcaggctcaggtatggaaaaccttctggccactgtggaggtctgacagcttagaccacattgcaggtcacaggcagtatcggccaactccacagggagttctagggtgtggagcctcatgttgggctgaatcagccatgccctgtgcctttctgtgcccacgtattggctggggactgcagagaaagaccatggccttaacttgaaagccaaggccgaccttaaatgaactaccagatgcaggttggcaatggtagctacctgcactcattgntggggaananaaagtcttctntaagggaaatctgaaagcttttggcctgggcttgcatgnaactntng

SEQ ID NO: 10304 - DNA, 560 bp, Homo sapiens
  misc_feature (502)..(502): "n" may be a, t, c, g, other or unknown
  misc_feature (519)..(519): "n" may be a, t, c, g, other or unknown
  misc_feature (540)..(540): "n" may be a, t, c, g, other or unknown
  misc_feature (542)..(542): "n" may be a, t, c, g, other or unknown
  misc_feature (544)..(544): "n" may be a, t, c, g, other or unknown
  misc_feature (547)..(547): "n" may be a, t, c, g, other or unknown
ctggtcctaacacaaatgtgaatttattggttgatttgatatttaaaatagtacttttacaaaatcatctcagaaaatatactacatttattaaaattcctacaaaccattgcagaaaatattaaaccctctaaccaacctaacactcgctttcagaggcacttgtgatgattttcacagcttccatagttgcaaagaacaaagaaatcatcttccaacaggggtggaattagataagaataatccaaaaaatatttatttctttacagactcacagattgcttgatgtttaggggctcttacctaggatacctaattattcaaggttttcctaatttagtagactttttcattgcctacaatctacaatattcagcaaagtattaaggaaaatgaacccaagaaccttaacccctcaaataggtttatggatatactaaactggcaagtacaatctttatcttaagacttgagaacgggatgcaggaaaacaaactttggnggaatctggaataaggncttaagctgggcaaactaggngngnaancctggatggttaa

SEQ ID NO: 10305 - DNA, 568 bp, Homo sapiens
  misc_feature (49)..(49): "n" may be a, t, c, g, other or unknown
  misc_feature (80)..(80): "n" may be a, t, c, g, other or unknown
  misc_feature (171)..(171): "n" may be a, t, c, g, other or unknown
  misc_feature (207)..(207): "n" may be a, t, c, g, other or unknown
  misc_feature (285)..(285): "n" may be a, t, c, g, other or unknown
  misc_feature (312)..(312): "n" may be a, t, c, g, other or unknown
  misc_feature (387)..(387): "n" may be a, t, c, g, other or unknown
  misc_feature (494)..(494): "n" may be a, t, c, g, other or unknown
  misc_feature (508)..(508): "n" may be a, t, c, g, other or unknown
  misc_feature (511)..(511): "n" may be a, t, c, g, other or unknown
  misc_feature (528)..(528): "n" may be a, t, c, g, other or unknown
ctttctttctttttttcttttcttttcttttttttttttttttgagagngtctcactctgttgccaggctggagttcagnggcacaatctcggctcactgcaatctccgcctttcgggttcaagcgattctcctgcctcagtctcccaagtagctgggactacagccatgngccaccacacccaattaatttttgggtttttattanagacggggcttcaccatgttggccaggatggtcttgaactcctgaccttgtgatccgcccaccttggcctcccaaagngctgggattacaggccttagccaccgngcccagccaacacatttcttatacaacatggttttgagttattttacctacaaccaactccagctggtttaatgngtagcttacagaattgaacccacttttttcagacttggctaccttttctacaagggaaaaaaggcattttacaagacacagaagcccctaagtttggaaatctctgncaaaaaaggggganaanaaagactttttcaaggncccgaaaggggaactatggggaaaggattaacccccccaa

SEQ ID NO: 10306 - DNA, 569 bp, Homo sapiens
  misc_feature (465)..(465): "n" may be a, t, c, g, other or unknown
  misc_feature (528)..(528): "n" may be a, t, c, g, other or unknown
  misc_feature (540)..(540): "n" may be a, t, c, g, other or unknown
  misc_feature (550)..(550): "n" may be a, t, c, g, other or unknown
  misc_feature (565)..(565): "n" may be a, t, c, g, other or unknown
  misc_feature (567)..(567): "n" may be a, t, c, g, other or unknown
gttttgctaaactaagatttccagaatattcttgattagtcaatttctcaggaactaatgtcttaaacctacaaaaggaagcaggacttgagggaaatagagcaagtttcagaggcagaaggccctcactgagcttccagtaatgttccgtggaagctgtgtgactttaggtgagacactcgggctgccccagagatctggaacaagtccctcctcacagcgacagcatgatgcagggcaggcaccagcaaagaagggtgtggaaacttttaaaaactctgtttggggttacctgactgcaccaggttatatctaaatggccattccccaaaagttttaaagtggtgaaactggtaagttctgtaatttgctttcaaatcatcccaaaagtggtcattttctctacaattctatacatacttctgtaccagacatgggcagtacaggattttttaatccacctanggaagtcccctgtggtcaggaaatggcatatttcacccttaaaagggccctcttgctctttgntgggaacttttnccctcttggnccttctcttcttatnancc

SEQ ID NO: 10307 - DNA, 553 bp, Homo sapiens
  misc_feature (387)..(387): "n" may be a, t, c, g, other or unknown
  misc_feature (428)..(428): "n" may be a, t, c, g, other or unknown
  misc_feature (460)..(460): "n" may be a, t, c, g, other or unknown
  misc_feature (464)..(464): "n" may be a, t, c, g, other or unknown
  misc_feature (475)..(475): "n" may be a, t, c, g, other or unknown
  misc_feature (498)..(498): "n" may be a, t, c, g, other or unknown
  misc_feature (517)..(517): "n" may be a, t, c, g, other or unknown
  misc_feature (546)..(546): "n" may be a, t, c, g, other or unknown
ctcattaacacaaatatttattgatactatttatacagtaaattaggttgaatgtgaagttttggatagcctgaattcaccattttcttgtgcacaaatgggcatttttctcatttacaaatgggcatttctctttggcatccattaggtatttgcccagatattggcctctgtcaaatattttttaaaaatcaacctagtttctattaaacaaaactaaaagtgattctatggagagtgattgtatgattaccaaacacatctgatgttaaatgtcattaaagtgctgtttgatgatctctgcggtttgtgctaattaagacagagagggctgggattttataaatcccaagagtcttatctgaacagtctgcatataaaagttgntttttagcctggggaagggtatccatgaagccggggacttntggcattctggccttgctgggcaagtaccagncatntttccaacggnatcttcatgctccataggtttangagctggcaaggatctggnaacaggcttggcaagtttgctgcaaggcnctggtat

SEQ ID NO: 10308 - DNA, 538 bp, Homo sapiens
  misc_feature (65)..(65): "n" may be a, t, c, g, other or unknown
  misc_feature (127)..(127): "n" may be a, t, c, g, other or unknown
  misc_feature (137)..(137): "n" may be a, t, c, g, other or unknown
  misc_feature (159)..(159): "n" may be a, t, c, g, other or unknown
  misc_feature (173)..(173): "n" may be a, t, c, g, other or unknown
  misc_feature (221)..(221): "n" may be a, t, c, g, other or unknown
  misc_feature (235)..(235): "n" may be a, t, c, g, other or unknown
  misc_feature (374)..(374): "n" may be a, t, c, g, other or unknown
  misc_feature (392)..(392): "n" may be a, t, c, g, other or unknown
  misc_feature (420)..(420): "n" may be a, t, c, g, other or unknown
  misc_feature (437)..(437): "n" may be a, t, c, g, other or unknown
  misc_feature (457)..(457): "n" may be a, t, c, g, other or unknown
  misc_feature (464)..(464): "n" may be a, t, c, g, other or unknown
  misc_feature (502)..(502): "n" may be a, t, c, g, other or unknown
  misc_feature (505)..(505): "n" may be a, t, c, g, other or unknown
  misc_feature (515)..(515): "n" may be a, t, c, g, other or unknown
  misc_feature (534)..(534): "n" may be a, t, c, g, other or unknown
  misc_feature (538)..(538): "n" may be a, t, c, g, other or unknown
gaaccaatcaatcactggagacacacagactccacctgtatcaaacgaggataccagccacccanacagccccagtcccagctccatccatcctgcaatccctcctccacagcacagcacagcccanacgctgcctntgggaaggaagcctgaggccanagttgctgagcctntgggaaaatctggaaatttggtttccccaagatagactccacctcctntggaaagatgctgngctcctgacagggctttgtctccctgggaaggaatccatgtcttgggaaggctctgcatcccaggaaaggctccacacctgcaggagggactccttggtcctgagggactctgtgcctgcataggctccagtccttaanaaggactccatgatgcangggggactccaggcccttaggaagtttncatgtcctgggaaaggnttccaggtccccaggcttgnggccaanatccccagggcgaaaaactgggtccaaacaggttccanagnccatgttggncaacttgaaaaccctgggnaggn

SEQ ID NO: 10309 - DNA, 547 bp, Homo sapiens
  misc_feature (501)..(501): "n" may be a, t, c, g, other or unknown
  misc_feature (531)..(531): "n" may be a, t, c, g, other or unknown
aaggcattagacgtttgattcttttatttccatatgcaatgtaatgtttaggcacgctgcttgggatgctacttctaaaaaaattgttggccatttttcagaatatccttttggttttaaatactggtcaggaaaaacaaatgatgtaaaaatacgtgaataattttctattacagaaatgaaaaactgatttgcatctaaaagtgcaagaggtgaagtaatttaaccctttcaccagacgatatggcaatatacaatatattgcttgagctgtttgagaaggctgtgatgtatttttgtattgacatagaaaattataaattacattgaattagtatccataatcactatatatatacacaaaccagttctaaaaaaaatacactggtttaaatttatgagtgaaaacctcacaaggtcagtaaacaattagcatgcttcgggccagattttggattctattttaaaatctagcctgtaaaatgaaccactctaattcantagcagccgagccttttcactgacttgccnataggattatttaggg

SEQ ID NO: 10310 - DNA, 568 bp, Homo sapiens
  misc_feature (396)..(396): "n" may be a, t, c, g, other or unknown
  misc_feature (459)..(459): "n" may be a, t, c, g, other or unknown
  misc_feature (508)..(508): "n" may be a, t, c, g, other or unknown
  misc_feature (522)..(522): "n" may be a, t, c, g, other or unknown
  misc_feature (543)..(543): "n" may be a, t, c, g, other or unknown
  misc_feature (557)..(557): "n" may be a, t, c, g, other or unknown
  misc_feature (560)..(560): "n" may be a, t, c, g, other or unknown
  misc_feature (563)..(563): "n" may be a, t, c, g, other or unknown
  misc_feature (565)..(565): "n" may be a, t, c, g, other or unknown
ctttcaacaaggtcttgttctgtcacccagccaggagtgcagtggcacgatcactgctcactgcagctttgacctcccaggctcaggtgatcctcccacctcagcctcccgagtagctgggactacaggcatgcaccaccacgtccagctaattttttgtactttttgtagagacggggtttcaccatgttgcacaggctggtctcagactcctgggctcaagctatccgcctgcttcggcctcccaaagtgctgggattacaactgggagccaccgtgcccggcccgagatctctcctttaacaagaagttttttgccttgaaaatgtttgcaaaaagcgtttcttgattctgtcaccctgctcccaaagcaacacgtgactacttgcaactcantaaagaagaagtggttgaagttgctccttagcccttaaaaaatcattaaataatcctctaggnggatttttaacactagcaagaaaagctaagggaaatggcaagaaaggangcgggactttccangttgggccacgaaatacgggntggctttcctttanacnaananggg

SEQ ID NO: 10311 - DNA, 531 bp, Homo sapiens
  misc_feature (444)..(444): "n" may be a, t, c, g, other or unknown
  misc_feature (466)..(466): "n" may be a, t, c, g, other or unknown
  misc_feature (480)..(480): "n" may be a, t, c, g, other or unknown
  misc_feature (483)..(483): "n" may be a, t, c, g, other or unknown
  misc_feature (494)..(494): "n" may be a, t, c, g, other or unknown
  misc_feature (499)..(499): "n" may be a, t, c, g, other or unknown
  misc_feature (516)..(516): "n" may be a, t, c, g, other or unknown
aaagtctaaaattatttttttaatgagaagttatttttttcacaagcctcctgaaaaatagcgttataatgccaccattcaattacacggtaagacagtaataccccacctttctatggagcccttggaggtgccaggcatgtgctaatttgaggtttatctcattgaatcctcacagcaatcctaagaaggagatgctatcattacccccagttttcagatgaggaaaccttcagctcagagaggtgaagtgacttgcccagggtcacacagccagtaagtgatgaaactgtgtggctgtgctctctgaatccagagtaatttaaaaagtccaagtagcagcacataggatccacaacactggatgacaggggtcgcgctgttcagaggactgggggccactcccatggctgcagatcgaactctacaatcaccttcaaaagngcctgggcctttgctatgcctntggccaccttctgntgnttctggcatgngctgnttactggcttcaccagnccttttctacttcct

SEQ ID NO: 10312 - DNA, 571 bp, Homo sapiens
  misc_feature (443)..(443): "n" may be a, t, c, g, other or unknown
  misc_feature (517)..(517): "n" may be a, t, c, g, other or unknown
  misc_feature (524)..(524): "n" may be a, t, c, g, other or unknown
  misc_feature (545)..(547): "n" may be a, t, c, g, other or unknown
  misc_feature (560)..(560): "n" may be a, t, c, g, other or unknown
aagataagtcttttgaaaaatagtagaaatagctgaaaggcaagttcagtgtttgacaatcttcaggggcttgagggattataagtacctcatagtctaaatttgagcatattctttttggccattttgatagggtttggctgtgtccccacccaaatctcatcttgacttgtggctcccacagttccctcgtgttgtgggagggacccggtgggaggtggttgaattgtagggggtgggtctttcccatgctgttctcatggtgatgaatgagtctcaggagatctgatgattttgtaggggagagtttccctgcatcagctctcttcccttgtctgctaccatatgagacgtgcctttaaccttccaccatgattgtgaggcctccccagcctcatggaactgtgagtccattaaacatctttcttttgtaaattgcccantcttgggtaccgtctttatcagcacatgaaaagggactaatatcatttattctgaacatacttactggacattnaataggngggaaaactctggctgggggnnnaatttgaatgaanctaatccttgc

SEQ ID NO: 10313 - DNA, 567 bp, Homo sapiens
  misc_feature (374)..(374): "n" may be a, t, c, g, other or unknown
  misc_feature (402)..(402): "n" may be a, t, c, g, other or unknown
  misc_feature (416)..(416): "n" may be a, t, c, g, other or unknown
  misc_feature (449)..(449): "n" may be a, t, c, g, other or unknown
  misc_feature (454)..(454): "n" may be a, t, c, g, other or unknown
  misc_feature (488)..(488): "n" may be a, t, c, g, other or unknown
  misc_feature (490)..(490): "n" may be a, t, c, g, other or unknown
  misc_feature (526)..(526): "n" may be a, t, c, g, other or unknown
  misc_feature (542)..(543): "n" may be a, t, c, g, other or unknown
  misc_feature (557)..(557): "n" may be a, t, c, g, other or unknown
gcccttttcattttcttttaatgtccagagctttcagtgttgtcatactttaattcaaaagtcaacataaaagtttaatacatatagtaagctgaaaagtgttagtgaaatgagctgagctttgcttttccaaacatgtttccaaaagtttattttaaaacacacacatagtgtcagatacaaacgccttttaaccactgtggtggggaagagtaaactgattgcttccaatgatcatctcttccctctgcgtccactgttctcagagtctcagggagtatgagaggatgtgtctcttcctttacttccctgtttgttgtaatgagtccttcgatgagagtaattacgtgaccgaattttccataactatttgntgattattaaagttttgcagtggctggntttcctaatggggncttacaaccaagcatttcttctaaattgggtgnggcanggtcattcacattaaatataccggtattaattancntcttcttctcactactccgagccttaaacaggctgnttaaggcgttttctgnncatcagaagatatncctcttacct

SEQ ID NO: 10314 - DNA, 561 bp, Homo sapiens
  misc_feature (366)..(366): "n" may be a, t, c, g, other or unknown
  misc_feature (403)..(403): "n" may be a, t, c, g, other or unknown
  misc_feature (443)..(443): "n" may be a, t, c, g, other or unknown
  misc_feature (483)..(483): "n" may be a, t, c, g, other or unknown
  misc_feature (493)..(494): "n" may be a, t, c, g, other or unknown
  misc_feature (523)..(523): "n" may be a, t, c, g, other or unknown
  misc_feature (527)..(527): "n" may be a, t, c, g, other or unknown
  misc_feature (529)..(529): "n" may be a, t, c, g, other or unknown
  misc_feature (557)..(557): "n" may be a, t, c, g, other or unknown
gagaaggagtctcactctgtcgcccaggctggagtgcagtggtgcgatctcggctcactgcaacctctgcctcccgggttcaagccattctcctgcctcagcctctggagtagctgggattacagacgtgccaccacgcctggctaattgttgtattattagtagagatggggtttcaccatgttggccaggctggtctcaaactcctgacctcaggtgatccacccacctcggcctcccaaagtgctggagttacaggcgtgagccgccgtgcctggctgattatgcttttttaaaacagaaatgaagcatttatctttttctctctgcctaacccctccagaattcaaaaattctttttttganggggtgtggggagttgggggacgggagtttggtctgncgcctgggctggagtacaatggcacgaatcttagcacatnacaaccttcaacttccgaagtcaagtgatctcctggctancctcccaagnnctgggaatacaggcacctgccaccacggntaantntttttttttttttttgcatttttcaatnaaaa

SEQ ID NO: 10315 - DNA, 568 bp, Homo sapiens
  misc_feature (436)..(436): "n" may be a, t, c, g, other or unknown
  misc_feature (532)..(532): "n" may be a, t, c, g, other or unknown
  misc_feature (541)..(541): "n" may be a, t, c, g, other or unknown
  misc_feature (552)..(552): "n" may be a, t, c, g, other or unknown
  misc_feature (559)..(559): "n" may be a, t, c, g, other or unknown
aaacttttatctttgtaaacaacgcacatgaaccagatgtatttctcagctttacacaggggaaaaggggaattaaaaaaatacgcaattgcccagcaaatgcaaatgtttaaaaaggaaacacggagaaccatgggaatggaacaacagacagaacttcaaacaatgagagaaaaaacgaacaaaacaacaagagaaaacacaacagatctgcaatccaccaatcgctttttcagctgaatgggggttactttaagaccagaagttaaagtcactgctgctggtaggctgcctaattccgagtagctggccctgcttcagggctggggcaccaaagctcgaggagccagcctcttgggtgccattctgtgatgggggcacctagtggggacttttctttaagttcaccgattacttttaacagcatagctccctntcccagtccctgctggtgggaacgaacacgtttatgagaaccacgtcttccagttctttaaagagaacctggggctgggtattgacagatatccgntggtggggnttatcggattnggttaantttataacc

SEQ ID NO: 10316 - DNA, 561 bp, Homo sapiens
  misc_feature (273)..(273): "n" may be a, t, c, g, other or unknown
  misc_feature (446)..(446): "n" may be a, t, c, g, other or unknown
  misc_feature (449)..(449): "n" may be a, t, c, g, other or unknown
  misc_feature (456)..(456): "n" may be a, t, c, g, other or unknown
  misc_feature (521)..(521): "n" may be a, t, c, g, other or unknown
  misc_feature (523)..(523): "n" may be a, t, c, g, other or unknown
  misc_feature (534)..(534): "n" may be a, t, c, g, other or unknown
  misc_feature (537)..(537): "n" may be a, t, c, g, other or unknown
  misc_feature (552)..(552): "n" may be a, t, c, g, other or unknown
  misc_feature (555)..(555): "n" may be a, t, c, g, other or unknown
  misc_feature (559)..(559): "n" may be a, t, c, g, other or unknown
aaaagcttattttgacttgttgcccgggatcaattgcaaaagcgcttctgttgagaaaggacagttcagccaaactcaggctggtttttagaaacagaactggaggaaaaaacccagaaaacataaggcactgggcaaatgtgacgtaggctgggatgaaacccattctcccagagccggtctctcccacagcacaaagctgctcctcatgcagccagctggctgagggcccggagtgtgtccacagagggaggagcggggctggggaggggnagaggggaggctggctccccgaaatgtgacctgaggactgatctgagctgcagtgagcactttttacccaggggctgagcttcctgggctcctgcgacatggatggagctctccctgccgtgctgccagctcaggagcctgaagcccaagggcgcgcttctgtacccagcatncantccctgncagggccttttgagacccgatcctttggtcatcttctcctggtcagcccacccctggcaaacttngngatccctttanatnaccttccctggttanccnttantt

SEQ ID NO: 10317 - DNA, 567 bp, Homo sapiens
  misc_feature (480)..(480): "n" may be a, t, c, g, other or unknown
  misc_feature (493)..(493): "n" may be a, t, c, g, other or unknown
  misc_feature (529)..(529): "n" may be a, t, c, g, other or unknown
  misc_feature (544)..(544): "n" may be a, t, c, g, other or unknown
  misc_feature (548)..(548): "n" may be a, t, c, g, other or unknown
  misc_feature (551)..(551): "n" may be a, t, c, g, other or unknown
  misc_feature (553)..(553): "n" may be a, t, c, g, other or unknown
cttttttcccagtgaattatttttttattttgtagagacggggtctccctgtgatacccaggctggtcttgaactcctcggctcaagcgctcctcccacctcggcctcccaaagttctgggattacaggtgtgagctaccacgtctggcctgggataactcattgtaaaactggtgaagacctgggaccttcccagtagacaatgggacagagtgattgacaggatgagttctggagtacatggcagaaatgtacagagaagtctcccagagaaaactaactggctggaaacagagcctctcctttcttctttgagaggatgagagtgtcactgtcttggatgccatagatccccagacccaaccagtcctgcaggacttggccttggaattccagctgctgctgctttttaggaagcccctgctggcttcaatctgctgcttcagacccaggatgaaacttgttggggtgatggcatangcgtaacttccancattagggattctttacgaaaacctggatctcggangggatggctccaccnaaanatntnaatgtgggaaaaaa

SEQ ID NO: 10318 - DNA, 574 bp, Homo sapiens
  misc_feature (418)..(418): "n" may be a, t, c, g, other or unknown
  misc_feature (449)..(449): "n" may be a, t, c, g, other or unknown
  misc_feature (463)..(464): "n" may be a, t, c, g, other or unknown
  misc_feature (487)..(487): "n" may be a, t, c, g, other or unknown
  misc_feature (517)..(517): "n" may be a, t, c, g, other or unknown
  misc_feature (548)..(548): "n" may be a, t, c, g, other or unknown
  misc_feature (555)..(555): "n" may be a, t, c, g, other or unknown
  misc_feature (568)..(568): "n" may be a, t, c, g, other or unknown
agacagagtctctctctgttacccaggctttaaggtttttggtagacacagggtctcactatgttgcccagtctggtttcaagctcctggcctcaaatgatcctcctgtctcagcctcccaaagtactcatattacaggcatgagccaccatgccctgctgtaaattgttttgaacagagggtgaaataggcttagggaggaacatactgagtctgaaatagaacatccaggtggaggatcagccatcagtgagagctgcacaaaggtcatgattagagcattgactcagcttagagaagggagtcagagttcagacagccacaggcaattcctagagtaagtgaagagaacaattttgaaaggcacctgctgaagaaaagcaattattcattcctaaaaggcactggccgatccttnacattgaacatcagaaaaaggacacttctgnaacaaggcttctgnngggccaaagaaaaactcttttcnggtcctaaaaaattttcaaaaacccgaccnctttaatgggaagcttcatttaaaggccttnttaaaanaacgttccggaanttggaa

SEQ ID NO: 10319 - DNA, 465 bp, Homo sapiens
  misc_feature (82)..(82): "n" may be a, t, c, g, other or unknown
  misc_feature (228)..(228): "n" may be a, t, c, g, other or unknown
  misc_feature (237)..(237): "n" may be a, t, c, g, other or unknown
  misc_feature (348)..(348): "n" may be a, t, c, g, other or unknown
  misc_feature (400)..(400): "n" may be a, t, c, g, other or unknown
  misc_feature (406)..(406): "n" may be a, t, c, g, other or unknown
  misc_feature (409)..(409): "n" may be a, t, c, g, other or unknown
  misc_feature (432)..(432): "n" may be a, t, c, g, other or unknown
  misc_feature (434)..(434): "n" may be a, t, c, g, other or unknown
  misc_feature (457)..(457): "n" may be a, t, c, g, other or unknown
  misc_feature (465)..(465): "n" may be a, t, c, g, other or unknown
aaaagaataaaatttattgtactctcctcgccccagggtgcccctgggaaagcctgaggctacttgtacgcgttggccttgngcttcggcaagaaggcgaagctggggggcactggcccaaggagcatctcgctgatgcggatccagtcggctgccttctggctggccatcagcgtctccaggtagtcgcggcccaggtagtagggcggccgctcgttgatcctctgngggagccgntccagcagccccacgggcacgtaccggcacaggaaggacagccactcgagcagaaagcgccgggtcttctccacgccctgcgtgtccgagccccagtgctccaggccgtanttggtgaagtcccgcaggatgtccaggccgctcggacgacgagatgtcccantgccgntgntccttgatctccgggaaaagccncnggttgagcaaggcgccacgggcnaatatgan

SEQ ID NO: 10320 - DNA, 569 bp, Homo sapiens
  misc_feature (448)..(448): "n" may be a, t, c, g, other or unknown
  misc_feature (455)..(455): "n" may be a, t, c, g, other or unknown
  misc_feature (509)..(509): "n" may be a, t, c, g, other or unknown
  misc_feature (517)..(517): "n" may be a, t, c, g, other or unknown
  misc_feature (546)..(547): "n" may be a, t, c, g, other or unknown
  misc_feature (569)..(569): "n" may be a, t, c, g, other or unknown
gaagaaataaaactgcctttatttgcagataacaatcacatacatagaaaatcctaagggatttacaaaaaaagctgctaaaactaataaggagatttaacagtattgcaggacacaaagcatttctgtatcctaacaaagaataattaaaaactggaatttaaaaaattatttaggctgggcatggtggctcacacctataatcccagcactttgggaggctgaggtgggaggattgcgtgaagccaggagtttgagaccagcctgggcaacaaagcgagaccctgtccacacaaaaaacaaacaaagccaggcatggtgggtatgtgcctgtaatcccagctacttggaaagctgaggcaggagcccaggaaagctgagacttggaaagctaagaccttgagcccaggaattcaaggcttgcagtgagctatgagcatgccactgnactctanaatgagtggccgaaaaaataaacctctatccctgagggtactatgatgcatacntgactggntttgggaaaaactttaaccctttttcccnnggtttatcctacctaacaccan

SEQ ID NO: 10321 - DNA, 569 bp, Homo sapiens
  misc_feature (428)..(428): "n" may be a, t, c, g, other or unknown
  misc_feature (457)..(457): "n" may be a, t, c, g, other or unknown
  misc_feature (473)..(473): "n" may be a, t, c, g, other or unknown
  misc_feature (503)..(503): "n" may be a, t, c, g, other or unknown
  misc_feature (535)..(535): "n" may be a, t, c, g, other or unknown
  misc_feature (538)..(538): "n" may be a, t, c, g, other or unknown
  misc_feature (541)..(541): "n" may be a, t, c, g, other or unknown
  misc_feature (551)..(551): "n" may be a, t, c, g, other or unknown
  misc_feature (560)..(560): "n" may be a, t, c, g, other or unknown
ggcatttgagaccgttgatttttaatattttcttaaaaaaatacaaaggaaattaactctgtaggtcaatacaactcagggaaagagggaaaaatggaatttcagagcaaaggttgtttaggttatcacattcccacactcctaatacccacaaaacaagaatttcactccatgacacagaggaacattgaatggtagctcagaaatgttgatagctgaggtactgaaactaacaaaaggattttggttgtccttgattattctgtcctgtgatgaataaaatctacactaaaggacaggtaaggaaaacttatagcagaaaaaagactagatgtaccaaacacagcagtacaaaccactccttggcagacatgtgcttctaaaagaatgggggcagtaatcaggtagctgaactactaggctactgncactcccagcccatccccaattaaatagnggggaagggtaatagngtagtaagtattgatccaacaaagaaaggntttacccccattcaagggaacattggcatggnttnatnaaccctggcngggaataanaagcctgga

SEQ ID NO: 10322 - DNA, 559 bp, Homo sapiens; identical to SEQ ID NO: 5807
  misc_feature (1)..(559): "n" may be a, t, c, g, other or unknown

SEQ ID NO: 10323 - DNA, 565 bp, Homo sapiens
  misc_feature (456)..(456): "n" may be a, t, c, g, other or unknown
  misc_feature (536)..(536): "n" may be a, t, c, g, other or unknown
  misc_feature (549)..(549): "n" may be a, t, c, g, other or unknown
  misc_feature (551)..(551): "n" may be a, t, c, g, other or unknown
  misc_feature (556)..(556): "n" may be a, t, c, g, other or unknown
  misc_feature (558)..(558): "n" may be a, t, c, g, other or unknown
  misc_feature (565)..(565): "n" may be a, t, c, g, other or unknown
aaagcagtggtattctctggctggtggcagaagcgtatgtcagagagatcagaaaggtaaggaggagtcaacatgagagagagttgctcacttgagatggaggcgggcatgtggtctgagaatgtgccctggccaacagccagcaagaaaacagggacctcagtcctacagccaaaaggaagtgcattctgctaacgacatgacagagcctggaagtgggtttttgccagagcctccagaaagaaatacacaggggctgacaccctgattccagccttgtgctgtttgctatctgtttcctatctgatactctttaccaggcaggcttgctgggtttctcaacctacagctagtaaacaagtgttgtttcatgctgctaagctagtggtagtctattacagagcaatcccaaaccatccccaccccacaaactggccaagtaagagatcttcttgngacttaataaacataccttaatatatgcttatcctgattaacataaattccatatatatatatatatgaatgacagcttntaaaagaagtccncnttctntntcaaggn

SEQ ID NO: 10324 - DNA, 474 bp, Homo sapiens
  misc_feature (293)..(293): "n" may be a, t, c, g, other or unknown
  misc_feature (298)..(298): "n" may be a, t, c, g, other or unknown
  misc_feature (418)..(418): "n" may be a, t, c, g, other or unknown
  misc_feature (425)..(425): "n" may be a, t, c, g, other or unknown
  misc_feature (430)..(430): "n" may be a, t, c, g, other or unknown
  misc_feature (447)..(447): "n" may be a, t, c, g, other or unknown
  misc_feature (452)..(452): "n" may be a, t, c, g, other or unknown
  misc_feature (456)..(456): "n" may be a, t, c, g, other or unknown
  misc_feature (463)..(463): "n" may be a, t, c, g, other or unknown
agcagcctttcctgctcccactttaaagatccctggtgggccatgcacctccaagatgggcaggggagctacacccattgttacaaataggaggcatcagactctgtatttaaaaacagaactgtgcaatgagaatgctttaatcatcacccacacagacgagcggaagctacagacagagaaccactacggatggtgcctggaacagaggtgagaatggcccaaaactctgcctccgggaaaggtgccaagtttacaggacttatcgtggtgccctcaccagacccctcctncttcntctctcctcctcctcctcctccgtggccgctggcggctcctgcatctcctctggggaagcctgaggccggctcgggtaacttctgctgcctgagacagtcacacgtgcttgggacctttnacctgangtctntgggtgctgaactggantggangtanctaggcntgggaaaaaaa

SEQ ID NO: 10325 - DNA, 545 bp, Homo sapiens
  misc_feature (436)..(436): "n" may be a, t, c, g, other or unknown
  misc_feature (451)..(451): "n" may be a, t, c, g, other or unknown
  misc_feature (460)..(460): "n" may be a, t, c, g, other or unknown
  misc_feature (501)..(501): "n" may be a, t, c, g, other or unknown
  misc_feature (511)..(511): "n" may be a, t, c, g, other or unknown
  misc_feature (513)..(513): "n" may be a, t, c, g, other or unknown
  misc_feature (527)..(527): "n" may be a, t, c, g, other or unknown
  misc_feature (543)..(543): "n" may be a, t, c, g, other or unknown
ggagagacggggtctcgctctgttgcttaggctggtcttgagctcctgacctccagcaatcctcctgccttggtttcccaaagtgctggaattacaggcatgagccactgtgctcagcccctttgaaaatattaattctgacttcctataattcccttctatctactcatgcaatacaattatattttctaatatacttaaaaattagaaaattataatcagagtacagatgtttctaccagattaaagctttaaattcaacgtttaatacctaagcttttaacctgtcttcagcaatttcaaaaagctaatacaaatgatcaacaacttgtatatatattttactagaagtgtactctaccatttctagaatacgtgtttagctttatgacataatttcaaggacgtattagacccccaaatatttaaaaaagcngaaaggacctatatnggatgattnaaaatctcattatcctacttcttgaagagctaaaaaaaaancaaccaaacncntaccccccaagttnttaacatttatccacngt

SEQ ID NO: 10326 - DNA, 442 bp, Homo sapiens
  misc_feature (375)..(375): "n" may be a, t, c, g, other or unknown
  misc_feature (394)..(394): "n" may be a, t, c, g, other or unknown
  misc_feature (400)..(401): "n" may be a, t, c, g, other or unknown
  misc_feature (417)..(417): "n" may be a, t, c, g, other or unknown
  misc_feature (420)..(420): "n" may be a, t, c, g, other or unknown
  misc_feature (435)..(435): "n" may be a, t, c, g, other or unknown
caggtttcaaaatgtacagccagggcatgtgctcatttattagggctgactctccgtgtccgcttcctgggaaagaaaatccctgtgacatgaaccgatgaagggacagaagctatcacagatgctacagggctcagagaggggccggggcaatctacactacagaagtaaaagcaacgtaaaatgtttctgggtttcctttcccttcactcaaaaccactatttccttagttctatcaaagtacgtaaggggcataaaatagactcaggaactcggggctaaatcatccaaaaatggagccaaggctctaactagaaactgtctctgtcgtccctgttggcctcaaaaccccgaggtaaaaggctggtctcggntcctcccaggccccctggntcccannacagtgccccgtcctntgngttcatcatcatcgntttttaa

SEQ ID NO: 10327 - DNA, 580 bp, Homo sapiens
  misc_feature (463)..(463): "n" may be a, t, c, g, other or unknown
  misc_feature (511)..(511): "n" may be a, t, c, g, other or unknown
  misc_feature (525)..(525): "n" may be a, t, c, g, other or unknown
  misc_feature (527)..(527): "n" may be a, t, c, g, other or unknown
  misc_feature (529)..(529): "n" may be a, t, c, g, other or unknown
  misc_feature (544)..(544): "n" may be a, t, c, g, other or unknown
  misc_feature (571)..(571): "n" may be a, t, c, g, other or unknown
  misc_feature (580)..(580): "n" may be a, t, c, g, other or unknown
gagacggggttttgctctgtcgcccaggctggagtgcagtggcgcagtctagctcactgcaacctctgcctccaggcttcaagcgattctcctccctcagcctcctgagtagctgggactacaggagcgcatcatcatgcctggctaatttttgtattttcagtagagacggggtttcagtatgttggccaggctgacctcgaactccggacctcaagtaatccacccgctttggcctcccaaagcactgggattataagcatgagccacctgcccagctcatgctgatttaaagggacaaggcagcgagaggcagaagcagagaatcatcctcctcaagccccaggcccaggccaatggcgctgccttggggacttgccggccgggaccaccacaaagggtcctgcgaaggctgcagccgcggctgcattacctctggcctcgctgccaggtccagcacggntgcgcccgccgcatcatgggaaccccccggcgggccctggctggtgangatgatccgttggncnanttggcaaaatgtggngaccaccttgacatgggacgtgggggnctgttgccn

SEQ ID NO: 10328 - DNA, 432 bp, Homo sapiens
  misc_feature (407)..(407): "n" may be a, t, c, g, other or unknown
  misc_feature (409)..(409): "n" may be a, t, c, g, other or unknown
  misc_feature (411)..(411): "n" may be a, t, c, g, other or unknown
  misc_feature (415)..(415): "n" may be a, t, c, g, other or unknown
  misc_feature (427)..(427): "n" may be a, t, c, g, other or unknown
  misc_feature (429)..(429): "n" may be a, t, c, g, other or unknown
  misc_feature (432)..(432): "n" may be a, t, c, g, other or unknown
gagacgggagtcttactctgtcgcccaggctggagtgcagtggcgtgatctcagctccctgcaacctccacctcccaggctcaagcgattctcctgcctcagcctcccgactagctggaccacaggcgtgcaccaccatgcccggctaacctttgcacttctagtggagacgggggtttcaccacgctggtcaggctggtctcgaactcctgacctcgtgatctgcccacctcggcctctcacgccaccatgcccggccctgttcgttacttacaaaaacttctccctctctttgtgcttactagcatttgaagaaatccctgcttcttactgcctgcccctcaaaacaacaaaaggggccaggtatggtggctcatgcctgtaatcccaacactttggggaggctnangngggnggatcacctgangntgn

SEQ ID NO: 10329 - DNA, 543 bp, Homo sapiens
  misc_feature (79)..(79): "n" may be a, t, c, g, other or unknown
  misc_feature (101)..(101): "n" may be a, t, c, g, other or unknown
  misc_feature (138)..(138): "n" may be a, t, c, g, other or unknown
  misc_feature (141)..(141): "n" may be a, t, c, g, other or unknown
  misc_feature (145)..(145): "n" may be a, t, c, g, other or unknown
  misc_feature (148)..(148): "n" may be a, t, c, g, other or unknown
  misc_feature (175)..(175): "n" may be a, t, c, g, other or unknown
  misc_feature (242)..(242): "n" may be a, t, c, g, other or unknown
  misc_feature (249)..(249): "n" may be a, t, c, g, other or unknown
  misc_feature (276)..(276): "n" may be a, t, c, g, other or unknown
  misc_feature (324)..(324): "n" may be a, t, c, g, other or unknown
  misc_feature (446)..(446): "n" may be a, t, c, g, other or unknown
  misc_feature (450)..(450): "n" may be a, t, c, g, other or unknown
  misc_feature (496)..(496): "n" may be a, t, c, g, other or unknown
  misc_feature (515)..(515): "n" may be a, t, c, g, other or unknown
  misc_feature (521)..(521): "n" may be a, t, c, g, other or unknown
  misc_feature (523)..(523): "n" may be a, t, c, g, other or unknown
  misc_feature (525)..(525): "n" may be a, t, c, g, other or unknown
gttgtcaatatgcatttatttacttctttgacaagtttatttttgcgtatctactatgtacgatgcattgaagtccagngacaaacaaaacacagggactntgccctcctggagccgacatctggtgagggagagacncanactntanacagatatttccaaatagcaggtaagngctataaacaaagggaaacagggtaatgggatagagtgacagggggtgggatgagttgctattttanatgaagnggtccaggagggcttccctgaggaggnggcatctggtctgagggctagagaatgtgaaagcagctgtcacctganagctggagaaagaacattccagggagagggagcatcaagacccaaagccctgaggcaaaaacaagcttgccatgttccaggaacagtgaaaggacatccattgacctaatctcaaaagcttnttgnccaaagacaagcaaaggggacccagttcccttggggggttccaaangctctgtgcctgaccccanaggcanangntccttttttcaggctggc

SEQ ID NO: 10330 - DNA, 586 bp, Homo sapiens
  misc_feature (504)..(504): "n" may be a, t, c, g, other or unknown
  misc_feature (514)..(514): "n" may be a, t, c, g, other or unknown
  misc_feature (517)..(517): "n" may be a, t, c, g, other or unknown
  misc_feature (555)..(555): "n" may be a, t, c, g, other or unknown
  misc_feature (557)..(557): "n" may be a, t, c, g, other or unknown
  misc_feature (578)..(578): "n" may be a, t, c, g, other or unknown
gacagagtctcactctgttgtcaggctgcagtacagtggtgcgatctcggctcatgcaacctccgcctcctgggttcaaacagtatttaaatcctgcctcagcctcccgagtagctggaactacaggcatgcgccaccatgcccagctaattcttgcatttttagtagagacagggtttcaccatgttggccaggatggtctctatctcttgacctcatgatccgcctgccttggcctcctaaggtgctgggattacaggcatgagccactgcgcctggcgagaaccacgactttttaaaggaaaccttttctcatgtctttattattcatttgttttgaaaatatcatcaagattaaggatcagctaagaaacagaataatttacatcttacatttcataattttatctatttttgcttataggggagacttgagattaaacgactcccattggtacatttttacaaatattttggtttcaagaaaagcatgtccattttgangcttccatgnggnaattcttgagaagcctaaggatctggcttcaacacaangnttctggggcataaagggggcntttggcaa

SEQ ID NO: 10331 - DNA, 544 bp, Homo sapiens
  misc_feature (286)..(286): "n" may be a, t, c, g, other or unknown
  misc_feature (302)..(302): "n" may be a, t, c, g, other or unknown
  misc_feature (446)..(446): "n" may be a, t, c, g, other or unknown
  misc_feature (464)..(464): "n" may be a, t, c, g, other or unknown
  misc_feature (472)..(472): "n" may be a, t, c, g, other or unknown
  misc_feature (499)..(499): "n" may be a, t, c, g, other or unknown
  misc_feature (515)..(515): "n" may be a, t, c, g, other or unknown
  misc_feature (520)..(520): "n" may be a, t, c, g, other or unknown
  misc_feature (543)..(543): "n" may be a, t, c, g, other or unknown
ggctttctgggtcttttatttgtacccatgtgtctgtcacaccatgaatgtacctggggaaatcaactgaccaccctgaacatttcacgcagtcagggaacaggtgaggaaagaaataaataagtgattctaatgctgcctaggtcaccctcaacccccatttactggcacaattgggtggagagaagggaaggggtatgattgtcctgatggctcagggttgcaggaggttcagaggggaaggaggaaaggccaggctggaggctgggctgttagcacttccctnccacagttcaaacggntcactctgggctcaggtttgccatggcttcctttggtccaaacataggccctgtccttagtcctgtgccctgtttgacttttggccaggaggcctttttgtgctgctgctgttgcagggctagctgcatggcccatatgctcantggccccatgtaggccantgagcggnacactcgcttgttgcaatatgcctctnggggctggaaaggccnaccangcgctccacacggaccggacaanc

SEQ ID NO: 10332 - DNA, 547 bp, Homo sapiens
  misc_feature (496)..(496): "n" may be a, t, c, g, other or unknown
  misc_feature (518)..(519): "n" may be a, t, c, g, other or unknown
gaaggccaaatatctttattgcctccctcccatccccaattccctgttccccccaccaagtcctgctaggaaccatccttagattccaggcccagggactccctccgagtaccaggccggtatgctactggccccgaggcaggcgagggtaggaagaaccgggtgtccggcctttagagcgctcccagcgaacacagtcccgagtcctgcggggtgggggcccctgccagctgccaggccccttctcttgtggaggaccttcaactccttggctatggggttctggctttaggtccatgggctccttgaggggcccctcaggaggtggcagttcctgggtgtcacgggtacctttaggggcgtggcactcccctccctttgggtgcctccgttcgggctgtcgccagggacctcgactgggcttggggggatctagcatagctttctgggtttcgcccaacctttgctgatttgacctggtccctggaatcttctnaatatgtgctggtcgcacagcnnaagaagtggcaaatggattggccgcttg

SEQ ID NO: 10333 - DNA, 548 bp, Homo sapiens
  misc_feature (495)..(495): "n" may be a, t, c, g, other or unknown
  misc_feature (498)..(498): "n" may be a, t, c, g, other or unknown
gagtgttttcagtattttattaacaaatgagctggcaagaggacaagtgatctagtagtatcacccccaccctcatggagcagccaccacaagcccaccatggtggggggtgtccaacatgctctgctggcccagttcccagccgatcccctgagtcttggcgcccgtttagtcacccttcagctgcttgggaggcaggaagagacttcccctcttcacgaggtaagggagacaaaagcagccatttggatgccagggccacaggggcaagccatgccctatttctttggagggacagaatcacttcttcccaaggccagacactgtagcccatggtactcagccttctagaggagggtagcctaacagaggagaagccctgagtggaagcagcattttgaaggcatcggcattcttagaccagcttaaaactgagggcattctctatctttggcagcagacagtgagacttcaggattaaaattaaaagcccgnggngcatcctttcttgcattactttccacaaaaccttggaggagtcaaatccc

SEQ ID NO: 10334 - DNA, 544 bp, Homo sapiens
  misc_feature (43)..(43): "n" may be a, t, c, g, other or unknown
  misc_feature (510)..(510): "n" may be a, t, c, g, other or unknown
  misc_feature (512)..(512): "n" may be a, t, c, g, other or unknown
  misc_feature (525)..(525): "n" may be a, t, c, g, other or unknown
ctcctaaaattttttattactttcagaagcaatactgttgcanggtatcaacaaccacactatgtacccaaataaaatgaatgtcagaaataaaaatactgtcacaaagaagcaccccttattggaagatgtattgaagaagtcttattacactgaaattttatggcacagatcataaaatcagagtctcttcacacataataacaattcatccattttgaaatgagtaacttctcctttgtagtgttgctagtataaaaaaaggtacaagttcaaaatatgctggcaacatacaaaagtggccaatagttttggtctttgagagtacaccctgcagtttaacaaagactggctttgaatcttccactcaaaagcacacttctcttccaaaaagatgactgcccaactgatgccatcccagagagcagatatcccaaccaccaacttgaaatggctgaacaaagaaaactacccaattactttaaagatggggaagcaaaatcaatggcnanggttttaaaatcntaggaattttaaaatcaat

SEQ ID NO: 10335 - DNA, 550 bp, Homo sapiens
  misc_feature (498)..(498): "n" may be a, t, c, g, other or unknown
  misc_feature (544)..(544): "n" may be a, t, c, g, other or unknown
gttgttgtttttgttttgttttgttttttgagatgaagttttactcttgttgaccaggctggagtgcaatgacgtgatcttggctcactgcaacctccgcctcccaggttcaatcaattctcctgcctcagcctcccaagtagctgggattataggcgcccgccaccacgcccagctagtttttttgtatttttagtagagatgaggtttcaccatgttggccaggctggtctggaactcctgacctcaggtgatccacccgcctcggcctcccaaagtgctgggattataggcgtgagccaccgtgcccgaccacagctgttttcttctaccctaccactggcgcttgcctttgaaatctttcctgggggaagccaagaaccctctcaggctaagctccagtgtcggggcttgcccaccctacatcaagacccactaaagtcagtgggattctagagagctttaagtgtcctacgtaaaggtaccaaaaatcaccgngatgaccccaaatgtaactatccaaaaggggagacaggaaggggtntaagct

SEQ ID NO: 10336 - DNA, 563 bp, Homo sapiens
  misc_feature (416)..(416): "n" may be a, t, c, g, other or unknown
  misc_feature (459)..(459): "n" may be a, t, c, g, other or unknown
  misc_feature (490)..(490): "n" may be a, t, c, g, other or unknown
  misc_feature (550)..(550): "n" may be a, t, c, g, other or unknown
  misc_feature (557)..(557): "n" may be a, t, c, g, other or unknown
  misc_feature (559)..(559): "n" may be a, t, c, g, other or unknown
gctttctaaagtggctttaatatcacacaagcggctctttggtctacagtgagagaaaacagagggagccaggaaaggctccccgctggcctctggagtccaggagccttaggaaggctgaaagccagccctgaccagcaggcttagttgtcctgagaagagccagtgaggccacctggtccagttcaccaggtttcccagggaagcacaggcatctctgggtccccgagcacagtgccagggaagacacccccaatccccatctgaacaggccgagggcagcatgggaaaggctcagactgcaggttcatcccgcaggatggtaaggacacgtgctcctccctcgcagagcaggctgtgcacagcccggcacagggccagccagggcggccccttgcgctgtcagcgcttaccanggggaggagttcaaccatcaggaccttttccaagtggatcttnttggtccagcacaagccacttgcactttganggcccgccagggtcttgaacttctgggtgcttgagtagacaaccactgggggctcatcangctccgntntacc

SEQ ID NO: 10337 - DNA, 556 bp, Homo sapiens
  misc_feature (43)..(43): "n" may be a, t, c, g, other or unknown
  misc_feature (72)..(72): "n" may be a, t, c, g, other or unknown
  misc_feature (249)..(249): "n" may be a, t, c, g, other or unknown
  misc_feature (268)..(268): "n" may be a, t, c, g, other or unknown
  misc_feature (270)..(270): "n" may be a, t, c, g, other or unknown
  misc_feature (297)..(297): "n" may be a, t, c, g, other or unknown
  misc_feature (306)..(306): "n" may be a, t, c, g, other or unknown
  misc_feature (381)..(381): "n" may be a, t, c, g, other or unknown
  misc_feature (508)..(508): "n" may be a, t, c, g, other or unknown
  misc_feature (528)..(528): "n" may be a, t, c, g, other or unknown
  misc_feature (546)..(546): "n" may be a, t, c, g, other or unknown
  misc_feature (548)..(548): "n" may be a, t, c, g, other or unknown
  misc_feature (551)..(551): "n" may be a, t, c, g, other or unknown
  misc_feature (554)..(554): "n" may be a, t, c, g, other or unknown
ataacgaaaggagatttatttggtttacggttctgcagactgnacaggaagcacagtgccagcgtctgcttntggtgagggctttaggttaattccatttatggcagaaggagaaggggagctggcatgtgcagagaccaaatgacaagaaagagagagggaagggagcttacaggtttttgtttttgaaagcaaaaacaaaaaacaaacaaacaaaaacccaaccaaacaatagtactccttccactntatgctaacggaagacttntnacaccagccagttaaacaatgaaattnttaaacacncagcctgctggggctgcatgcagagctaaaatgcaggtgtgctgacttcttggagctggagcagaggaaaacatnaaaaagcatatctggaatctatcacagctttctttcttaagcaaataaaaatgcaaattaggtttcataacccccatttcaatttatcaaactttttctggaagaaatttcatttaattatggattnccttaccagggaataaaacntttttacaaacccttttnanggnttncg

SEQ ID NO: 10338 - DNA, 555 bp, Homo sapiens
  misc_feature (501)..(501): "n" may be a, t, c, g, other or unknown
  misc_feature (534)..(534): "n" may be a, t, c, g, other or unknown
gggaaggacatttttattttccctaatcttcaggcaacctcaccaagctggaggtcacatgtagctgagtgtgaaaccaagaaaaatacgaagcttcaaaagtactgtgcgttgtattttttcattctctggcaggctgggagtccaaggtcagtctaggcaggagggctgcttggcctaagcagtcacacaattttcaccgtcttgagcatatctgacaagacatacgtgtcatcccaacccctcccaggcttcctcagggtccgctccaaagcctgggctgtttctaggagctctggtgtggcaagtttttgctcagggtgcagctgacagaacaggatctcattcacttcaccctcaattcgccggacatataggagggggaacactgccttgagcccagccagcactgagtcttttagccccaagtctcggcacacaaggttgagaataaaacaccttcaggagtcaagatcttttaacctttgtagaaaaaaatgnttcccaaatgctggggccgacactaattccagngttgggccctactggcaacat

SEQ ID NO: 10339 - DNA, 487 bp, Homo sapiens
  misc_feature (46)..(46): "n" may be a, t, c, g, other or unknown
  misc_feature (83)..(83): "n" may be a, t, c, g, other or unknown
  misc_feature (101)..(101): "n" may be a, t, c, g, other or unknown
  misc_feature (134)..(134): "n" may be a, t, c, g, other or unknown
  misc_feature (218)..(218): "n" may be a, t, c, g, other or unknown
  misc_feature (242)..(242): "n" may be a, t, c, g, other or unknown
  misc_feature (263)..(263): "n" may be a, t, c, g, other or unknown
  misc_feature (311)..(311): "n" may be a, t, c, g, other or unknown
  misc_feature (313)..(313): "n" may be a, t, c, g, other or unknown
  misc_feature (319)..(319): "n" may be a, t, c, g, other or unknown
  misc_feature (365)..(365): "n" may be a, t, c, g, other or unknown
  misc_feature (426)..(426): "n" may be a, t, c, g, other or unknown
  misc_feature (428)..(428): "n" may be a, t, c, g, other or unknown
  misc_feature (442)..(442): "n" may be a, t, c, g, other or unknown
  misc_feature (460)..(460): "n" may be a, t, c, g, other or unknown
  misc_feature (463)..(463): "n" may be a, t, c, g, other or unknown
  misc_feature (474)..(474): "n" may be a, t, c, g, other or unknown
  misc_feature (476)..(476): "n" may be a, t, c, g, other or unknown
ggctgctgcttccgtttctttattacctgagcccatccggaccctnaagacaactggagcccaccctgccctggaaggctcanctcccctgcttgaggacnccgcacacctgttccaggacgtgacacaggctntggtccttgggcgtcctgctggccaaggagatcttaagcttgtcgaggtaggtgtgctcctggctccagggttcctggagcctnacgaggtcaggggaacccttgtanaactccaccagcagcatcatntcgtgaaggatgtcattggtcaggaagctgtcctggacgtaggccatntncacatncatggggatgccatagtcactgggcctttgctcgggaggaggcatnacccagaaaggcgagatcttggactcggggcctgggttgccaaaatagtaaaggggagcanancagggccaaggcanggcttggaaaccatttgntgnacccctgaaancncaacttggtaa

SEQ ID NO: 10340 - DNA, 560 bp, Homo sapiens
  misc_feature (498)..(499): "n" may be a, t, c, g, other or unknown
  misc_feature (519)..(519): "n" may be a, t, c, g, other or unknown
  misc_feature (533)..(533): "n" may be a, t, c, g, other or unknown
  misc_feature (538)..(538): "n" may be a, t, c, g, other or unknown
  misc_feature (548)..(548): "n" may be a, t, c, g, other or unknown
  misc_feature (557)..(557): "n" may be a, t, c, g, other or unknown
acagagtttacaaataagcagttttattttcaaaagtacatagtaagtccagactgggctattgccaaagaactaatctttagtctacttcaacatgttacatggtattcctgactctacagactatcagcatctgtggaggttagctcctaaaggtcccaaagaacaggaaacatgcaggaataaaggactcctcatgaagagcaggtgggagcgagtgggcaggcctgtatcttctcagcaaagtaaggattgagtatagagagctgtttgtcttaactgggcttccctgaagaatctgagccaaactggaagaaaccagcctcatttccagtgttgagatgttagctgtacagtggctgtacaactgcagagtttatttatagaattagaaataattttttaaaattttaaaagggtttgtgtaatcattaaccagaagatgatattcacaaattctggtaaaaaatttgactcttcactatcaccatatcaacnnggaaaccagggccatgccanccagggaggactgncttanctgccattanggaagttgnccc

SEQ ID NO: 10341 - DNA, 558 bp, Homo sapiens
  misc_feature (493)..(493): "n" may be a, t, c, g, other or unknown
  misc_feature (499)..(499): "n" may be a, t, c, g, other or unknown
  misc_feature (531)..(531): "n" may be a, t, c, g, other or unknown
  misc_feature (558)..(558): "n" may be a, t, c, g, other or unknown
catgtacaaagccaatcatttatttagcactaaaatcaaattataaaaacaacaattccatcttaaaacaggcattttaaaagcatttctgtggttctaagtttgcatcaagacagcctaagtttgcatctgcacaatctggatacccaaatccctctataatttccaaagacaaagacaatttttgctagttgtgaggtgtcagggggaagcagtgatgccctgcaaacagtctaatgggcccagggaaccctgtttctttctcaacctgaggttgcatccttgatctccaggaaaagagattagtgcttgcttaaccaggttcctagtaaatggtcagggatcttctatgcaataatgttgcaaaagttactgaagaggaaaaaaaagcacaacggaggcttcttgcccatttacacttgcaatgttagattttgaaaacagggcccttcatagtcagcacccaagtcctggactttcagatgtaatgcangctggntaacaagcccttaatactacattggaatttcnaacgacttcctggacagttttttaaan

SEQ ID NO: 10342 - DNA, 528 bp, Homo sapiens
  misc_feature (435)..(436): "n" may be a, t, c, g, other or unknown
  misc_feature (476)..(476): "n" may be a, t, c, g, other or unknown
  misc_feature (480)..(480): "n" may be a, t, c, g, other or unknown
  misc_feature (510)..(510): "n" may be a, t, c, g, other or unknown
  misc_feature (512)..(512): "n" may be a, t, c, g, other or unknown
  misc_feature (517)..(517): "n" may be a, t, c, g, other or unknown
aaatacaaagaaaattttatttgtatatcaaagactctaagaaatgatgacataaggttaacagagttgatgtcaagacaaataggtttgaagttatagatgataaatcactttgtcttactgaaccttcccttgattacgttagagagcatccctggtatgctcccagttgaatcttaagcatgatgtgtgtccgggtgatataatcgtaattcctttctgttaatcctcgttctctctcttttttttctttttcttctttttctctggactagcaattgctgtgctggtacatggttcttcctcagaaagtggttcttccttaatgtgtttctttttaccccttttcttcttcttcttcacagatgtttcttcttcttctgccactttttcttcttcctcttcttcaactttaactttaatcttggctttttnnggctttcttttcaagtaatttcatccctctttatctaccnggtnctaattttgcgttttttaaaacaggttggnangtgtnggagtcaccca

SEQ ID NO: 10343 - DNA, 555 bp, Homo sapiens
  misc_feature (489)..(489): "n" may be a, t, c, g, other or unknown
  misc_feature (527)..(527): "n" may be a, t, c, g, other or unknown
  misc_feature (530)..(530): "n" may be a, t, c, g, other or unknown
  misc_feature (534)..(534): "n" may be a, t, c, g, other or unknown
  misc_feature (536)..(536): "n" may be a, t, c, g, other or unknown
  misc_feature (541)..(541): "n" may be a, t, c, g, other or unknown
  misc_feature (550)..(550): "n" may be a, t, c, g, other or unknown
aaatacaaatgttttattacgcaaaccacatgtaggtcccaggctcaggggcttaccctacagcccccactggtccctggctccaagcctgctccttgcccttgcccaccctggaaagccaggatctcctatggagtgtgtaggtgtccacgagtgtaccggtgtgcgggcctcctgggctgcaggcactcaggcatggtggcagcattgagggaaagacaggtgttggggagcggggtccccacctgcccaggctcaggagtcacaggggtctgcacagtcctttctgctgtggaacacgtgatagatgctggtcggggggaacatagcaacagcgccgagcagagagcccacctggatggccacgccggctgccagcaatgccggccggccccgccatgcagcagggagctggctgcaccttacgtaggagaacacgccaagacacagcacccacgacagcacccacgaaggaccacccccggcgangggcccaccaagggccggcaagggcttaaggaatgcancgncatnanggaanccccacaanaaaac

SEQ ID NO: 10344 - DNA, 560 bp, Homo sapiens
  misc_feature (379)..(379): "n" may be a, t, c, g, other or unknown
  misc_feature (406)..(406): "n" may be a, t, c, g, other or unknown
  misc_feature (442)..(442): "n" may be a, t, c, g, other or unknown
  misc_feature (488)..(488): "n" may be a, t, c, g, other or unknown
  misc_feature (527)..(527): "n" may be a, t, c, g, other or unknown
  misc_feature (558)..(558): "n" may be a, t, c, g, other or unknown
gagacagagtcttgctctgtcgcccaggctggaatgcagtggcacgatcttggctcactgtaacctctgcctctcaggtttaagtgattctcatgcctcagcctcccaagtagctgggattacaggcacctgccaccacgcctggctaatttttgtatttttagtagagatgaggtttcaccatgttggccaggctgttctcaaactcctcacctcaggtgatccgcctgcctcgacctcccaaagtctgggattacaggcgtgagccatcgtgcctggcccagccttttcttaaatacttccagagacagggagctcagtgcttctagagtccatctgaccagtgatccgcatttggaccacattagaaaaagtctgncttctttttcctagggaaatttgcctnccgaacaagaacccgctggtccaagctttgaatgcnagtggcttgcgggcagcgcactggattatctttcccgaatgacttntgaaacacttaaacgcccaaaccctggatcttcctctgntaggctgccatttaaagccagttttgagccntg

SEQ ID NO: 10345 - DNA, 556 bp, Homo sapiens
  misc_feature (454)..(454): "n" may be a, t, c, g, other or unknown
  misc_feature (508)..(508): "n" may be a, t, c, g, other or unknown
  misc_feature (514)..(514): "n" may be a, t, c, g, other or unknown
  misc_feature (533)..(534): "n" may be a, t, c, g, other or unknown
gaagcaataaaagcacagatttattgaagcaaaagtatattccacagagtgggagcaggctaaagcaagctgctcaagagccccagttgcaaaatctggggtttaagtaccctttaggggtttcctattggttacaccctatgcgccaccaatcggaggccgaagtgaaggctcccagtctccagactcttattctcctagctcaaagaaatccactgatttcctctgtagcatcttcaggttccatcttgacaacttcctctaaatccccaggggaagagttgtttagagactcctggatgccctgagggagcggctccagagcttgcttccctcctctgttttcacaacggtccagcgataggcactgttctctgacaatccttcttggcactgtttatcgactggtggaggccctgggctatgttccactttggggaaaacagtaccaganagaggagatagttcctgggctctaaattgggttctaggccctgaaaggcatttncccatnagccccaggacaagcatgnncccattcatggggggccttatt

SEQ ID NO: 10346 - DNA, 543 bp, Homo sapiens
  misc_feature (424)..(424): "n" may be a, t, c, g, other or unknown
  misc_feature (426)..(426): "n" may be a, t, c, g, other or unknown
  misc_feature (460)..(460): "n" may be a, t, c, g, other or unknown
  misc_feature (468)..(468): "n" may be a, t, c, g, other or unknown
  misc_feature (471)..(471): "n" may be a, t, c, g, other or unknown
  misc_feature (493)..(493): "n" may be a, t, c, g, other or unknown
  misc_feature (521)..(521): "n" may be a, t, c, g, other or unknown
  misc_feature (524)..(524): "n" may be a, t, c, g, other or unknown
  misc_feature (529)..(529): "n" may be a, t, c, g, other or unknown
gtgtagactactttctaatatttttattttttagcaccaaaaggagaaaacatattgttacaaggctggttatagtgtctcaatggacactgcaaagaactacataaaagaagtctgtctcaagcagttcgtatttgagtcagtggtcagatggggcagttgcgctcagctgcagtccctgactccggaaacactgtgcctctcaaatgatctagagctcatccttggcgtacatgaggggcagttgttgttctagtacccatttagcccatggctcttcaagccaattcacactgggaaaaacacaccctcacaagatgcctatccatttgagttcatacaggttttagtagctagaactaaaaaacatttttaaaattatctaaacaaattggaccaaaagaaaacttgccatacttaaacngnatatatggtcccttttttggctgaaagatcaagnttgggctnttngaccttaccggtactaaggctnggaaattgccggaaaaggttttttaacnttncatantttaaggagcccat

SEQ ID NO: 10347 - DNA, 511 bp, Homo sapiens
  misc_feature (331)..(331): "n" may be a, t, c, g, other or unknown
  misc_feature (397)..(397): "n" may be a, t, c, g, other or unknown
  misc_feature (414)..(414): "n" may be a, t, c, g, other or unknown
  misc_feature (434)..(434): "n" may be a, t, c, g, other or unknown
  misc_feature (451)..(451): "n" may be a, t, c, g, other or unknown
  misc_feature (462)..(462): "n" may be a, t, c, g, other or unknown
  misc_feature (477)..(477): "n" may be a, t, c, g, other or unknown
  misc_feature (506)..(506): "n" may be a, t, c, g, other or unknown
  misc_feature (510)..(510): "n" may be a, t, c, g, other or unknown
gccaaactaccttgttttattggattttgagtaaaaacatgaaccatgtcaaagtttccaggcagactcctaaaaagcattagcagatctggacccaggcaggccagggacagggaggtccctctatcaggttttgaggcgggttgagcgccgaggtagtgggggctgggagggtcgagccgtcaccttgctgggtgttttgtcctgggtgttgggctgggagggtgggcggccgctggaggtgaacagggctgtcaaagcgttccgggcgttgattgcgcaccggcggctcacaggtcgggtggtggggctggggttcttggccgcttgnatttctgcaggttctcaaagtggcccaaggacttgcagtgggaaagctgtgcccctgaattgctgngatagaacttgtggcanatccggagatatagcccatnacgggcccaggaagtcncaccatatgcngaattggggcttganggctccgagcccttcaattctttttgganaatnt

SEQ ID NO: 10348 - DNA, 428 bp, Homo sapiens
  misc_feature (80)..(80): "n" may be a, t, c, g, other or unknown
  misc_feature (132)..(132): "n" may be a, t, c, g, other or unknown
  misc_feature (151)..(151): "n" may be a, t, c, g, other or unknown
  misc_feature (160)..(160): "n" may be a, t, c, g, other or unknown
  misc_feature (162)..(162): "n" may be a, t, c, g, other or unknown
  misc_feature (183)..(184): "n" may be a, t, c, g, other or unknown
  misc_feature (187)..(187): "n" may be a, t, c, g, other or unknown
  misc_feature (248)..(248): "n" may be a, t, c, g, other or unknown
  misc_feature (256)..(256): "n" may be a, t, c, g, other or unknown
  misc_feature (261)..(261): "n" may be a, t, c, g, other or unknown
  misc_feature (337)..(337): "n" may be a, t, c, g, other or unknown
  misc_feature (340)..(340): "n" may be a, t, c, g, other or unknown
  misc_feature (355)..(355): "n" may be a, t, c, g, other or unknown
  misc_feature (376)..(376): "n" may be a, t, c, g, other or unknown
  misc_feature (381)..(381): "n" may be a, t, c, g, other or unknown
  misc_feature (412)..(412): "n" may be a, t, c, g, other or unknown
  misc_feature (420)..(420): "n" may be a, t, c, g, other or unknown
gaaactggaataagtgtttattttctattaataaaaatgaattgtgacaaaagtggactctggcttcccctcccccctcncccccacccctctgggataaaaattttccagcattgccaggagctttcaggnacacattaaagaataaaangaagttaancngctggagtataggatagtatnngantttcaagatcacccaaagctgcactaccgtcccaaagctgaccaagtagaataaaaagaanaggaaaanaaagnacaacccatgcgcaaagatagacatttgcttgatctgctggctcagggccaaatgtttaatttgcttctccaaagncgntcatcttcaaaagcngattctgggaaactgatgccnctagnctaaaagcccactggccatgggaggggcatnaatttccncttggcca

SEQ ID NO: 10349 - DNA, 546 bp, Homo sapiens
  misc_feature (427)..(427): "n" may be a, t, c, g, other or unknown
  misc_feature (464)..(464): "n" may be a, t, c, g, other or unknown
  misc_feature (468)..(468): "n" may be a, t, c, g, other or unknown
  misc_feature (472)..(472): "n" may be a, t, c, g, other or unknown
  misc_feature (483)..(483): "n" may be a, t, c, g, other or unknown
  misc_feature (496)..(496): "n" may be a, t, c, g, other or unknown
  misc_feature (539)..(540): "n" may be a, t, c, g, other or unknown
caagttttagagaactaaatttgcatttgttaaaatcaaaaagtaggaaagatgttctttacaaataattttgatcaagtatgtgttcaaagaaagcaggataaaaaggctttttctctaacattctgtgttgtactgtattgttgttcaataggaattagcttctgtcatttgctaaaagaatgagtagtggggaacaggatatgttggaaatttcataacgggtaacagaaccattctcttgggtaaaccataggcaggggcagctgtgctgtaaccatatggtgttccatagcctggagctatgtagccaggagcagctgtcgccccaacaaaagctccccttggtagaagttcctcttcctctggcccgaacagcttgggactgctgcagacacagctggattcacaacgccctttgcctgangggataatcttccttttcctaataatttgccccattngggnccanaaaacaggttntccaaggagcttnaagcttggacttggcctttgccctttttttaattggacctggnncctttg

SEQ ID NO: 10350 - DNA, 551 bp, Homo sapiens
  misc_feature (42)..(42): "n" may be a, t, c, g, other or unknown
  misc_feature (245)..(245): "n" may be a, t, c, g, other or unknown
  misc_feature (325)..(325): "n" may be a, t, c, g, other or unknown
  misc_feature (436)..(436): "n" may be a, t, c, g, other or unknown
  misc_feature (440)..(440): "n" may be a, t, c, g, other or unknown
  misc_feature (469)..(469): "n" may be a, t, c, g, other or unknown
  misc_feature (477)..(477): "n" may be a, t, c, g, other or unknown
  misc_feature (499)..(499): "n" may be a, t, c, g, other or unknown
  misc_feature (509)..(509): "n" may be a, t, c, g, other or unknown
  misc_feature (514)..(514): "n" may be a, t, c, g, other or unknown
  misc_feature (542)..(542): "n" may be a, t, c, g, other or unknown
ctgagacagagtctcactctgttgcccaggctggagtgcagnggcataatttcggctcactgcaacctccacctcccgaattcaagcgattctcgtgcctcaggcccccaagtagctgggactataggcatgcaccatcatgcccagctaatttttgtattttagtagagacagggtttcaccatattggccaggatggtctcgatcttttgacctatgatccacctgcctcggcctcccaaagngctgggattacaggcgtgagccaccatgcccggccccaggatattcttctgtgcaaagtttaggaaactccatgcacttntcaaaacatcagatgctggggactggcttatacaagaaatatggagaacacatataatagattttagccatggctaaattttcagaattttacccgagaccgataagtggngaanaactccctgaaagttggatttaaagtcanaaaatctntttcgggggggggccgttctantattttgaanaactntttcaaatggctggcaaaaggggcaatnccccccttc

SEQ ID NO: 10351 - DNA, 506 bp, Homo sapiens
  misc_feature (404)..(404): "n" may be a, t, c, g, other or unknown
  misc_feature (409)..(409): "n" may be a, t, c, g, other or unknown
  misc_feature (426)..(426): "n" may be a, t, c, g, other or unknown
  misc_feature (428)..(428): "n" may be a, t, c, g, other or unknown
  misc_feature (435)..(435): "n" may be a, t, c, g, other or unknown
  misc_feature (438)..(438): "n" may be a, t, c, g, other or unknown
  misc_feature (459)..(459): "n" may be a, t, c, g, other or unknown
  misc_feature (505)..(505): "n" may be a, t, c, g, other or unknown
cattgaaaattttacttgaaaaaataaaattccagatactcaggtgagacacaaacccactgttcctgctttgagacctgtgaattcttgtgggacagttccactgacagcttgcgttcccgaggtaccagtcctcagtgacctcgggaaccccaaccacttaggtcccaaagccacaagggtgccctttgtcttgctgggaagctggctgagggcctgccagggctggaggaccagctctcccgcacagggttcagggcctctcccagaaaaaagaggttttgaagtgaaaaggcaacgaggggccagagggctccccaggatgggtcttttggaggtaagattttgatgcccacaacgcatgcaaggctaagacccccaacttagccaacgaagcccatggnctcanaaaggcttgaactttgntnaggccgnggnccagatgcatctggacggttntccaataaaaagccccagggtttgctacctggtacctgctgggctnt

SEQ ID NO: 10352 - DNA, 548 bp, Homo sapiens
  misc_feature (498)..(498): "n" may be a, t, c, g, other or unknown
  misc_feature (508)..(508): "n" may be a, t, c, g, other or unknown
  misc_feature (521)..(521): "n" may be a, t, c, g, other or unknown
  misc_feature (527)..(527): "n" may be a, t, c, g, other or unknown
  misc_feature (544)..(544): "n" may be a, t, c, g, other or unknown
ggatatggtgttcccgatttatttgttttcaggaaacagacaattgcattgtcatacatgacttagaactgcttacttaaatgcacattattagattagattaagtttctcttacaaaaacacaaccatgtcatttaaggcgaaaaatctcagcttctagggagacaagttaatatttatgatatttcctctatctgatttagtgaaatgatccattaatatagttagccaggtttcatcatccttacagttttgctttgcaaatggcatgagaattggtcaatttgtgcctgatttcctcctctctagtagacttattttacttgcaaattaagaacttcagaatcactgaatcaatgggaggtgagaaaggcaccttagaacagatcaggacttaaaaactcaataaaggtattttaaacaaaacttgcaatctacaaatattaattaagtgacaaaatgcaacatgtagatcagacttgcaaaattttttaggtnacctatccangggatatttgcantaagtntagcttggacaacctcntggt

SEQ ID NO: 10353 - DNA, 366 bp, Homo sapiens
  misc_feature (169)..(169): "n" may be a, t, c, g, other or unknown
  misc_feature (195)..(195): "n" may be a, t, c, g, other or unknown
  misc_feature (204)..(204): "n" may be a, t, c, g, other or unknown
  misc_feature (229)..(229): "n" may be a, t, c, g, other or unknown
  misc_feature (290)..(290): "n" may be a, t, c, g, other or unknown
  misc_feature (295)..(295): "n" may be a, t, c, g, other or unknown
  misc_feature (310)..(310): "n" may be a, t, c, g, other or unknown
  misc_feature (313)..(313): "n" may be a, t, c, g, other or unknown
  misc_feature (315)..(315): "n" may be a, t, c, g, other or unknown
  misc_feature (327)..(327): "n" may be a, t, c, g, other or unknown
  misc_feature (332)..(332): "n" may be a, t, c, g, other or unknown
gagacagtttcgctcttgttgctcaggctggagcacacaggcacgatctccactcactgcaacctccgcctcccgggttcaaacgattctgctgcctcagcctcccgagtagctgggatcacaggcgcccgccaccacgcctggccaattttttttgtagttttagtanagacaaggtttcaccatgttggccangccggtctngaactcccgatctcaggcaatccgnctgcctcagcctcccaaagtgccgggattacaggcgtgagccaccacgcccggctttattnttttntttttgagacagagnctngntctgtcacccanactanagtgcaatggtgcgatctcagctcactgcaacct

SEQ ID NO: 10354 - DNA, 504 bp, Homo sapiens
  misc_feature (427)..(428): "n" may be a, t, c, g, other or unknown
  misc_feature (454)..(454): "n" may be a, t, c, g, other or unknown
  misc_feature (468)..(468): "n" may be a, t, c, g, other or unknown
  misc_feature (498)..(498): "n" may be a, t, c, g, other or unknown
  misc_feature (500)..(501): "n" may be a, t, c, g, other or unknown
ctcaaaaacaatgtttattttaacacataaaatgtaccatctagcaccaatgcctgtaaataccagaattccatccggttactactctttggaacaagtatgattaaagtccttgacagattattgtatatgagcgaatggcttcataacataaaacagagagacacagaacagaaattcatttggtatatacatatagaactacatttgtagttattcaaaaacctttcactgcttcatgtaaacaataccagtatttttaagccagattttcctggaacatatacataaagtgcatgagccacgtaagtgcataagcctgaaactggtctttctattctcactccatgctcaaatgaaaaatctgtaaagatatcttttggttcctccaatcttctgattggcttccttagcaactcattacagnnccaatttacctgattaaaatcccatngacatggtatggtnggaggaaaaagaaaacctttggccaatttnannttt

SEQ ID NO: 10355 - DNA, 545 bp, Homo sapiens
  misc_feature (24)..(24): "n" may be a, t, c, g, other or unknown
  misc_feature (80)..(80): "n" may be a, t, c, g, other or unknown
  misc_feature (119)..(119): "n" may be a, t, c, g, other or unknown
  misc_feature (121)..(121): "n" may be a, t, c, g, other or unknown
  misc_feature (171)..(171): "n" may be a, t, c, g, other or unknown
  misc_feature (173)..(173): "n" may be a, t, c, g, other or unknown
  misc_feature (176)..(176): "n" may be a, t, c, g, other or unknown
  misc_feature (204)..(204): "n" may be a, t, c, g, other or unknown
  misc_feature (228)..(228): "n" may be a, t, c, g, other or unknown
  misc_feature (247)..(247): "n" may be a, t, c, g, other or unknown
  misc_feature (292)..(292): "n" may be a, t, c, g, other or unknown
  misc_feature (309)..(309): "n" may be a, t, c, g, other or unknown
  misc_feature (323)..(323): "n" may be a, t, c, g, other or unknown
  misc_feature (375)..(375): "n" may be a, t, c, g, other or unknown
  misc_feature (406)..(406): "n" may be a, t, c, g, other or unknown
  misc_feature (488)..(488): "n" may be a, t, c, g, other or unknown
  misc_feature (503)..(503): "n" may be a, t, c, g, other or unknown
  misc_feature (515)..(515): "n" may be a, t, c, g, other or unknown
  misc_feature (519)..(519): "n" may be a, t, c, g, other or unknown
  misc_feature (522)..(522): "n" may be a, t, c, g, other or unknown
  misc_feature (539)..(539): "n" may be a, t, c, g, other or unknown
  misc_feature (542)..(542): "n" may be a, t, c, g, other or unknown
gaatgaaaaccatgaatttaatgngacattgggggagcctcatccttccctttttaccacccacccatccagcctgttgngagttgggtgagggctgcccccagtctccgtcctgcggntntgggtgccatcctgttcctttgagctcagtcagcctcctgggctcgtctntntgngaatctccttcttgcgtattcatatagngcttgcttgcgctcctgcaggctntcctgccgggcccaggaanacttggcaaatgttagggctgttggctgaggggtcaccgggccanagctgggaaactgaggngatcacaatgtcanagggcttgcggagtcatcatcattaaacacgcatcgaatgccttggaggcanaggctgtgggtagggactgagttcccttggngatgtcttcaggcatgaaagctacggccccctcaacagattaatgatagcaagtctacacaagccagtcttggccagggctntttgggtgacccaanggccatgggggnaaanttncttgactttttgagccnaangtg

SEQ ID NO: 10356 - DNA, 557 bp, Homo sapiens
  misc_feature (400)..(400): "n" may be a, t, c, g, other or unknown
  misc_feature (465)..(465): "n" may be a, t, c, g, other or unknown
  misc_feature (514)..(514): "n" may be a, t, c, g, other or unknown
  misc_feature (528)..(528): "n" may be a, t, c, g, other or unknown
  misc_feature (532)..(532): "n" may be a, t, c, g, other or unknown
  misc_feature (551)..(551): "n" may be a, t, c, g, other or unknown
  misc_feature (555)..(555): "n" may be a, t, c, g, other or unknown
accatggaaaaacatctggatttcatttggtagtttaaaggtttttgaaaatgttgatatacacaagctgtacttggagctggataacagacataggagctggatgacagacatacttttattcttttatttttgagatggagtttcactgtcacccaggctggagtgcaatggagcgatcttggctcactgcaatcctgcttgggtgacagagcgagactttgtctcaaaaaaaattcttttaattaaaaaaaaaaaaaagctttactacttcctgtggagttcataaaaagttcttccctttgttttagtcatccagagtaaagtcatagggctcaaagtctttccggaagcggcgagccagggtctcctcgcttccttgctgatctgacactggctncagtcagacttatcaggaacattaaggatggcttcactggccaggacctcccttccaactgcaanggaaaatccttttaaatctggggaaaagctttctccggggcaagtcacnttaaaaaatgccgntccngctggcaatcggttgatgnaaangg

SEQ ID NO: 10357 - DNA, 540 bp, Homo sapiens
  misc_feature (99)..(99): "n" may be a, t, c, g, other or unknown
  misc_feature (180)..(180): "n" may be a, t, c, g, other or unknown
  misc_feature (203)..(203): "n" may be a, t, c, g, other or unknown
  misc_feature (239)..(239): "n" may be a, t, c, g, other or unknown
  misc_feature (294)..(294): "n" may be a, t, c, g, other or unknown
  misc_feature (462)..(462): "n" may be a, t, c, g, other or unknown
  misc_feature (486)..(486): "n" may be a, t, c, g, other or unknown
  misc_feature (496)..(496): "n" may be a, t, c, g, other or unknown
  misc_feature (499)..(499): "n" may be a, t, c, g, other or unknown
  misc_feature (540)..(540): "n" may be a, t, c, g, other or unknown
gagatggagtctcactctgttgcccaggctggagtgcaatggcatgatctgggctcactgcaagctccgcctcccgggttcacgccattctcctgcctnagcctcctgagcagctgggactacaggtgcccaccaccacgcccggctaattttttgtatttttagtaaaaatggggcttnaccatattagccaggatggtctngatctcctgacctcgtgatctgcccgcctcggcctnccaaagtgctgggattacaggcatgaaccaccgcgcccgacatgcttggtaatgnttagtaaacagcacagtcaggttaccaggtagctttaaggagagagtccactccaaaaaccggtgttggcaggatccccgtcctgcatttcctaacccactcgtggtctacccccagcctttaaagtatggccttctgaaaacctgaccctgggaagctgggaacctnaatttgggcaaatccaatggaatnacctgatgcncanaatttaacttatccaaaggggaacttatggttaaagccctn

SEQ ID NO: 10358 - DNA, 416 bp, Homo sapiens
  misc_feature (395)..(395): "n" may be a, t, c, g, other or unknown
  misc_feature (402)..(402): "n" may be a, t, c, g, other or unknown
  misc_feature (404)..(405): "n" may be a, t, c, g, other or unknown
  misc_feature (411)..(411): "n" may be a, t, c, g, other or unknown
  misc_feature (414)..(414): "n" may be a, t, c, g, other or unknown
  misc_feature (416)..(416): "n" may be a, t, c, g, other or unknown
gagaaaaccatttttattatcattaccacccagcttatctgtgctggattatgtaccaaatggccagatcttctaaagaacatctacataacatttctttcatgtttcaagagatgaaaataactgtacaaggttaagtacaaaagtacacaagacagcggacacgaaaaaatccatgtatgagattttatccccacctgcagcttttatatatttgaaaagtagaattcatgaactaaaaaatattatccttctatagtcctgtcaagtttaatggaagtgggtttaacctgattacaacactaacaccagtatcactgatctgatatttacaaaaatttggatttttcaataaattaaagtcaatgcaacacccatgcaagctagagtgctanctgtttngnngaacanggncn

SEQ ID NO: 10359 - DNA, 564 bp, Homo sapiens
  misc_feature (425)..(425): "n" may be a, t, c, g, other or unknown
  misc_feature (440)..(440): "n" may be a, t, c, g, other or unknown
  misc_feature (454)..(454): "n" may be a, t, c, g, other or unknown
  misc_feature (472)..(472): "n" may be a, t, c, g, other or unknown
  misc_feature (520)..(520): "n" may be a, t, c, g, other or unknown
  misc_feature (544)..(544): "n" may be a, t, c, g, other or unknown
  misc_feature (547)..(547): "n" may be a, t, c, g, other or unknown
  misc_feature (557)..(557): "n" may be a, t, c, g, other or unknown
  misc_feature (559)..(559): "n" may be a, t, c, g, other or unknown
cttgtttcaagtccaatttatttcacacaacacacaggctgctgagggaatccacctgcactgcactcagttgaacttccggcccagtgccgcgtcagagactaaaccatgggagaaagttcacaccctggcctgggccacccaccttcagctctctcctgtgcgtcaggacgcacgctggccccaagagcttcactcaacacggctgggtcctgggcggacgtgggcacagcacttgccaggcgcccctggcaggggctcttctcagtcctccgcaccgctctcctctccgctgtcttcgtcgtcgaccccaccctcggcgccctcaacctcctcactgtcctcttccgagtccgtctcctccagccactccagagtttctgggtccatctccaccaaggccttccacgcctcatcctgtgcangtccaggcagtgcangtcgttaaggtganctggcggcggccggcttnaaaatgccccatagactagagcacccattgcttaaaagcagcatggcntggacctggacacggcccagtgcnggnttccggcttntnaaggt

SEQ ID NO: 10360 - DNA, 481 bp, Homo sapiens
  misc_feature (392)..(392): "n" may be a, t, c, g, other or unknown
  misc_feature (405)..(405): "n" may be a, t, c, g, other or unknown
  misc_feature (410)..(410): "n" may be a, t, c, g, other or unknown
  misc_feature (430)..(430): "n" may be a, t, c, g, other or unknown
  misc_feature (456)..(456): "n" may be a, t, c, g, other or unknown
  misc_feature (461)..(461): "n" may be a, t, c, g, other or unknown
  misc_feature (476)..(476): "n" may be a, t, c, g, other or unknown
ctaatttccctttaatttgtagatttaaccacagaactgtctcgatttttataaaaattgatcccaagatccaccttctgccgtggctgccacagtccaggctgagcttttcctcctgagccacacacgtgtgttcccgtccagcccaaaggggagaggtgtggggcggtggggcggggaggcgccttgtgctgtggcactggacacggtgctcatctgcaggatagccacgaaggcaaacggcacagacgaagacaacacaagacacacgagcctggtcttccatcctcaggactaaaactgcgctgagagcaattcacataatctctgagaaacggcttccttacttgtgcgcagcgtgagccggtacatcttgggcttgcaggttcggntccaacgcagcangcatncaatctgggtgggttttcgngtggatgaattccagttccacgaaantccangattaggacaacttnttcaa

SEQ ID NO: 10361 - DNA, 560 bp, Homo sapiens
  misc_feature (416)..(416): "n" may be a, t, c, g, other or unknown
  misc_feature (439)..(439): "n" may be a, t, c, g, other or unknown
  misc_feature (444)..(444): "n" may be a, t, c, g, other or unknown
  misc_feature (502)..(502): "n" may be a, t, c, g, other or unknown
  misc_feature (504)..(504): "n" may be a, t, c, g, other or unknown
  misc_feature (524)..(524): "n" may be a, t, c, g, other or unknown
  misc_feature (540)..(540): "n" may be a, t, c, g, other or unknown
  misc_feature (544)..(544): "n" may be a, t, c, g, other or unknown
  misc_feature (553)..(553): "n" may be a, t, c, g, other or unknown
  misc_feature (560)..(560): "n" may be a, t, c, g, other or unknown
gaaggagttaattacatgtattgattaatggatagggtaaacagacgaaaatcaataaacctgagccaggctgccccagagtgctcccatgcctgggctctgtctgctaagagggtcagaggcagtctttcctggtcagtgccaggatgaagccagtcctgggccagggtgctcaggcctccagatggattgccctggtgggtgacatcagcatgggctacagatcagtcctaggatcccgctcatcactcgctatcggcctcggcctcactgcctgtgcctgcccagccatatgggtgcaatggcctgcctgagaggagaggatactggggagggggagaaggcctggcacagtactggggaagatggaagcagcaaacaaggctgtgaacacagccaggatcaagccagtgganccagtgcaaacacacatgctcanatganggtggtctcctggaacttttttccaagtaaaaccggtaaagaggaagggcttaagtcnanggctggaacctgcccttaanaccatttttggtacanttgnccaatgccnggggctn

SEQ ID NO: 10362 - DNA, 534 bp, Homo sapiens
  misc_feature (339)..(339): "n" may be a, t, c, g, other or unknown
  misc_feature (387)..(387): "n" may be a, t, c, g, other or unknown
  misc_feature (416)..(416): "n" may be a, t, c, g, other or unknown
  misc_feature (436)..(436): "n" may be a, t, c, g, other or unknown
  misc_feature (443)..(443): "n" may be a, t, c, g, other or unknown
  misc_feature (499)..(499): "n" may be a, t, c, g, other or unknown
  misc_feature (503)..(504): "n" may be a, t, c, g, other or unknown
  misc_feature (506)..(506): "n" may be a, t, c, g, other or unknown
  misc_feature (517)..(517): "n" may be a, t, c, g, other or unknown
ccattaaggagaacatgaatttccttggaggtgaggctccaggtagggacagggcctggtctgctgaaggccacaggaagcaaatggcccccagtccacctttctgtccctgccatgaagggccattacactggggtggggaggtcctcaggagggtgtcacacatagccttaggcaatagcaagtctttcctattcagctctgtccagcctccaattgaggagggataatgggggtgagacagggttgggggtgaagtggccaccaaacccggcaaaagtgagcagctccatcttgtctgaagttaacatcatcccctcaggtataaagcctctcctnacatcgactttggtaaaccagtcagtgacaggccttggccaagctganacttggcaaaaacctgaaccaagtgcccnccggaaagccataatcctancttttgnccttccaatgcttaaaagtcacaatgttccccatgggcatcccttttcctgaatcngctnntngtgtgaaaccnggccagcccggggccta

SEQ ID NO: 10363 - DNA, 454 bp, Homo sapiens
  misc_feature (421)..(421): "n" may be a, t, c, g, other or unknown
  misc_feature (424)..(424): "n" may be a, t, c, g, other or unknown
  misc_feature (439)..(439): "n" may be a, t, c, g, other or unknown
  misc_feature (442)..(442): "n" may be a, t, c, g, other or unknown
  misc_feature (450)..(450): "n" may be a, t, c, g, other or unknown
  misc_feature (452)..(453): "n" may be a, t, c, g, other or unknown
ccagtgaaagacaatatatatatatttggaggtagaaataattacaaaaatactgacatttctaaagcattagcatatttgttacaaacaatcaccaactaatccccattcagaaaactgctttgtaaaatgattattcaacatcttcagaactacatatttgtggcttcttttttgaaatttcacgtgtgagtatttggagaattcagttagtggcaaaaagttgtccatactatgagaaatgtaatatggaaattataaaaagttataaatgttcataaaccccatggtcatcataatgtaaatgtccttgagtgcaccaagttgatatttcctcatcaattgagagttcacagttcttatttcacaggcccattgatgtttttagtaatgtggctatatctgctggcatactcccttnatnaccttcatctactgnagncatatccngnnc

SEQ ID NO: 10364 - DNA, 587 bp, Homo sapiens
  misc_feature (489)..(489): "n" may be a, t, c, g, other or unknown
  misc_feature (528)..(528): "n" may be a, t, c, g, other or unknown
  misc_feature (533)..(533): "n" may be a, t, c, g, other or unknown
  misc_feature (567)..(567): "n" may be a, t, c, g, other or unknown
  misc_feature (579)..(579): "n" may be a, t, c, g, other or unknown
cttttttttttttcgatgagcaaactgaactttaatttgcttacctgaaaggcttgctcttcattattggcataggccacagctatttacacagaatcattgtacaggatttacagcaagatgctacacatagcatcattctggataagcgacaaaggagtaagaacagactggggaataaagctctgaaatcaaagtgtaagcagaaatctgaaggtaggtgtacaaggaaggataagggccaaatgatgagcgaggttggtgaggtagacataagggaggaagaggaaacatccaacaacttgtggtgcagagatataagggaagagtccactggcacatagtcttaaaaattatgtttggagtttgaaggaggaaaaatctgccataagccacctctgtgagaaaaaagaaggcagttagaaccttacaggccaaaccttatacctccctatcaaaagtaatctgctgattaatcctggatagganaatgagaaggttgaaaaagaaagagaggagatgcttgancccgnaccttaaccggagttagagacccaaggaaatttnttcaggaaaggncccaggaa

SEQ ID NO: 10365 - DNA, 587 bp, Homo sapiens
  misc_feature (536)..(536): "n" may be a, t, c, g, other or unknown
  misc_feature (562)..(562): "n" may be a, t, c, g, other or unknown
  misc_feature (570)..(570): "n" may be a, t, c, g, other or unknown
  misc_feature (574)..(574): "n" may be a, t, c, g, other or unknown
  misc_feature (578)..(578): "n" may be a, t, c, g, other or unknown
  misc_feature (580)..(581): "n" may be a, t, c, g, other or unknown
aaccttagtttaggtaaatttaatgactgtaaaagctgttcacatagcagctttaaagagacacgttttccactgacataaagttgcttcgccccttgcagcttatctccaccttcatgacctgtttcctcagtggcaggcaatgtctccccttcctgttggggaggattgcccaagtcagctctgaggccatcctctcaggtcagcaatatgcagaagagtccctcagagtggtcctgcagagaacatgtcccttaagtgtctgagaactggctgaggtgatcttcaccagcacatagtccccaggctgggctctgaccctgagcccagggttattgacatcctccatctctgcatcagggaagatcaccttaaggtttccatcattcctgccacacaggtcaagtggcagaaccgtttactgagcccttccactagcaccacttgggtacaagcccacaagaaggtctgattgggcttttggtgcttcttctcggaagatagtgatgaagttccttcaaacgcttaaattttancctttccgggaaaattattctttagncctttganatgncccngnntttttg

SEQ ID NO: 10366 - DNA, 548 bp, Homo sapiens
  misc_feature (406)..(406): "n" may be a, t, c, g, other or unknown
  misc_feature (421)..(421): "n" may be a, t, c, g, other or unknown
  misc_feature (427)..(427): "n" may be a, t, c, g, other or unknown
  misc_feature (467)..(467): "n" may be a, t, c, g, other or unknown
  misc_feature (484)..(484): "n" may be a, t, c, g, other or unknown
  misc_feature (490)..(490): "n" may be a, t, c, g, other or unknown
  misc_feature (508)..(508): "n" may be a, t, c, g, other or unknown
  misc_feature (515)..(515): "n" may be a, t, c, g, other or unknown
  misc_feature (538)..(538): "n" may be a, t, c, g, other or unknown
  misc_feature (541)..(541): "n" may be a, t, c, g, other or unknown
gtcgctgagaatatttattcaaaaacagggattgaaaaaactgtacagagtgtctgctgctgagaactgggcccctgccccatgccactcccccagctacctggcagtgccccctctttggggtgccccctgacaagcccagccagttcattccagtcaaaagggtatcagtggaagcagcaagaaatctgcaggtggtggggagagaagcctggccccagctacccaacgggccctcctccctgactcccacaaggatgcagtaggccaggaagccctaagggatggggagtgcgtgagtgacacccgccatggtgggggcactagggagtctcctggctgctccctgtatccaagcacagagctgaggaggtagggccccctgccctggggcttgccgaacttnagacccctgggccanaactgncccactctgagagaaagactccataaatggagccaggtanggggtgcatcatgcgtntggccntaccgcgtttggacccangtggagnttcttggccggtaggtgcaaagnaancccctgt

SEQ ID NO: 10367 - DNA, 574 bp, Homo sapiens
  misc_feature (560)..(560): "n" may be a, t, c, g, other or unknown
  misc_feature (574)..(574): "n" may be a, t, c, g, other or unknown
atattttatcaattttattgaaatattccaaggatcccaaccccatttaaaaataaaaattgtaaagcactccattcaataaaagcacataagtccccctcaataattagtatgacaattcacgatacagctcttactctgggagagtttattttaccctttattccaaaaggcacaaagtcatctgaggcctcagatattaaccccactgcatgttaatgacacaccactgaggtgcagctcaatgtaattattaaagcttataacacacttccccaagaatttatagattctttctataaataataatttaaaaaatactgcaccttaagaccaatacaggcttaacaaaagacctgaaatttctgcaagggcagttttgtttcttgatagaagtacaacttttgaaagtctattcccagcaaaagaaacactagacccagcttggccaaagaaacaaaataaaacaggtgatttctaacacgctaaaggagtccatttcatcagcttccaagaaagcagtctgggcattcagaaaggttctatgatccaccagctgnaggcattagaaatn

SEQ ID NO: 10368 - DNA, 570 bp, Homo sapiens
  misc_feature (457)..(457): "n" may be a, t, c, g, other or unknown
  misc_feature (494)..(494): "n" may be a, t, c, g, other or unknown
  misc_feature (505)..(505): "n" may be a, t, c, g, other or unknown
  misc_feature (551)..(552): "n" may be a, t, c, g, other or unknown
  misc_feature (562)..(562): "n" may be a, t, c, g, other or unknown
  misc_feature (566)..(566): "n" may be a, t, c, g, other or unknown
cagggaggagaccacttttattgcttgtctgggtggatggggcaggaggggctgagggcctgtcccagacaataaaggtgccctcagcggatgtgggccatgtcaccaaggaagggggtcttcatgcagccggtgcagagctggtccatccagaggggtgcctcgtgctgcagcggcgtacggcgtgggtagaaggtgaagtccacgcggtagttgagcaggcagctgagggaggccatgtagaggtcagagaagcgcacgaggcgccttgagaagtaggtggggttgtggaaggtgcggaagatgctgccgaactgcgcattgaacagggccttggtgatgcacctcagctcctgccgctctttcatccaggcagccagcacctgcctcgactccgcgtcctgataggtctgcatgcgctccagcagccccgtgagcgcctgctgccacgtcagcnagtgcatgtactgctccgtgttgataatccggatctnaccttcaactnggggataatggccctgtccccaacctgcccgaacatgaaatccgcnnaacacttttnaagnggcc

SEQ ID NO: 10369 - DNA, 566 bp, Homo sapiens
  misc_feature (461)..(461): "n" may be a, t, c, g, other or unknown
  misc_feature (540)..(540): "n" may be a, t, c, g, other or unknown
  misc_feature (543)..(543): "n" may be a, t, c, g, other or unknown
  misc_feature (548)..(548): "n" may be a, t, c, g, other or unknown
  misc_feature (562)..(562): "n" may be a, t, c, g, other or unknown
aattacgcattttaaatatcaatatgtgcatttgtttttacagttataaatttttttctcacctgttttagacaacagcttgtaatagttttgaatccattaagatgttgctttcaatttgaaatattttgtgtatacatgtatataaaaaataacccaatgtatgactcatctgaccgatgtttaagatcaataacggcttatttttcaacatgcagttaggaagagagggaagcaagccaacctctctacagtatctttttgctggcttgtttttgtagtggtatcaatagtggtttttggagggaaccatgtgccttcagcctatctagtcaagatcagataccacgatcaacaagagcggtagaagagatggggaaaggggagtgggtaagtgttaaatatcaattttgtaaagtgtgcattttggactccttctaggcacaggattaaaaacaggnccatgaggaaaaattggtataattaggaaaaactggaatcaaatcaggcctaatagccgaattaaggtcttttaatagntgnctatntggaggttaacctncctt

SEQ ID NO: 10370 - DNA, 518 bp, Homo sapiens
  misc_feature (407)..(407): "n" may be a, t, c, g, other or unknown
  misc_feature (437)..(437): "n" may be a, t, c, g, other or unknown
  misc_feature (462)..(462): "n" may be a, t, c, g, other or unknown
  misc_feature (480)..(480): "n" may be a, t, c, g, other or unknown
  misc_feature (495)..(495): "n" may be a, t, c, g, other or unknown
  misc_feature (499)..(499): "n" may be a, t, c, g, other or unknown
  misc_feature (508)..(508): "n" may be a, t, c, g, other or unknown
  misc_feature (514)..(514): "n" may be a, t, c, g, other or unknown
gggaaatgatgttcttctggacgtataaataaccatcaggtggccaattctcatccagagtggacagggtggaatgggatcatccctgctttcaaatagggacattgacgtacagagagaggagtgggttagctggggccccagggcacagcttcaccaccctggggaggtctggggagagcatcctgtccttcaggacaccccccaccagcggctggaggtgagcacgccatgagtcgccccaggtctgggaagagtgggtgcatgggtgcttaagaggctgcattctcagcgggccctgcacctgccccgtcctccaacccctgtagccgacgtctcctctgctccacttgatgtcgaagccgggtcaagaccagctctgaggcctgaatcaagctgtgctgcangatgtgcacgcccttcagggagaccacggnaagcttctgcacccatcccggtcangtccacgtgagccatggncacaggggactgganaacntccgttgcncagcanatgg

SEQ ID NO: 10371 - DNA, 549 bp, Homo sapiens
  misc_feature (421)..(421): "n" may be a, t, c, g, other or unknown
  misc_feature (431)..(431): "n" may be a, t, c, g, other or unknown
  misc_feature (460)..(460): "n" may be a, t, c, g, other or unknown
  misc_feature (476)..(476): "n" may be a, t, c, g, other or unknown
  misc_feature (482)..(482): "n" may be a, t, c, g, other or unknown
  misc_feature (486)..(486): "n" may be a, t, c, g, other or unknown
  misc_feature (524)..(524): "n" may be a, t, c, g, other or unknown
  misc_feature (533)..(533): "n" may be a, t, c, g, other or unknown
  misc_feature (535)..(535): "n" may be a, t, c, g, other or unknown
gaaacaagtaaatcattggctttattctgggtcctggaagctccactgtgagtctgaaaaaaagacacaacaggggcggcagccctgggggctggtgcagaaaatagtccctggctcctctggccctgggagcctaaagggcagtgaggagaaggcttagcaagaggcctggagcaggggaagtcaggtccctcaggaacccctcctcccccagaggaaggaggaagagggctggagagtctgctggagagtctgctcagttcctcagcaactgcactgcaggagggtgcaggccatgggttactccttgcccttctcaggggcagtgggctcccagagccacttggtagtccccaggggctcagtcccagggtccagcccgtgactcccctaagggcccctcgcccttcaagtccagctnctcaaaagangagccgttgcacctgactccttgaactgngctcgctgcggtgtancgtatnccancacggttgtcgccccagtgacatgtggaactgaagctnccggtgcangnttacttcaactaca

SEQ ID NO: 10372 - DNA, 561 bp, Homo sapiens
  misc_feature (1)..(561): "n" may be a, t, c, g, other or unknown
nnnnnnnnnnnnnnnnnnnnnnnnnnnnnnnnnnnnnnnnnnnnnnnnnnnnnnnnnnnnnnnnnnnnnnnnnnnnnnnnnnnnnnnnnnnnnnnnnnnnnnnnnnnnnnnnnnnnnnnnnnnnnnnnnnnnnnnnnnnnnnnnnnnnnnnnnnnnnnnnnnnnnnnnnnnnnnnnnnnnnnnnnnnnnnnnnnnnnnnnnnnnnnnnnnnnnnnnnnnnnnnnnnnnnnnnnnnnnnnnnnnnnnnnnnnnnnnnnnnnnnnnnnnnnnnnnnnnnnnnnnnnnnnnnnnnnnnnnnnnnnnnnnnnnnnnnnnnnnnnnnnnnnnnnnnnnnnnnnnnnnnnnnnnnnnnnnnnnnnnnnnnnnnnnnnnnnnnnnnnnnnnnnnnnnnnnnnnnnnnnnnnnnnnnnnnnnnnnnnnnnnnnnnnnnnnnnnnnnnnnnnnnnnnnnnnnnnnnnnnnnnnnnnnnnnnnnnnnnnnnnnnnnnnnnnnnnnnnnnnnnnnnnnnnnnnnnnnnnnnnnnnnnnnnnnnnnnnnnnnnnnnnnnnnnnnnnnnnnnnn

SEQ ID NO: 10373 - DNA, 574 bp, Homo sapiens
  misc_feature (454)..(454): "n" may be a, t, c, g, other or unknown
  misc_feature (480)..(480): "n" may be a, t, c, g, other or unknown
  misc_feature (482)..(482): "n" may be a, t, c, g, other or unknown
  misc_feature (488)..(488): "n" may be a, t, c, g, other or unknown
  misc_feature (536)..(536): "n" may be a, t, c, g, other or unknown
  misc_feature (558)..(559): "n" may be a, t, c, g, other or unknown
  misc_feature (574)..(574): "n" may be a, t, c, g, other or unknown
atttaaagacaatagaggggtgtagtattatgacaaaactagttccctcaaaaactgaactgtgttagcattgattagagtgtctaatacataggcagacttggggaaataccagggcttcctcaggatatggtgttgattctgacggtaacctgcagccaaatgtcaagggccataggctgaatgcctggggagctcttccaggggtaaagaatcctcttgggcctgggcccctccaggcagccaagatagggcagaggcagagagatggcccagacctggccaaatgggttctatatgagccgcctttcaataaagacctgggctgtgatgaccccagccgtgttctgtgccacagcgggcggagtgctcacaagtgggtcctcgggccatgtgagaccccactgagtacactgaacaacacgccatcaagcaggttccatctgacacttgnctggggcccacaagccaagcttcagnancatcgnaacctttgccggacaaaagcccagggtccctttagttcatctggatgnttgagtccccttccttggcttnncccggcccacacttn

SEQ ID NO: 10374 - DNA, 575 bp, Homo sapiens
  misc_feature (449)..(449): "n" may be a, t, c, g, other or unknown
  misc_feature (494)..(494): "n" may be a, t, c, g, other or unknown
  misc_feature (506)..(506): "n" may be a, t, c, g, other or unknown
  misc_feature (513)..(513): "n" may be a, t, c, g, other or unknown
  misc_feature (530)..(530): "n" may be a, t, c, g, other or unknown
  misc_feature (564)..(564): "n" may be a, t, c, g, other or unknown
  misc_feature (568)..(568): "n" may be a, t, c, g, other or unknown
gtttatatttttaatattttacatcagtctggctgttacatggaaaataggttacaagagagacaaaagcagaagcagaaagatcagttatccagtattacagtaatccagaggcctgatggaagggaagcactgagaaatggctggatgtggaacaaaatctgcaaacagctgatggactggatgacgaggcatgaagtggagaggagaggaaacaaggatggctcctgcgctctaagcctagacagccgagtgagcaacaacaaggcttcagctgaaatggagaccctggcaggtggggtgcaggtggggagctggatcagaagttctgatgtagacacattaaacaggatgtgctattagacatccaagtggagaacccgagtagactggtggatatgtacctctgtagctcaaaagggaaggtggaatgtaatagatgcccatcnttgggggttcattgggccgtcaaaaacatgcctgaattggggtanagaccaacatcnttaaggncatcctctggcttccanggaaggaaatattttttccggagttcttattccncatnttgacaa

SEQ ID NO: 10375 - DNA, 413 bp, Homo sapiens
  misc_feature (378)..(378): "n" may be a, t, c, g, other or unknown
  misc_feature (397)..(397): "n" may be a, t, c, g, other or unknown
  misc_feature (400)..(400): "n" may be a, t, c, g, other or unknown
  misc_feature (403)..(403): "n" may be a, t, c, g, other or unknown
  misc_feature (406)..(408): "n" may be a, t, c, g, other or unknown
gcgggtcacccgtgctgtttatttacgcagctgtgttttctaacactaatacaatgcatgcatgtattgtgtgttacatggtgaaacagaacagatcctgaagttacacagatggcgtgtgcatgggggtggtgagcacccgcatggcctccgcaaaatgagtgccgcttaacaaacggccccaatgcccggcagtccggctgggcctttcagggcaccagattcctcgttccaggccaagtcagcgacggctcggggaagtctgctgcggctaggagccctcagtgtcggtgttgtcgctgcccgtggtgttctcccggtcctcctccccctgccggcatcctttctgcatcttcctgagggcgcgcttcctgcggnagttctcaaaactctcttnganggnccnnncgttc

SEQ ID NO: 10376 - DNA, 519 bp, Homo sapiens
  misc_feature (423)..(423): "n" may be a, t, c, g, other or unknown
  misc_feature (465)..(465): "n" may be a, t, c, g, other or unknown
  misc_feature (478)..(478): "n" may be a, t, c, g, other or unknown
  misc_feature (482)..(482): "n" may be a, t, c, g, other or unknown
  misc_feature (486)..(486): "n" may be a, t, c, g, other or unknown
  misc_feature (502)..(502): "n" may be a, t, c, g, other or unknown
  misc_feature (510)..(510): "n" may be a, t, c, g, other or unknown
cgccactgagcattttattcaagccagcaaccacggggctctggagaatcggggagcagagtcacgcaagcagaggcagcgtttccttccattcacaccgaggtggcctcctgtggacacggggcctcaccgaggcgctggcggctctggggtgcagctgtgggcggcctgccagctgcttgaggcttcagggccttcttccaggacatggggtggctggccagccctcttcgctacgacccgcaggtgtttgaaggccgggggcagcctgcgccccaggaacggcggggtggtcacgtcgcggatcatgagcacgtactcccctaggtgtgctgccgcagcctgctcctccgtggctctcccctcagcctgctgcctccaggaagctcctgtgccctgggtggggtcccctggggtgcaagnccgctttggaatcttgccgcttgccttcttggggaaggttgncaggaaccggaangggngganccaagccgggggcggncccaggangacaattgg

SEQ ID NO: 10377 - DNA, 561 bp, Homo sapiens
  misc_feature (462)..(462): "n" may be a, t, c, g, other or unknown
  misc_feature (493)..(493): "n" may be a, t, c, g, other or unknown
  misc_feature (559)..(559): "n" may be a, t, c, g, other or unknown
gtttgattctaacaaaatttattatgcagtaattacaaaggttaaagactcttccatctcaaataaaaataacagttataattacacacataatatagtaccttatagaatgattccaataaatatcacaggaaatacagtgcattttcaagttggagagacaaatactttctcattcacagtgtttgacataggaaagcctatttacataacaatctgtataaagtcatgctcttagtaacagtctatacagagctgtgccaacacaattctttcagaatgtgaagtaccgggcaaaccactcctggcgctggggatctggagaagccactggagaagcttcactctgagcaggactcaaaaatgtcttgggccctttaggtggcactggctgtggaagtggtttgctgctgttgaactcaatatcgtggactggagaattaggaatgggatccaggcggntaggatgtccattggccacttcaccagattncagagcacttaaattgggaacactcacaaacctgttggtgggggattaatcatcttcttcttttgntt

SEQ ID NO: 10378 - DNA, 532 bp, Homo sapiens
  misc_feature (50)..(50): "n" may be a, t, c, g, other or unknown
  misc_feature (68)..(68): "n" may be a, t, c, g, other or unknown
  misc_feature (107)..(107): "n" may be a, t, c, g, other or unknown
  misc_feature (114)..(114): "n" may be a, t, c, g, other or unknown
  misc_feature (180)..(180): "n" may be a, t, c, g, other or unknown
  misc_feature (243)..(243): "n" may be a, t, c, g, other or unknown
  misc_feature (281)..(281): "n" may be a, t, c, g, other or unknown
  misc_feature (296)..(296): "n" may be a, t, c, g, other or unknown
  misc_feature (384)..(384): "n" may be a, t, c, g, other or unknown
  misc_feature (445)..(445): "n" may be a, t, c, g, other or unknown
  misc_feature (456)..(456): "n" may be a, t, c, g, other or unknown
  misc_feature (472)..(472): "n" may be a, t, c, g, other or unknown
  misc_feature (477)..(477): "n" may be a, t, c, g, other or unknown
  misc_feature (507)..(507): "n" may be a, t, c, g, other or unknown
  misc_feature (518)..(518): "n" may be a, t, c, g, other or unknown
  misc_feature (525)..(525): "n" may be a, t, c, g, other or unknown
gcctttggaagcccttctttattgggaaataaatacagagttaaacaggngggccggccaacatctgnggctttggaggccaaaaggaaggagtctgacttgctcanaactcanatctccatgagctggtcattccccacgatcacctcattcactcgtttagctttggcttcaatcctntggccacttccaatcaagcagtccttgatgtctgcacccttctcgatcacagcattgttgcanatgacactgccttggatattgcttccttcctccacagngactgagttcatganaaggcaattggtaatagtcactctatcttttatgagacaggatgagccaatgactgagcgcttaatggatgacttctctccaatctgngtctctggcccaatgaggccgtcaactccaaccaggtgtttgctgacaatctgggctgacnaatggactggnggttctttggacaganagcanacagcaatttgggcccctgctggttggttncatgtaaaagncccatgngctcctc

SEQ ID NO: 10379 - DNA, 538 bp, Homo sapiens
  misc_feature (147)..(147): "n" may be a, t, c, g, other or unknown
  misc_feature (217)..(217): "n" may be a, t, c, g, other or unknown
  misc_feature (296)..(296): "n" may be a, t, c, g, other or unknown
  misc_feature (398)..(398): "n" may be a, t, c, g, other or unknown
  misc_feature (489)..(489): "n" may be a, t, c, g, other or unknown
  misc_feature (497)..(497): "n" may be a, t, c, g, other or unknown
  misc_feature (499)..(499): "n" may be a, t, c, g, other or unknown
  misc_feature (514)..(515): "n" may be a, t, c, g, other or unknown
  misc_feature (532)..(532): "n" may be a, t, c, g, other or unknown
  misc_feature (537)..(537): "n" may be a, t, c, g, other or unknown
caggatgtgacaacgtttttaatgcaaagtcaaccattagcatctttcccatgtacttattagatgtgaaatggcaggacttcacggccccgtttgcatattttcctactccgcagacgaataatattttcagggaaggcagcgcantctgtgccgtcacaatcgggcgactgtgggtgatgagggatgatgattttccaggaggccctggggtcanaggactcctagagggagtttccagcccctcaatcgcagatggatggcctgttgatgttgtaactggggtggaagttganccggtcacaggaggtgatgcagttatcggggccagtcacgatgcttttctccaggtaaacattgagagtattgttccggaacattccacccgaggcatctcntgcacggtgggggctctgctcccgtaagcctggttactgggtcctgtcactgaaacagccttctgggtccttgtaacccccgaaccacccngggttggntnaaccttgcccggcanngtccgcgcttacgccgnaagtna

SEQ ID NO: 10380 - DNA, 568 bp, Homo sapiens
  misc_feature (477)..(477): "n" may be a, t, c, g, other or unknown
  misc_feature (488)..(488): "n" may be a, t, c, g, other or unknown
  misc_feature (508)..(508): "n" may be a, t, c, g, other or unknown
  misc_feature (542)..(542): "n" may be a, t, c, g, other or unknown
  misc_feature (568)..(568): "n" may be a, t, c, g, other or unknown
gaacatgaagaaaaacgtttattataaaacttaagaagcaaccaatcaaccaaattatgaaaaaaaattttgtcactgaccaaacctcataacctgaaaagaaccaagaaaagaaattcccattatacttgtacttctaaaagggcttagaggtctaaactagacttcgttgcaatccagaaagttaaaggactaaaaaactggagaaatagagttaagaattagatttatcagacagcatagtctatgctgagatagcaaaatagacatggctttatttgctgattgagaagtggtccagccgtgggctagcagtcatttacatatcagtgaccaaatgcaaacatacccgtactaacagtgctttggtccatgacatacccttttgacagcccaaagctgaaacgtcaactctatctggggttacttgcttatacaaaggatgttactctagcaattggtgcttgagggcaaganccgatgattgncactagtagggaagaaagcngaagtggatgcaacttacactggatagtccctanccttctgggattaatggaaaaggtgn

SEQ ID NO: 10381 - DNA, 403 bp, Homo sapiens
  misc_feature (7)..(7): "n" may be a, t, c, g, other or unknown
  misc_feature (31)..(31): "n" may be a, t, c, g, other or unknown
  misc_feature (98)..(98): "n" may be a, t, c, g, other or unknown
  misc_feature (164)..(164): "n" may be a, t, c, g, other or unknown
  misc_feature (178)..(178): "n" may be a, t, c, g, other or unknown
  misc_feature (197)..(197): "n" may be a, t, c, g, other or unknown
  misc_feature (228)..(228): "n" may be a, t, c, g, other or unknown
  misc_feature (235)..(235): "n" may be a, t, c, g, other or unknown
  misc_feature (329)..(329): "n" may be a, t, c, g, other or unknown
  misc_feature (341)..(341): "n" may be a, t, c, g, other or unknown
  misc_feature (362)..(362): "n" may be a, t, c, g, other or unknown
  misc_feature (373)..(373): "n" may be a, t, c, g, other or unknown
  misc_feature (375)..(375): "n" may be a, t, c, g, other or unknown
  misc_feature (384)..(384): "n" may be a, t, c, g, other or unknown
  misc_feature (402)..(402): "n" may be a, t, c, g, other or unknown
cgctctntttgaacttgaactccaagtcttntaaacaccggccgtgctcggactgcaggtcttcacgtaacttctaatgggctgcttgatgatgactntccaggttcctaagggcccgttcagcctggtttttgtcttgaaaaatcttctccaactcagctctntgttctgccaattntttctgaaactggttttgnaaatcctccatttctgattgatgctttgcanacagttntttgcgtaaattttctaaacataaatctttttcaaattcccaatcttccttcagggtctttactatctgggcgtttttctccatttctgattgnaacttctccttnagctcagctgagcaccacctnctccttctccngngcgtgctgntccctgaggagctccagnt

SEQ ID NO: 10382 - DNA, 564 bp, Homo sapiens
  misc_feature (485)..(485): "n" may be a, t, c, g, other or unknown
  misc_feature (516)..(516): "n" may be a, t, c, g, other or unknown
  misc_feature (540)..(540): "n" may be a, t, c, g, other or unknown
  misc_feature (548)..(548): "n" may be a, t, c, g, other or unknown
aaagaatgtgtccatttattttattattttaaatctgaactttcataaaatgatggttatctgcatttagctccaaacgtttttgtgacgtgaagtggagacaagcccaggtttggacctttgcaccttactatcaggtccagcggctgcaccattcagccttgtaacttaatttgcatctgctgagactgtggcagccccactgcaagtgactcagttttcttgtagtgatagtaagtaggggatgctgtgctcctgactgcatttctcttacagctggtcaaagtcagaaatgatggtgaagtacaagagggtgccccagggtacatgggaatgctcgcggtgcctgagactctggggtggagagaccccagtggggttccaatccctcaaaaggatgcagcttaagaggggacctaaaagaaacttaagcttgaagtttctgagatgtagcatcatttctcttccttctacactcattctgncaggctctttctttttacacactggcccctntttaaagaacccatcaagccaggnccctgcanacagaccggaccgcct

SEQ ID NO: 10383 - DNA, 511 bp, Homo sapiens
  misc_feature (351)..(351): "n" may be a, t, c, g, other or unknown
  misc_feature (430)..(430): "n" may be a, t, c, g, other or unknown
  misc_feature (442)..(442): "n" may be a, t, c, g, other or unknown
  misc_feature (479)..(479): "n" may be a, t, c, g, other or unknown
  misc_feature (482)..(482): "n" may be a, t, c, g, other or unknown
  misc_feature (501)..(501): "n" may be a, t, c, g, other or unknown
  misc_feature (506)..(506): "n" may be a, t, c, g, other or unknown
  misc_feature (510)..(510): "n" may be a, t, c, g, other or unknown
gtaaaactttcccaagacattttcagacttaaaaataaagtcagtgttacaggtgctggtcagccttcttacttgtacctcaaacactgggataaaggaggcggtccagggcaatgcagtgatgtctgtcaagacattccccctcccctaaactcagtagcagttgaggatgacatttcaggctagagagacccaaaatacctctgttccacctgagagcaaggtggaagttgcatcagctactgccccaagtgagcttcatcttctgattgtgggctttggaggaacgagagaactggctcttggccactgtgaggggtacagctttgccactcaaatataccttattgnggcattcagggagccagggtccagagctgcagggctgcggtccctggctcactttcacataggccatcacataacctgncataaaggcatnaaaaccagcccggtgcaatccatcccaggcactgggntangactggcttggttcctggnacttntgang

SEQ ID NO: 10384 - DNA, 563 bp, Homo sapiens
  misc_feature (500)..(500): "n" may be a, t, c, g, other or unknown
  misc_feature (503)..(503): "n" may be a, t, c, g, other or unknown
  misc_feature (522)..(522): "n" may be a, t, c, g, other or unknown
  misc_feature (557)..(557): "n" may be a, t, c, g, other or unknown
  misc_feature (563)..(563): "n" may be a, t, c, g, other or unknown
gacattttatattctttgttaaatggttcctggtacatgttttaagtgcctctgcttctagtttaaatgaatgacccagacagagctttcaagctgtttcttagagaatgtgtggttgagcagaaatggctatccacacctgacacaggtccccacccacctcacaccctggaggcagcagcataagccccagtttccactatggtgtctcctcaatgaccagaatacccgccagttccaggggtcagcaattccattctctctctggctcagttcagaagctgtgatggtcctgttagagagcactgcctgcaggtcaaaacctggaagaggctctcccaggccaggcgacaacccttcaggtgcagacggggaacaaaaggcttaacctgtgataatcccaacaccttctgaaaaaagagtaacagtcatccagcaacgggccatgggtaggggcaggccgtaacaagggacactgcccctggctcacatgtcctgtncanaaggtgggcacagatatangctcgcttttaaggatctggtggaccttttttaanctggcn

SEQ ID NO: 10385 - DNA, 560 bp, Homo sapiens
  misc_feature (496)..(496): "n" may be a, t, c, g, other or unknown
  misc_feature (536)..(536): "n" may be a, t, c, g, other or unknown
  misc_feature (543)..(543): "n" may be a, t, c, g, other or unknown
  misc_feature (546)..(547): "n" may be a, t, c, g, other or unknown
agttttaaaaacttaaagatatttattttttaaaggggaacttatttgagaaacataaaaacacaacagaatactttatacaccacttaatataataaaacagacaataataacatacatttttgcaagcataaacactcaggttactaataacatttgggtgggtctaacagttatgagcagatgagccatatttataaagaaattggtcataaagggaaaggtataaatgcatatcactttggttgttaattgtgtatacccagctttttaactctggtcatctgaaatactgtgcccaacaacctcaagtcttttgatgagattgatggaaactgtgctgggtcaccactgcatatgcagtcacccaaagagctgagatctcaagaaattttatctttcacaaatgcagatgtacgaaaaggatatctcatttatcgaggaagtttcaacattttatgtcacactcaatgcttatacacaaagtcagtattgngataatgcactttcatggagtcagattctgatatccagcngcagaanccnnagaggtccgtttg

SEQ ID NO: 10386 - DNA, 413 bp, Homo sapiens
  misc_feature (290)..(290): "n" may be a, t, c, g, other or unknown
  misc_feature (355)..(355): "n" may be a, t, c, g, other or unknown
  misc_feature (368)..(368): "n" may be a, t, c, g, other or unknown
  misc_feature (395)..(395): "n" may be a, t, c, g, other or unknown
  misc_feature (399)..(399): "n" may be a, t, c, g, other or unknown
  misc_feature (406)..(406): "n" may be a, t, c, g, other or unknown
  misc_feature (409)..(409): "n" may be a, t, c, g, other or unknown
  misc_feature (413)..(413): "n" may be a, t, c, g, other or unknown
gacttcttcctttattatttatttattttgagacggagtttcactcttgttgcccaggctggagtgcagtggcgcgatctcggctcaccacaacttccgcctcccggcttcaagagattctcctgccttgggccgagcacggtggctcacgcccgtaatcccagcactttgggaagccgaggcgggtggatcacctgacgtcaggagtacaagaccagcctggccaacgtggtgaaacccgtctctattaaaaatacaaaaactagccgggcatggtggcggatgcctgnaatcccagccactcgagaggctgaggcaggagaattgcttgaacccgggaagcgggggttgccgngagccgagatcgngccactgcattccagcctgggcaacangagngaaactncgncccn

SEQ ID NO: 10387 - DNA, 560 bp, Homo sapiens
  misc_feature (522)..(522): "n" may be a, t, c, g, other or unknown
  misc_feature (542)..(542): "n" may be a, t, c, g, other or unknown
  misc_feature (551)..(551): "n" may be a, t, c, g, other or unknown
cttcagaacctttttattcatcatctaaccaacagaggtggttggctcgaactcaaactaaaatggcctcaaaaggcccacctcgttacgacatgacagggcaaaaccagaagtagggacagagtttagcctcagttctctgcagagaagaccaagcatgtatttacacacaggtgcctcattaagaactgattggcaatgttccaccagcacagacccagagtgtgcagaaatccgtgggggctctgtatatgtgtcattcagacaatccgccgattcctcagccataaacaagctcttgctttttgggaggagggtgatcagcatgttatcttgaatgatggcaccatttgtttactctggaactttgaaggggaggtgacaacttattttctcccctgaatctgagatgcagtggcctgtcagagtatctaaaaatgtgtcctggaagacaggtggtggtggttgccctaacagagagttacagggtaatggggtgggctctttcagtacttaatccgntggttttcaaaaacccttgnacctggggnccctggacc

SEQ ID NO: 10388 - DNA, 564 bp, Homo sapiens
  misc_feature (467)..(467): "n" may be a, t, c, g, other or unknown
  misc_feature (542)..(542): "n" may be a, t, c, g, other or unknown
  misc_feature (549)..(549): "n" may be a, t, c, g, other or unknown
gaaggtatatgtaggcttttattagggcaagcatttccatatccatacagatttcattaaaacaaatggatgtctcaagtatctttgttaaacaggatccgaaatgaagtaaatagtagttaaaattaattataaataaagacatttcagcacataaaccaacaagtcttttctagatttttaataccaggacctaacagcatcattttccaagtaagtgacaaataactaatgtgaaaaccatatttaatatagatgatgtcacaaatgacaatgtggttttccatagtaaagaaatacgttaattttcttaaatcctatttggtattacaaaataaattttactggtcaaaaaacaaccaaaaaaaaccaggaaaacagacatgatggaaaggttgataaaatatattaataacttaaaaatgctgtcacaagcatggaaatgctaccattatcatttgaatacnacaaaatgctataaagcaaagagttggcagaatacagtagaagagctattctgaaacaaatgaagagtcagaacnttaaacnggggccaggattttt

SEQ ID NO: 10389 - DNA, 414 bp, Homo sapiens
  misc_feature (364)..(364): "n" may be a, t, c, g, other or unknown
  misc_feature (394)..(394): "n" may be a, t, c, g, other or unknown
  misc_feature (398)..(399): "n" may be a, t, c, g, other or unknown
  misc_feature (403)..(403): "n" may be a, t, c, g, other or unknown
  misc_feature (407)..(407): "n" may be a, t, c, g, other or unknown
  misc_feature (412)..(412): "n" may be a, t, c, g, other or unknown
gggctagaaccattttaatataattatacatatctgccaaatccaggaagaaaaggtttatgcatatataacttttccatttaacatgtgcaagcataaacgacaatgatctcagtttaataattcatcagggtcagagcaattgaccaatgtctgtttactgctaggcttaccaacagtaaattacagatgaattagtgtccttttgcttctcttctctgactctctttgtccagagacattttgtcgtaaagtttcagtgcagctcacctccagccaaaggtaatctttttagatcagtactcagttgctctgaattttgcttataattataacctatttaatcacagaagaacccctgcanaggtggagttcaaggttgcatacaataacnggannatcncagntttgnag

SEQ ID NO: 10390 - DNA, 549 bp, Homo sapiens
  misc_feature (401)..(401): "n" may be a, t, c, g, other or unknown
  misc_feature (407)..(407): "n" may be a, t, c, g, other or unknown
  misc_feature (447)..(447): "n" may be a, t, c, g, other or unknown
  misc_feature (487)..(487): "n" may be a, t, c, g, other or unknown
  misc_feature (520)..(520): "n" may be a, t, c, g, other or unknown
  misc_feature (549)..(549): "n" may be a, t, c, g, other or unknown
ggtttagttccaacaaaactttattaataaaacaagcaggtggctggatttaacccaagggctgtaatctgctgacccatgatgtagaagactgagtgccttacagaccaatcctgctacaaataacagatataaattctaggaagaaaacctatttgaggctttggagatttaacaaaaatagattttgaagaggagtcaacacctggagcaagtgatttggtttttgcagtttttccctggaggcagctgcaatggtggtggtgttggcacaaggactgggggagggcaggcagcaaaaactcttgccatctttctgactggaggaaactgggggaaagagcctggaaaaaccataggtgctagagaatgatgcagatgcccaagaaagaagacagccngaagangacaaccccagattctatgtttaacctcagcccaagtctntggctgctcctgaaccatgtatgttggggcaatctgaaancgctttaaactcaggttaaagaacctgaattgngtctatgccctgctctacaggcatggcan

SEQ ID NO: 10391 - DNA, 549 bp, Homo sapiens
  misc_feature (433)..(433): "n" may be a, t, c, g, other or unknown
  misc_feature (436)..(436): "n" may be a, t, c, g, other or unknown
  misc_feature (521)..(521): "n" may be a, t, c, g, other or unknown
gggtgtggggcttgtcttcatttttggtacgagtaaacaggcagcacctgtcactggtgcactatttacaaagcctcttcaataaataatttagagagaatcctacccgaatggctctaacatttgtacatgaatattgtacatgattaaaaataaataaggcaatataatacagttttcccacaaataaaaaggaagttgtttttcaccaaaccccaagggacattatggctaaacacagttcctgaactcccaggaagtggctggggtttggagttgctgatgatggagatgtttgcccctgaagtggagaccttgccaagtctgccatggggtcctttccagaacagtcgtgagcccagagaaggcagcatggtccccgcgacggcttcctctcactgccctacaagtggccacaccttgggcaagcttncangatgtcatgtgtgaccttccggttctgtggaccccaagcacagatggcgtggctggctctcttctaatcttacaggccaaaccangggtcctggactggcttcactcacgcct

SEQ ID NO: 10392 - DNA, 549 bp, Homo sapiens
  misc_feature (379)..(379): "n" may be a, t, c, g, other or unknown
  misc_feature (386)..(386): "n" may be a, t, c, g, other or unknown
  misc_feature (452)..(452): "n" may be a, t, c, g, other or unknown
  misc_feature (473)..(473): "n" may be a, t, c, g, other or unknown
  misc_feature (478)..(478): "n" may be a, t, c, g, other or unknown
  misc_feature (527)..(527): "n" may be a, t, c, g, other or unknown
  misc_feature (543)..(543): "n" may be a, t, c, g, other or unknown
  misc_feature (547)..(547): "n" may be a, t, c, g, other or unknown
accattctagatttttattaaaaaataaacaaacattagtcctactttttgtctctaacgcttcatgaatttatgtgtcagccttgtgcaggggctgtgctaatctctgcattgttcctattttagtacatgggctactgaaacaagcagagtcctacttcttaaacttcctcttccttacacgtaaaaagcccaccagtcaaggtcttttaattttggtgtacactatcactgaatgccatttataaattctaattttaaagagacccttaattttcaaaggaggactttgatagcattagttttcagaaaagatgacttgcaattctaacttagtacttgaaaggtgagatttttataggggaggcttataaaaggngtcttanaaaaaaaatgagcgctctcaaacctttcttttgggaatgaaggtgtggggcttaagtgactttttnaaaggggaacaactgaccttncccgnggagaagccccctatgcgaactgtggccaaccgcaaaggatggttctgngcacattcctggtaancaancg

SEQ ID NO: 10393 - DNA, 452 bp, Homo sapiens
  misc_feature (424)..(424): "n" may be a, t, c, g, other or unknown
  misc_feature (432)..(432): "n" may be a, t, c, g, other or unknown
  misc_feature (440)..(440): "n" may be a, t, c, g, other or unknown
  misc_feature (445)..(446): "n" may be a, t, c, g, other or unknown
  misc_feature (449)..(449): "n" may be a, t, c, g, other or unknown
  misc_feature (451)..(451): "n" may be a, t, c, g, other or unknown
cgcgactgagacgaaacgacacacacctttacttaatggaaggcttcgcttacatcctgaacttaaaggaactacagaaagggacagaaactgctttctttttaaacaatgcgctggaaggttactagtgataggaggcttagtgaagcgcgtgatgtgaacggccacgctgcaaggctggagagaagagaggagggagtgaagttgcaccctgatcgcgaatcctcggccttttatcaggggcgccgccactcggggtccgaccattcgcctccaacgaggggacagcgaatctgctgtcgtgtgcagtccacagcaaccacaggtggggcaacaggaggagcgcttgggcacgaccacgtgacccagcacgagccaccgcccgccccaaaatgaaatcaaatcctaatctcccaatcccggnatgccggncactccanccttnncangna

SEQ ID NO: 10394 - DNA, 548 bp, Homo sapiens
  misc_feature (506)..(506): "n" may be a, t, c, g, other or unknown
  misc_feature (529)..(529): "n" may be a, t, c, g, other or unknown
gcatatataaataacatttattaacttaggctgtacaatatattgatttagtcaaataaaaaataccgtacacaaaaattgaagtaaaatctgtaagatgccattcagactgaattttatattctgaataagacaagggactgccattcacttaaagcaaaatggctccaattccgtttatctatctatctatctatctatctatctatctatctatctatccatctatctatctatctatctataagtctcgctctgtcacccaggctggagtatctatctatttatttatgagataagtctcgctctgtcacccaggctggagtgcggtggtgcaatctcggctcactgcaacctctgcctcccacgttcaagtgatgctcctgtctcagcctactgaggagctgggattacaggcatgcaccatcacacctggctaattttggatttttagtagagatggggttcaccatgttggccagctggtctcgagcttctgacctcanggggatccacccaccttggcctnccaaagggctgggatacag

SEQ ID NO: 10395 - DNA, 551 bp, Homo sapiens
  misc_feature (370)..(370): "n" may be a, t, c, g, other or unknown
  misc_feature (390)..(390): "n" may be a, t, c, g, other or unknown
  misc_feature (393)..(393): "n" may be a, t, c, g, other or unknown
  misc_feature (452)..(452): "n" may be a, t, c, g, other or unknown
  misc_feature (469)..(469): "n" may be a, t, c, g, other or unknown
  misc_feature (484)..(484): "n" may be a, t, c, g, other or unknown
  misc_feature (491)..(491): "n" may be a, t, c, g, other or unknown
  misc_feature (507)..(507): "n" may be a, t, c, g, other or unknown
  misc_feature (551)..(551): "n" may be a, t, c, g, other or unknown
gagctgcagagcactgagctttatttacaaacttccacagaatccctcaccctccaccccagggtcctccctctctggaactcaggcagcagacaagcttgggtccacccacctgcccaacctaggacagctgggcctgagctgggcgggcaggggattccatctcctgggtgcgcctgccagaggggagaggctggaggcggcgggaatgctgttctcccccaggagtcagtcctcagggcttctgccgtgggacgtggggccgagggacctggggcactgaccaggtcggggtcgggggcagcatctgcattggtgaggccgggtgaaaagggctgctggtgccggacagcttctggtgctgggcctnacggagacagaggaccagangtncaggttcctgggggctgagcttttctcagactttggaggaaaaatgtccaacccaacangcaattgcccggggcangggccagtgtgtcanaagcgtnaaactctttcgccggnggatgtggtaccggtgccgggggctcaggaatcgaaggcgggan

SEQ ID NO: 10396 - DNA, 544 bp, Homo sapiens
  misc_feature (419)..(419): "n" may be a, t, c, g, other or unknown
  misc_feature (524)..(524): "n" may be a, t, c, g, other or unknown
  misc_feature (531)..(531): "n" may be a, t, c, g, other or unknown
aagatatgacacatttatcatccataatcaaacaattcaaatccctgactgaaattggcttgaaaaatgatacaaactctatggctgctttaaaggactgtaagataacatgtttttaaagcctatataaaccactgatgcacttttatatactttatattcaaaactaatctatggagctcattccattccatttaaaatagtaagtcctcacatatttgtggttacttttacagtgtttttaaaaaaggagtactgctaataatttaagacatcctaaagacagaataggtgtgaaggcttctttttatatttggggtgttttaggtaatttttaagaacttaaaattattatttgttcctccttaatatgaaactcttccaaaataccttctgaccagtaagtaaatggtccttangcactgtgaggtggattaatgatgaacatgaacccaggctgagaaagtgtccaattggatttaactactggcaaacagttacaagctctgcttatccctgacacnggaaagnctttaccccctcc

SEQ ID NO: 10397 - DNA, 538 bp, Homo sapiens
  misc_feature (528)..(528): "n" may be a, t, c, g, other or unknown
  misc_feature (533)..(533): "n" may be a, t, c, g, other or unknown
gtggttataaatatatatttaatggaaaaaatatacatacattgctggtgtgtgctcaaatacattttgctgatggagtgtgtgaccaggaatgaccccttggtccacagagctctggtgtatgcatggaggtggggggtgggctatgaatcattcctgtgttctcaggcccaggatcatgaagtcacgaggttgaatgtagcagagtctgtctcttccttcaaggctcataacaatgccgcttcctccaggaagcctcccttgctttcccagagacagctgtggcttcctgctctgggcttcccaggccaagttcccagggtccctctctgtgctccagctgtgaccacagaggagtctatgcctgaaaataaaggcccttctgggattctagccatgtctaggcacagaggaggggaaggggaagttttgcagaatgaataaatgaaaaagctggtcatcctttgaattaaatgtggaatgaaaaagtctggttggtcaaggatggggatcggaactttggtctgnttatnttggc

SEQ ID NO: 10398 - DNA, 546 bp, Homo sapiens
  misc_feature (408)..(408): "n" may be a, t, c, g, other or unknown
  misc_feature (423)..(423): "n" may be a, t, c, g, other or unknown
  misc_feature (429)..(429): "n" may be a, t, c, g, other or unknown
  misc_feature (474)..(474): "n" may be a, t, c, g, other or unknown
  misc_feature (493)..(493): "n" may be a, t, c, g, other or unknown
  misc_feature (506)..(506): "n" may be a, t, c, g, other or unknown
  misc_feature (522)..(522): "n" may be a, t, c, g, other or unknown
  misc_feature (536)..(536): "n" may be a, t, c, g, other or unknown
gcagtaatatatgggcttttaattaatacatcaacttacaggatctgctatcattccaagaggtgacaaatatgaacaatacttcaagatgccctttttatgttacattacagttgctgtaactggtttgtattggtgggaaaatcccaggtactgcttttactactgtgatttgttgccagcatttataacttgggagtaaggctaaatttcagtttcattgctgaaaataaagatgtaacattttcttccatcaagttcatggttacccctggcttctatccaggttaagaatccctgcctttagggaaaattctggacataatcaggacactcctgaagaggtttaaagaagaggtaagacctcactcaagaattcccactgcagtacagacagactttcatggnttctttccttggtgncttcanggttgttgcaaatccctcctcaaggcttggttggccaggcctcgntgatgaaatgatattttgnaaaccaggtcatnaacaagttccggtttnctggcattgaccanttctgaggtg

SEQ ID NO: 10399 - DNA, 549 bp, Homo sapiens
  misc_feature (477)..(477): "n" may be a, t, c, g, other or unknown
  misc_feature (480)..(480): "n" may be a, t, c, g, other or unknown
  misc_feature (501)..(501): "n" may be a, t, c, g, other or unknown
  misc_feature (508)..(508): "n" may be a, t, c, g, other or unknown
  misc_feature (536)..(536): "n" may be a, t, c, g, other or unknown
  misc_feature (545)..(545): "n" may be a, t, c, g, other or unknown
  misc_feature (549)..(549): "n" may be a, t, c, g, other or unknown
caggaatatccctagctgctttcatatcggctttgatctgctcactggtgacctgacagcctttctcacagctgctttcctcgaggggaaactgcttcgactggcccatctgatgggagttgtacctctttcgaagtggagtcttgccttttccacttactgacaattctctggactgcactgactctccagttttttcttcacgttcagagtaacgccgagtaccgttcttaggaatccagacttcttggagttctagactatcttcttcatcatcactctctgaatcatgaacagtaattgaggttggttttactacacgctgaagaccactgggtcctgcttgttcctcatcaacatccacaggaataattgcctggctgtgagctggagtattatttccactctcggccaccacctctccatcttcttggacgaaggtcttccatctcatttaatgcgtcaactgcaaactgntgntctctggctgcaaacttgccnaaggcantctcctggctgagcatctggataagggnatgtggccnggan

SEQ ID NO: 10400 - DNA, 140 bp, Homo sapiens
  misc_feature (134)..(140): "n" may be a, t, c, g, other or unknown
gaacatgacctgttgccttttatttaaaaactgttactagccctgcctggggctcctatacaaaaacaaaacacaacctaaaataaggtttcttcctgaccccagagactggggaggggtagggagggtggggnnnnnnn

SEQ ID NO: 10401 - DNA, 502 bp, Homo sapiens
  misc_feature (279)..(279): "n" may be a, t, c, g, other or unknown
  misc_feature (398)..(398): "n" may be a, t, c, g, other or unknown
  misc_feature (414)..(414): "n" may be a, t, c, g, other or unknown
  misc_feature (449)..(449): "n" may be a, t, c, g, other or unknown
  misc_feature (457)..(457): "n" may be a, t, c, g, other or unknown
  misc_feature (459)..(459): "n" may be a, t, c, g, other or unknown
  misc_feature (476)..(476): "n" may be a, t, c, g, other or unknown
  misc_feature (496)..(496): "n" may be a, t, c, g, other or unknown
  misc_feature (502)..(502): "n" may be a, t, c, g, other or unknown
gggcaatatcagaagtgaccatagggcattttaccactgccccatgtgcaatgcctcgatggcattccaattcattttctgtcactgccatgaagttacactcttcacagcagtagtaccttttatctttttcatgggttttagcatgttgcacaaatgttttagggcaattggtaccaaacacacactgaggacactgtaatcgtgcacttcttccttcatcctgaagttctttcaattcacgaatttcctccatcaacttctgtcttctctcctggngaataatcatatgttttagaagtgaattgcgatctcgaaatgtcccgtccacattctctacaagcatatggccttgggacattaagatggcgaaagtgactattcccatctaaatgatncatcatatgccctgtnggaaggtgcttcttcttccctaaaattacaattgnacttttgntncagggggtaaaaatgantggctctttcgggtacttgnaaggan

SEQ ID NO: 10402 - DNA, 561 bp, Homo sapiens
  misc_feature (425)..(425): "n" may be a, t, c, g, other or unknown
  misc_feature (441)..(441): "n" may be a, t, c, g, other or unknown
  misc_feature (450)..(450): "n" may be a, t, c, g, other or unknown
  misc_feature (504)..(504): "n" may be a, t, c, g, other or unknown
  misc_feature (519)..(519): "n" may be a, t, c, g, other or unknown
  misc_feature (529)..(529): "n" may be a, t, c, g, other or unknown
  misc_feature (532)..(532): "n" may be a, t, c, g, other or unknown
  misc_feature (544)..(544): "n" may be a, t, c, g, other or unknown
  misc_feature (560)..(560): "n" may be a, t, c, g, other or unknown
ggcttaagcacatgttgataatcagcagacgtgtaaggtagggctcaagcctactccccaaacccgcttaactcctaacactgctcttcctctacagatgacctaactgcttctttcagctcctggctggcccctctttgaaatcccttgttccgcagctcggagtagaagtcgactccctcagagacagagtggatgggctgattatgatactggtggtagctggtcaaaggacccacggtgggggctgcacttgacagccgccgagggaaacactgatggtgatgtggtaggcagttcgggttttccttgaagctcttactatgcttgcacttgaactccagcaccatcctggtgtacgtgttgaaggtggtgacagcccgacgccatgcagcaggtgaaggagaaccaaggccatgtagaangcccagcccataattncaaacatgnggctccaagtcttttggacccaagttgacagtcgtttggaaaaacttgggaatncttcatgcggccaancatttcccanganaacctgcccggncccaaggaaaccgccng

SEQ ID NO: 10403 - DNA, 541 bp, Homo sapiens
  misc_feature (484)..(484): "n" may be a, t, c, g, other or unknown
  misc_feature (532)..(532): "n" may be a, t, c, g, other or unknown
  misc_feature (541)..(541): "n" may be a, t, c, g, other or unknown
agattctattgctttattgattattactttcattaaacaatgttagccatataggatgattaaaaaaacaactaatatccttggaatatgaacatcctattaactgatacaaactgactccacctttcttatagcagtgaattttcaggtcacatacaatcagtaatttatactccaaatacaacaatcacgtttgtattaatcatccagtacaattcacaggttcctattacacaggtggatgtacttagagagttttagcacaaaagctgatacaaatatgaaagtgtgctcagtcgaatggttagtgaggtgctacaggtgagtgtcggcgatgggtatcctcctgagctccacgatctgggagtcagtcaaggtgcccccctcctggctgccttgaccagattcattatcactgacactgagaccagcaccagtttttaatgcaaatattaaatcatcaacttctgggcttctcatcggntatcaagtgaccctgggcatatcctccaaagacgggaccggggttccnttttggggn

SEQ ID NO: 10404 - DNA, 522 bp, Homo sapiens
  misc_feature (3)..(3): "n" may be a, t, c, g, other or unknown
  misc_feature (104)..(104): "n" may be a, t, c, g, other or unknown
  misc_feature (215)..(215): "n" may be a, t, c, g, other or unknown
  misc_feature (271)..(271): "n" may be a, t, c, g, other or unknown
  misc_feature (452)..(452): "n" may be a, t, c, g, other or unknown
  misc_feature (471)..(471): "n" may be a, t, c, g, other or unknown
  misc_feature (497)..(497): "n" may be a, t, c, g, other or unknown
  misc_feature (501)..(501): "n" may be a, t, c, g, other or unknown
  misc_feature (504)..(504): "n" may be a, t, c, g, other or unknown
  misc_feature (509)..(509): "n" may be a, t, c, g, other or unknown
  misc_feature (513)..(513): "n" may be a, t, c, g, other or unknown
canggcaaaaaaagatattttattttaaaaacatgtttgtgggtttttttcctttttgcattcagtacattgtcattcagacatcacaatactatatacagatncacaacattttttaaaaaaaagcctattcctgatgaacatttcaaaagaacactgttttgtaatgcaccagtgggaagggaagaggcaaggggcccccacagcaccaaggnggcctttgaggagggaactgttaggcagcatctacatttagctaattgagggccanatcttcttgcctcttgaactagatcctctagctttcctctggaaatcagtaaaggtgaaagtgtgaggagtcattcctgggctagtgccctgatggaaaggtgactggacagggattttgttgagggacccactctccatccccttggaagaaaatgtttatccttagaaaaaagttctgnttctggacctggactaatncccaaccttaccccctagagagaganaaanganaaganggancccttttta

SEQ ID NO: 10405 - DNA, 453 bp, Homo sapiens
  misc_feature (260)..(260): "n" may be a, t, c, g, other or unknown
  misc_feature (296)..(296): "n" may be a, t, c, g, other or unknown
  misc_feature (412)..(412): "n" may be a, t, c, g, other or unknown
  misc_feature (425)..(425): "n" may be a, t, c, g, other or unknown
  misc_feature (433)..(433): "n" may be a, t, c, g, other or unknown
  misc_feature (436)..(436): "n" may be a, t, c, g, other or unknown
  misc_feature (446)..(446): "n" may be a, t, c, g, other or unknown
  misc_feature (448)..(448): "n" may be a, t, c, g, other or unknown
  misc_feature (450)..(450): "n" may be a, t, c, g, other or unknown
gaggcacctgtgggactttattagataaacacacaccagctccagccacaggcttggaccggccagctgacagggcggcctcagacacccctgccgggttccgtggcccctggccatggctggaagcagggttcaggccgccccacttctgtctagtcctggcaggccccccctcacctggctctgctgtgggagccgagaacaaagaccccgcctgccccactccttctgccccaggggctcagccagcacccaccctnacagtggcctgggcaggggctggggtacaaagcctnaccctccccctgtgagccagacggaaaatgcatctcccaagagtgtctcgaggggcaggaaggaggcctgcccctccctagccagtgcctacaacagggggtgccctggggggcanaacggccgaccgncaccacanganatcctggggnananaag

SEQ ID NO: 10406 - DNA, 523 bp, Homo sapiens
  misc_feature (459)..(459): "n" may be a, t, c, g, other or unknown
  misc_feature (467)..(467): "n" may be a, t, c, g, other or unknown
  misc_feature (493)..(493): "n" may be a, t, c, g, other or unknown
  misc_feature (498)..(498): "n" may be a, t, c, g, other or unknown
  misc_feature (510)..(510): "n" may be a, t, c, g, other or unknown
  misc_feature (513)..(513): "n" may be a, t, c, g, other or unknown
  misc_feature (520)..(520): "n" may be a, t, c, g, other or unknown
agcattcctttattttagaagttcacacctataattttataacaatcgtgaaaatgttactcagaactagatgttttgatgacacatagcagaaatctgtggttcaagatggtcattgcaaacttaaccaatctcagcattctattctgccttttgttttgattgcacagaatcaatataattctgattcatatggaaaataacttaatatcttaacctccgctcaggatcttcatcataaatgtaggtcagtacatacctaaaaattgtcaatgatccaacatggtcacatgtgacatgctacacttgcacctagtaccaaacaagctgatacttcaatgagatctggttggcatatacacccaagccttgtctgtcccctcagagcactgcacacagatagtgaaagaacttgtgtcaataagaaattcacagggatgaagctgggcccagtgtctnacgcctgnaatccagcactttcagaaggccgaancaggnggatcacttganggncaggagnttc

SEQ ID NO: 10407 - DNA, 553 bp, Homo sapiens
  misc_feature (475)..(475): "n" may be a, t, c, g, other or unknown
  misc_feature (482)..(482): "n" may be a, t, c, g, other or unknown
  misc_feature (503)..(503): "n" may be a, t, c, g, other or unknown
  misc_feature (529)..(529): "n" may be a, t, c, g, other or unknown
  misc_feature (532)..(532): "n" may be a, t, c, g, other or unknown
  misc_feature (542)..(542): "n" may be a, t, c, g, other or unknown
aaaacaaaaaaacttcatttatatacagtcagatataaagacatctctttgactcctgtgcatatatttcctcaactcaagattagggcataaaagtcaggctgctatgccagacatgctctgccctatggcagggccaaggagaggattgtcacttgaaagtgggaacacttaaatggatgacagacaacactggacccacagaccaagagcattcttctaagccctggagtagctcgaggaatggaagagggaaattggaagcagggtcccttttcgatcttcatgtgaagagacccagcctcttcaagggtatccaagataaacttccgttccccaagcccaccaatccctgtccagttcctttgcttcctgccctcccaaataggacattctcctttgtgcccagcccccctttgcacagatccttcaaggggagtcccatgatccacaagggcagagacctttatagcanaaggcanggcaggtacacactatctctncttatgcatgggtgggcactgctganggncttggttcangaaatcccaaa

SEQ ID NO: 10408 - DNA, 286 bp, Homo sapiens
  misc_feature (246)..(246): "n" may be a, t, c, g, other or unknown
  misc_feature (248)..(248): "n" may be a, t, c, g, other or unknown
  misc_feature (257)..(257): "n" may be a, t, c, g, other or unknown
  misc_feature (260)..(260): "n" may be a, t, c, g, other or unknown
  misc_feature (269)..(269): "n" may be a, t, c, g, other or unknown
  misc_feature (277)..(277): "n" may be a, t, c, g, other or unknown
  misc_feature (282)..(282): "n" may be a, t, c, g, other or unknown
acgtatttggcattagaaaccttttattgagacaaggtaaacagtgggctgaaaatattacaggctgaaggaaggctgaggaaaccagtatgaaggcagctcaaatgatgaactaaatatattccaaaggtactatttatacttaaggcagttttaaaagtgaggtcttaaccaaaaagcctttacatggcattcaaaacaaaaacaaaaacaaaaaaaacacgggggggggggggcacttaaatntnttggattgnctnaaagagctnaattatgnacccnaaat

SEQ ID NO: 10409 - DNA, 508 bp, Homo sapiens
  misc_feature (453)..(453): "n" may be a, t, c, g, other or unknown
  misc_feature (467)..(467): "n" may be a, t, c, g, other or unknown
  misc_feature (469)..(469): "n" may be a, t, c, g, other or unknown
  misc_feature (482)..(482): "n" may be a, t, c, g, other or unknown
  misc_feature (492)..(492): "n" may be a, t, c, g, other or unknown
  misc_feature (501)..(501): "n" may be a, t, c, g, other or unknown
  misc_feature (506)..(506): "n" may be a, t, c, g, other or unknown
cctccggtagagatggggtctccctatgttgtccagactggtttcaaactcctgagctcaatgatcttcctgcctcggcctcccaaagtgctgggatttcaggtgtgagccaccatccccggaccttttcttttcaaaacatacataaaaatggaaatgaataggaccagccagtggctgtgatgcagccaaaacgccctgtctggaaagcatgcgtctaggtaatcttcctccgctttgccaggcggtctgaggtctgggctggaggcagcgggagggacagggtgcccagtttgtgatcttcttcactgccggcggccacagacacccttcttttggagatcttcagcctcatggctttggctatctccatcatccttttctcactgagcttcaagtccctctgtaacactgtcaggtcaatttggaagtcatgtatgtgcaaggcaagtntgatcacatatgcngnaatcttcgccttnatagaatccnaaaattaantcccnaa

SEQ ID NO: 10410 - DNA, 540 bp, Homo sapiens; identical to SEQ ID NO: 6715
  misc_feature (1)..(540): "n" may be a, t, c, g, other or unknown

SEQ ID NO: 10411 - DNA, 520 bp, Homo sapiens
  misc_feature (22)..(22): "n" may be a, t, c, g, other or unknown
  misc_feature (47)..(47): "n" may be a, t, c, g, other or unknown
  misc_feature (57)..(57): "n" may be a, t, c, g, other or unknown
  misc_feature (68)..(68): "n" may be a, t, c, g, other or unknown
  misc_feature (73)..(73): "n" may be a, t, c, g, other or unknown
  misc_feature (108)..(108): "n" may be a, t, c, g, other or unknown
  misc_feature (134)..(134): "n" may be a, t, c, g, other or unknown
  misc_feature (137)..(137): "n" may be a, t, c, g, other or unknown
  misc_feature (226)..(226): "n" may be a, t, c, g, other or unknown
  misc_feature (303)..(303): "n" may be a, t, c, g, other or unknown
  misc_feature (314)..(314): "n" may be a, t, c, g, other or unknown
  misc_feature (347)..(347): "n" may be a, t, c, g, other or unknown
  misc_feature (388)..(388): "n" may be a, t, c, g, other or unknown
  misc_feature (395)..(395): "n" may be a, t, c, g, other or unknown
  misc_feature (418)..(418): "n" may be a, t, c, g, other or unknown
  misc_feature (450)..(450): "n" may be a, t, c, g, other or unknown
  misc_feature (479)..(479): "n" may be a, t, c, g, other or unknown
  misc_feature (488)..(488): "n" may be a, t, c, g, other or unknown
  misc_feature (500)..(500): "n" may be a, t, c, g, other or unknown
  misc_feature (507)..(508): "n" may be a, t, c, g, other or unknown
  misc_feature (519)..(519): "n" may be a, t, c, g, other or unknown
cactattttgggtttttatttngttgatgttggttaaatcttatctntttttttatncacaatacttnatgtncctatgaaataaaacaggtagggaatatgtccagngcaaacagaggactcacacctgtgcntanacagcaccatccactgattgtcgctgcagtccacggcgttactaagcctgcgccacccacgtgctgccccaggaggcgctaccaggctnttcgggccacaggcctttcctccactgcatgtggcggcagggcgggtaggtcgcagggctccatgattgtggggcancttcaagggcncatggggcaaaggccctcgaaggtcccctcctnagtaggggatgtcattctgatagtactggatcatgttgtangtccggntcctgttgctgaggaagcagctntggatgaccttcatgatgaaatttgcaacctngggctcagtcatgttggggctaaacctgngctttaaanaacttgattgcntggcccnnaaaaccgggcnt

SEQ ID NO: 10412 - DNA, 531 bp, Homo sapiens
  misc_feature (411)..(411): "n" may be a, t, c, g, other or unknown
  misc_feature (507)..(507): "n" may be a, t, c, g, other or unknown
aaaataaaccattcagtagattttattaaccaaacaaagcctcctgagattggttctgtcacctcggagccacaagctgggaaaagataaccacacccacccagccagcttcccccacccccagctgtttccaggcctgggactggagccctgctgagaccttgtcccacatctaggaccctctagggcctttgggcacagacaagtagcaagggcctctgccaggaacacctagaggatgtccagctgggtgcttctccactctcagtctgtttgctcaaatgtggaattctaatccctggccagtttgcatcccggggatccctgaagagatcccaggaggggagtgctttgtgcactgaaggcgtggaacagggcactggaggaggaagacccagagccctggctctnaagacaggcctggcttcaagcacctggcatcctttccaaggagaaggaagcctgatgtctggattcccattttcttctgaatgccaggaacaccanaatgccctgtgccccttggaagaa

SEQ ID NO: 10413 - DNA, 458 bp, Homo sapiens
  misc_feature (409)..(409): "n" may be a, t, c, g, other or unknown
  misc_feature (415)..(415): "n" may be a, t, c, g, other or unknown
  misc_feature (427)..(427): "n" may be a, t, c, g, other or unknown
  misc_feature (446)..(446): "n" may be a, t, c, g, other or unknown
  misc_feature (448)..(448): "n" may be a, t, c, g, other or unknown
  misc_feature (453)..(453): "n" may be a, t, c, g, other or unknown
  misc_feature (455)..(455): "n" may be a, t, c, g, other or unknown
acccaaggtaaatttttactttaataaccataaaactgatttttcaccttcatgaagtcattgtcttacagaagactcggattcaaatcatgactctttccctcagtagccagaccacttactctgtacctgtaaaaggaggtatgcggtgcttctaaagcatgcactgcatccattcattcacgtggtccactgggtgatgacggtctgtcctccccttaagcaaaaactggctctaagggacaggtcttttcttcacgcaaaaggtgagcaatgcccccagcctttcattctagaaagtgatgaggcgatgattttgtatccacaaaatgcattatcaaagctcaccactttagtgttcatttactaaagttagcagagatctagaatttgaaaaaaaacagtttancaatgngaaataactccncttagcaaattcaattaangnaactngntca

SEQ ID NO: 10414 - DNA, 533 bp, Homo sapiens
  misc_feature (475)..(475): "n" may be a, t, c, g, other or unknown
  misc_feature (496)..(496): "n" may be a, t, c, g, other or unknown
  misc_feature (531)..(531): "n" may be a, t, c, g, other or unknown
  misc_feature (533)..(533): "n" may be a, t, c, g, other or unknown
ctgttaagatactttattttataatcaaaatacgcaatacaaacaaatggacataacaaagattcatataaataactggttataaactttatgaggaaaaatacccgtcagcatggtggctgacttgtactgggtactctgaactttcaaggaggccagagcaggaaagggaaaggaataacccccaccacccccaacacaagagaggcacaaattagagggctgggcacaggctgtagccctgggtgagggggtaagcagcttgacagttgctctgtggtctctgggatataattctgcccaaggctagaaccacagagaagagtttgcactcttaagtccaggaaggggactacctggaaggcctgagaacaaaggagaaagtttagcacactaaacacatggccaggaccctagggacacaaggcaactggagagtgggatctcttggtaaatggcatggtaggcagattanagtcctggctataatccctanggccccaatcctagtagttacctgctaccaaccantn

SEQ ID NO: 10415 - DNA, 545 bp, Homo sapiens
  misc_feature (443)..(443): "n" may be a, t, c, g, other or unknown
  misc_feature (496)..(496): "n" may be a, t, c, g, other or unknown
  misc_feature (524)..(524): "n" may be a, t, c, g, other or unknown
  misc_feature (530)..(530): "n" may be a, t, c, g, other or unknown
  misc_feature (533)..(533): "n" may be a, t, c, g, other or unknown
gacaggagttgaagtttattcttggaaaaaacaaagtcccatcctccccccattgtctaagaaggttcttctaggaggccccgcccctccaaatggtcatttctcttttctgaccccagcttccaccaatgccgttaagatgccgccacttgggtgaggggctcctccaggtactgcaccaaagcctgggccttggccttgagcattccaaagcccacggtctccttggcatacatacacagcagaaggttggccactcgggtgatggctacacggccctccatgcagtccatgaggatgaatttgagattgtcttcattaaacgcttggttcccgttccggtcgtaggcggcccagatgttactggctatggcagcggtgacccgggcgtcagtgtccccgtaaccagagtaggccagcagtgatccctcgttattcagcancagggtgctctggacgccttcagtgttggcttggcttaacacctgggtcaaancctttgggccaaaatgcctacgggtctnaacctnggntttttgccccaa

SEQ ID NO: 10416 - DNA, 401 bp, Homo sapiens
  misc_feature (134)..(134): "n" may be a, t, c, g, other or unknown
  misc_feature (380)..(380): "n" may be a, t, c, g, other or unknown
  misc_feature (384)..(384): "n" may be a, t, c, g, other or unknown
  misc_feature (389)..(390): "n" may be a, t, c, g, other or unknown
  misc_feature (392)..(392): "n" may be a, t, c, g, other or unknown
  misc_feature (394)..(395): "n" may be a, t, c, g, other or unknown
gctggcaactcagtctttattgatggtttcatttttggggtcaccagtgctaagaggtggaaggtgggggggcacctttatgtgtgtcaaggaccccagagcacccccctcacgagagaataaatccaatttanaacttacaaggtggtggggatgggaagaggaagggacacagtatgtacagatgcttaaggggatgctggagggccttcagcaacagggaatggaggtgccaaagaggaagtcgggcagagtcagccactgatctggaccccctcagcctcggccagagggtagatctcaatggcttccaccaggggtagcgcctccacagcagtctccatgacggccaggccaacggcagcctccgcctttgccanctgntgccnnananngcctga

SEQ ID NO: 10417 - DNA, 554 bp, Homo sapiens
  misc_feature (492)..(492): "n" may be a, t, c, g, other or unknown
  misc_feature (513)..(513): "n" may be a, t, c, g, other or unknown
  misc_feature (523)..(524): "n" may be a, t, c, g, other or unknown
gtcaggaaaatatctgatctgattcttcccagcttgcttcccctacaacttaataagcccttcactaacccctgtatgtattaactgcaattgcctagcccggcatttacactctcaaaagatttaacgcaattacaatcaaaaaacacttgtcatatataacactttttcacatggaaataaattggtggtttaaggtttacaattcctttgaataaaatttcagttattagttacaaaatgctaagacagattgaggtctcaaagaaagaacttgagaaaattatgttttaaaggacttcacaaatatgaagcataattgttagaatcctgatacaaagtaacttttcctaggtttaaggttcaagtctgaattcttgaattgtccagcatcaacgagacctcatttatattctttttattttatcattactttcagattcagggtctctcgctattttgcccaagctggactcctgggctcaatgggancctcctgcttaacctccgaanggttggattnnaggcttgcccatggcccggggttacaaatt

SEQ ID NO: 10418 - DNA, 543 bp, Homo sapiens
  misc_feature (395)..(395): "n" may be a, t, c, g, other or unknown
  misc_feature (421)..(421): "n" may be a, t, c, g, other or unknown
  misc_feature (428)..(428): "n" may be a, t, c, g, other or unknown
  misc_feature (434)..(434): "n" may be a, t, c, g, other or unknown
  misc_feature (446)..(446): "n" may be a, t, c, g, other or unknown
  misc_feature (490)..(490): "n" may be a, t, c, g, other or unknown
  misc_feature (506)..(506): "n" may be a, t, c, g, other or unknown
  misc_feature (535)..(535): "n" may be a, t, c, g, other or unknown
atacttttgtttatctacaacccaataacagacatgagggatggccctgtctctctgggacagagcctcacagatgatgtccatgttttgtgtgaatgaaactcaaacactcttcagtttttagagtcattttctggtatcgagcgaccacaccgaggagcacaccctgcttccaaggctgctgccttctgcacacagtgggggatccccacccaccctggctcccctcaagggctgcgtgcacagtgcccgctttccagttacctgacccaccctgagtccctattccattttgctcggggctgacctcagacatgccctgtggctcagctctgccactactcagaacaccagcctcagcttccctatgtcccccagattcagcagcccaacanggattgggggaaatgctccacatcangtgggtnggtggnctgggtccctgnaaactggactggctttttaagccatttcaggaacacactaacanaacaatggcccttaancccaaggggatgccaatttttccctgggnttttggcc

SEQ ID NO: 10419 - DNA, 556 bp, Homo sapiens
  misc_feature (430)..(430): "n" may be a, t, c, g, other or unknown
  misc_feature (494)..(494): "n" may be a, t, c, g, other or unknown
  misc_feature (499)..(499): "n" may be a, t, c, g, other or unknown
  misc_feature (505)..(505): "n" may be a, t, c, g, other or unknown
  misc_feature (507)..(507): "n" may be a, t, c, g, other or unknown
  misc_feature (527)..(527): "n" may be a, t, c, g, other or unknown
  misc_feature (547)..(547): "n" may be a, t, c, g, other or unknown
  misc_feature (556)..(556): "n" may be a, t, c, g, other or unknown
aaggaatcaaaaacttttattcagaataagcgttagcaaaatgaaggtaggtgcctcataaatgcagggccccagagtactcagaaagggattagaaaataattacaaaaatattttgccacatattaacatgaaactacaatcactggctgtaaaatatagtcaaatgcaatcaagctgaaaagaaaaggtggaaatctccaggttatctgcccaggtggcaggaaatcgacagccccgagaacgcaagtgctgctgtgccgccaggcccagggctatgatccaaagtgacgggcagactaccggcctgcaccaccccactcaggctgcacacaagacagccagcttaggatctccgtgggctgctacctatgtcacagagggctgattaagggcttgcagtgttcccaaatagggcctccaatgagangagtggaaactgcattacaagaaattcactggggctggacttgactcttcacttggcgagtctnatgangcactngnccttcaatggcttctggcanttaatgcttccgggcattangggcctttn

SEQ ID NO: 10420 - DNA, 525 bp, Homo sapiens; identical to SEQ ID NO: 8679
  misc_feature (1)..(525): "n" may be a, t, c, g, other or unknown

SEQ ID NO: 10421 - DNA, 535 bp, Homo sapiens
  misc_feature (47)..(47): "n" may be a, t, c, g, other or unknown
  misc_feature (89)..(89): "n" may be a, t, c, g, other or unknown
  misc_feature (211)..(211): "n" may be a, t, c, g, other or unknown
  misc_feature (221)..(221): "n" may be a, t, c, g, other or unknown
  misc_feature (245)..(245): "n" may be a, t, c, g, other or unknown
  misc_feature (251)..(251): "n" may be a, t, c, g, other or unknown
  misc_feature (339)..(339): "n" may be a, t, c, g, other or unknown
  misc_feature (434)..(434): "n" may be a, t, c, g, other or unknown
  misc_feature (445)..(445): "n" may be a, t, c, g, other or unknown
  misc_feature (463)..(463): "n" may be a, t, c, g, other or unknown
  misc_feature (466)..(466): "n" may be a, t, c, g, other or unknown
aaccattactgggactttattataatagttaacaatattttaggggnatacaatcatatcacaattactcaagctatatacaaacaggnatttatataagtctacatttaaaaaagaaaaagcaattaatgacctccccaaaatcacattatcatcaacaagatttttttctaaaagttacggccaatccaataacaaaaaaattcacagntattctgcanacattttaaagatgcaggaattgnattgcncattatataattataaaccataacaagcagttatatattttaatctagtttttcacaaaatttacattatcatgcaatacttcactgncacagaatgatggaactagaacaggttaacttacaaacttttaattatagccccaaatttagaattattttaaaggtatatttcaaattattatnctaaaaaaacnctccaggggaataaaacnggncccatcataatttggtcccaggacaaaataccttttttagggggctctttggcttggccttcttttcct

SEQ ID NO: 10422 - DNA, 548 bp, Homo sapiens
  misc_feature (450)..(450): "n" may be a, t, c, g, other or unknown
  misc_feature (507)..(507): "n" may be a, t, c, g, other or unknown
  misc_feature (514)..(514): "n" may be a, t, c, g, other or unknown
  misc_feature (538)..(538): "n" may be a, t, c, g, other or unknown
atgtacttggcctctctcctgacgcctcacaccattaagcatggagaaaagggaaaaagggcaaaggaagtcaaaaaaactgaactaggattcgggcaacagcctcaggctgcccaacagaacaggcttttagggaactggacacacagaccagctgtgaccctgactttcacattgatgggtgaatggcaagtaggaggtaatgaaatctggaaatgacaggggagagaaggcaaagctgcctggagtgtcagtcccggaggcatttgcccctctcccccgggggccagccagggacttcccagttcaggaaggccacaacacttgtggcacattaattccgagcttggcccggcttctttcctgtgccctctgcctctgtgggcaggggaaggaggaagggtgtggtcccttaggatctccaagtgctcttccagcttccaggagcanggctgagatcccagagtcagtgccatgaactgtgcatttcactgagggaaaagggangtgtggnttttggactttgcatttcacacanaacccctttg

SEQ ID NO: 10423 - DNA, 548 bp, Homo sapiens
  misc_feature (426)..(426): "n" may be a, t, c, g, other or unknown
  misc_feature (515)..(515): "n" may be a, t, c, g, other or unknown
  misc_feature (518)..(518): "n" may be a, t, c, g, other or unknown
  misc_feature (535)..(535): "n" may be a, t, c, g, other or unknown
ccccccggtataaaagtttacacgatgagtttcatatttcatcacagttatatggtctagtgcatttcagagtatttggacattatcaaagctgtcctttcccaatgaaaacatttaagaaaacgttaagcacttctcaagtaacatgatgtggaattacactttttgctcttacctcttttaggtacacacgtattattcaacaaagcaaaactattttacagtgtctgttaacaaaaagttctctattagatagaagaaactacagtatcctgaagctatttccccaagagctagtttagtagatagacctttgggcccatcttatttttccttcttttttttttttcagtaaggtaactttccattatgcacatactataccatcatcattcattgggtggagattagctgggaagtagctgnatatttttaggggagacactgatggcatggactctggatcgtgctgtgcttatgggtaaacatatctaatgggaaattcgaattacatncanagcttccggatcaaagnccgacattttcaa

SEQ ID NO: 10424 - DNA, 548 bp, Homo sapiens
  misc_feature (527)..(527): "n" may be a, t, c, g, other or unknown
  misc_feature (548)..(548): "n" may be a, t, c, g, other or unknown
acacaataaatatttttatttttaaacactgaattgtacatctttcatataaaacatgagattctagcctgttttaaaaaataagtatacttgctagtactatcttcactctttttttttttcagaagccaatgttctctaaatctgcagcttcattccacagctttacagaatcataatctcttgaatatatttccaatgttattaaaaaataaaaaatcatacaagatatatttagcacattaaaacttaagaggttacagtataactgtccagacctccaggtaccactgaatacttttccagtacaaagaggccaatatgttagaataattaattctctgtatttacttttattaaaaagaggtttttggtagtaagaacaaataatctctcatttgttgcctgaaatcctaaaataggatcattggtttctaggcttgctacttgctgcttagcaacctgtcctacttgcctggccttccttctgtggaaagtacagtggacatgggagcaggctgacgatngatgaatactcgacgaaaggn

SEQ ID NO: 10425 - DNA, 557 bp, Homo sapiens; identical to SEQ ID NO: 6455
  misc_feature (1)..(557): "n" may be a, t, c, g, other or unknown

SEQ ID NO: 10426 - DNA, 562 bp, Homo sapiens
  misc_feature (490)..(490): "n" may be a, t, c, g, other or unknown
  misc_feature (492)..(492): "n" may be a, t, c, g, other or unknown
  misc_feature (532)..(532): "n" may be a, t, c, g, other or unknown
  misc_feature (553)..(553): "n" may be a, t, c, g, other or unknown
  misc_feature (557)..(557): "n" may be a, t, c, g, other or unknown
  misc_feature (562)..(562): "n" may be a, t, c, g, other or unknown
acaataaacaaaaagatttgtattagaacatatacactcagggaagaaagaggtatcatcatcaaatgtggaatgttgaagaaatagttaaaatatataaagactccaagcacagctgggactggctcaggctggggctcacagaggccactgcacatcagctccaggctgcaggagccaccacctggccatactggcttcctccctgacgcagcacagctgtgcctgggacacagagtcgctctcaagtactggagcagctagcaagctcactccccactctcctcacttatctctgtgacaatgtctatcaggctctggagcccgaagatatagccagcatcctggccctcatgcaccacggtgtcctcgccatacagcctgcaggtggtgtgtgcaaagtcgatcatgcgcacatctacagagctggcgcccgatgggtttgtaggcataggcaccagcagactcatcagctggattcctctgacangnccttccaatccttaacattctgagtccaggaaccactttngggccggtccttggcattatnaaangaccn

SEQ ID NO: 10427 - DNA, 554 bp, Homo sapiens
  misc_feature (494)..(494): "n" may be a, t, c, g, other or unknown
  misc_feature (507)..(507): "n" may be a, t, c, g, other or unknown
  misc_feature (527)..(527): "n" may be a, t, c, g, other or unknown
  misc_feature (542)..(542): "n" may be a, t, c, g, other or unknown
  misc_feature (554)..(554): "n" may be a, t, c, g, other or unknown
ggagacaaggtctcaccatgtcacccagtttggagcgcagtggtacaatctcagctcactgcaacctccgcctccgaggctcaagcgatcctcccacctcagtctcctgagtagctgggaccacaggtgtgtgccaccatgcctggctaatttttgtattcttgggagagacagggttttgccatgttgtccaggctggtcttgaactcctgagctcaagcgatctgcctgcctcagccccccaaagtgctgggattacaggtgcgagccattgcacctggcctaacaacttgtatatctaagaatagcctgaaaataatgtcagcatgggctgtacttccccaattttaggaaaggaaagaggaactaaaattctatttcagatatgagcctctgaatttcaaaaaaaaattgggagaaaatagacaacaacaagacaaaaaataatacactttgacctttgggcttggtgtagctttcctggaaataagggngctttctctttgnaatcagatgacaatgggaanagctgactggggttnggaactggttan

SEQ ID NO: 10428 - DNA, 556 bp, Homo sapiens
  misc_feature (454)..(454): "n" may be a, t, c, g, other or unknown
  misc_feature (469)..(469): "n" may be a, t, c, g, other or unknown
cctgtgcctcaagacacctgtttattggggacacgactctgcaatagggatgacaggaatcgtaccaaaaatagcgacgtctacagggcccctgatggggctagaagggtacagtgccccccaccctcaccccttgtacaaaaataaactctcacgcctatggaccagcaaagactggcagagtggctcctcaacagggacacaaaccttctctgccagcccagggaccccgttctttgaccctcacctctgccacttctaaggcactgtgactcccttgggctgggtgggtaccgccagcccaccctcctacgcccgccgcgccttccacctctggtccgcctggggctgggatatgggtcccacgctgccccctgctggcttctctacccaactacctctagcgctcccccgctccggcggggtaaagctcactaagctaatcgcccctganggcccactaccgttntggccccccagcctggcttttccgggtctggacaagcccggaagccttcttcccttctgcaaagactggaaggggctttctgaaggg

SEQ ID NO: 10429 - DNA, 562 bp, Homo sapiens
  misc_feature (423)..(423): "n" may be a, t, c, g, other or unknown
  misc_feature (491)..(491): "n" may be a, t, c, g, other or unknown
  misc_feature (544)..(544): "n" may be a, t, c, g, other or unknown
  misc_feature (556)..(556): "n" may be a, t, c, g, other or unknown
ggctttgaataatttttactcattatatcatttatcatagcataacagcgtacattccaaaaaggaaggcccaacataaactgagaaattgaatagatacatccataatccctttctattctaatccatacacaaatattttatcataatggttttagaagtgaatattatttctatattcttttcccacacttttcactatatatcatagacactttcctaaaattcataaaatcttcacatgtaacaacagcaagtgctgtaaggaacagattacaagctatctaattggaagatcatgtagtaaaatgatgcactaaaatatggttttccagcctaagttctaaacactacagcaacctttaaattttctcaataagcccactagtggtagcattccatttactctttatggaaaaagangtctaacactggcagttggcttttggcatatgaatttctctgaatcaaggctgaagtgctttttgcanggaaaagggcccgatttaataatttcatagggaaatgggcttaagaatcaggnttaccatgggtntgggat

SEQ ID NO: 10430 - DNA, 559 bp, Homo sapiens
  misc_feature (454)..(454): "n" may be a, t, c, g, other or unknown
  misc_feature (513)..(513): "n" may be a, t, c, g, other or unknown
  misc_feature (521)..(521): "n" may be a, t, c, g, other or unknown
  misc_feature (542)..(542): "n" may be a, t, c, g, other or unknown
  misc_feature (549)..(549): "n" may be a, t, c, g, other or unknown
  misc_feature (552)..(552): "n" may be a, t, c, g, other or unknown
cactttcccaccttttattattcaacacatggaagggggtggagacacaaggatagggcaatggtgagtttcaataaataagagaaacaggatggacaggcagtgggcccatgcctgcacggccccacataaataaccaggttgctgagccagagtggaagtcagggctgggcctggcagccgcctgcactgcccagaagcactggcaccacagggacacagaaaccactgaggcccaaggtgtgctccagccccaccaagtcttctccctaaagctcctgagatcttggggctggctgggcaggctagggctctgtatcacagtcctgctgggatcaagtctattttttcagtttcattaaaaacagctgggggaggggcaggcacatgcattaagccccttccgtaggcagagccatggatggacaagccccatgggggcctttgaaggcanaagccctggaagcacaaaaacggggcttggataaagcttctaatgggaagggatggtanagcccaanttcccaatccccaaaaccaanccagaanctncaaagag

SEQ ID NO: 10431 - DNA, 533 bp, Homo sapiens
  misc_feature (444)..(444): "n" may be a, t, c, g, other or unknown
  misc_feature (474)..(474): "n" may be a, t, c, g, other or unknown
  misc_feature (476)..(476): "n" may be a, t, c, g, other or unknown
  misc_feature (488)..(488): "n" may be a, t, c, g, other or unknown
  misc_feature (504)..(504): "n" may be a, t, c, g, other or unknown
  misc_feature (513)..(513): "n" may be a, t, c, g, other or unknown
  misc_feature (523)..(523): "n" may be a, t, c, g, other or unknown
ctaatttatacattttaattggttgcatatattaacatgtactataagattcttttctaagaagcattacataataaatggatactgtaaaaagatctgattagttaaaagtaacaagcattaacagatagatacatacaaaactcagcctgatcagactgggtgtgagcctgtaatggggcatggggcaccagccttcccaaggggtagcctcaaggagggaggggaaagggggggtaaaaagaccacaagaccaataaaaaaaatcagataattagacacagattaactgtaaacagttctctctctctccagtgaacaaaaagaataagcttccaatgccaactccatatcagaatgacttccaccgctggcttgtcctgctgccatactcgcgggctcatgtgggtggcaggcagaccccaaggagccatcacgggcaanggctggagttggattacgtcagatctgggngngtggtgtgtgtnaaaaaatatgtggggngaactgggnttgaaggggntttcttttgg

SEQ ID NO: 10432 - DNA, 556 bp, Homo sapiens
  misc_feature (555)..(556): "n" may be a, t, c, g, other or unknown
gaagagcaaatatttttatctttgaaagcaaaagccttagtaacaaaaaagatccacaatttttaagcttgaaaaagcctttcaaaagatctaatacagaatttccaaaaaccagtacgacttgcaagacattctgtggaaaaaagttttgtgaccaaacagatttgggaactgtcacaggtaatgctattctccttccagatttccacagcaccgggcatattagaagctctgagaagttttgccataaagatacactctaaccatgtgtttcctttaaaggaggaaactagaaaggaggtgacacattgaggtcacacagagtaccacatctgtcaaaggaaagatcaacaggcaatgtcaaattttaaggagaatgtgactcaaggaagttcttgaaggacaatatatataaaaatgtaattattcaaccgtaagcagaattatgttcagtaagccccttaccaatgctactacaaaatggaatgaactattatcttaataattctttaaaccccgttttttaaatggtaaccccaaggggccaaaacctgnn

SEQ ID NO: 10433 - DNA, 562 bp, Homo sapiens
  misc_feature (474)..(474): "n" may be a, t, c, g, other or unknown
  misc_feature (532)..(532): "n" may be a, t, c, g, other or unknown
  misc_feature (560)..(560): "n" may be a, t, c, g, other or unknown
aaaacattaagcctctgtcaaaaatgtatttcttattttagggtacaggattaaaggataagatgatactcacaagtaaagaaaatttacaagaaaaaacttaacaaaagtttcaataaaagtattgcaacattcaaacttgacttataacaaaagaaacaagattgcaaacaaaaatgtttacggggtttccaaacataaataaatgaaatagtgtttaggcagtagggctcatgctgatggctagcaggaagttaacagagtgtaacttacctggaaaaaatctttaatgtacaaataacaagcccaaattatggactgcagcaatttaatcatcactgccatttttcttacttccaaaataaagccttgattaaaccattcataccctatattactcatacctttacttcagagattgaggaactatatacaacaaattaatttattttcaccatagggataacatactgnacctctctgccaatggtacttgaaaatcttccatgtcaaaacaacttgacagtagatntaaccattcaataaatatgccatggacntt

SEQ ID NO: 10434 - DNA, 560 bp, Homo sapiens
  misc_feature (361)..(361): "n" may be a, t, c, g, other or unknown
  misc_feature (390)..(390): "n" may be a, t, c, g, other or unknown
  misc_feature (434)..(434): "n" may be a, t, c, g, other or unknown
  misc_feature (459)..(459): "n" may be a, t, c, g, other or unknown
  misc_feature (472)..(472): "n" may be a, t, c, g, other or unknown
  misc_feature (483)..(483): "n" may be a, t, c, g, other or unknown
  misc_feature (511)..(511): "n" may be a, t, c, g, other or unknown
  misc_feature (536)..(536): "n" may be a, t, c, g, other or unknown
  misc_feature (553)..(553): "n" may be a, t, c, g, other or unknown
  misc_feature (558)..(558): "n" may be a, t, c, g, other or unknown
gaagaacaggagataacagtttattaatatggcatagagggaggtggtggtggcagtttttgatggagacctgttaaaatgctgataggagagagacggtggaaaggagagtagcatagttgtttgaaagcatgaatctgcagtctggttgcctgggttttgaatcctagctctataattgctaggttatcctgaggaagtcacttgccctcatagggttgtgaggattgttagatcaaattatcaagaatacttaaaatatgactggtgaggtggtgaggtcaaactctagccctgcctgagcatgcatatactatactgctcccacctgcccttggactgccttccatatctaaaatgnattcattcttcagattccagctggcttgnctcactgcccctcaggaacccctgctttcaacaactaatcaagnggatagactttatggtcctctcttntagcaatgaccancttccctgctntgaggcatacaagcctttcctttttaancctccggacataccccccaatttgncccttccaccttcctanaatangc

SEQ ID NO: 10435 - DNA, 561 bp, Homo sapiens
  misc_feature (495)..(495): "n" may be a, t, c, g, other or unknown
  misc_feature (499)..(499): "n" may be a, t, c, g, other or unknown
  misc_feature (528)..(528): "n" may be a, t, c, g, other or unknown
  misc_feature (545)..(545): "n" may be a, t, c, g, other or unknown
  misc_feature (551)..(551): "n" may be a, t, c, g, other or unknown
  misc_feature (555)..(556): "n" may be a, t, c, g, other or unknown
gtggagaaaaaaaactttattggtattacagcaaaaaattcacataagatacataaattatgatacctcaaagctagaggcaaataaaatacacctaattatacaaattctatacaattaaatcaagaacattaggaaaatttttttgcaaaaatgtcaaaaaaaaagatttgatctggtcgggtatagtggctcacacctgtaatcccagcactttgggaggccaaggcgggtggatcacctgaggtcaggagttcaagactagtctagccaacttggtgaaaccccatctctaccaaaaatacaaaaattagccaggtatggtggtgtgtgcctgtaatcccagctactagggaggctgagccacgagaatcgcttgaacctgtgaggtggaggttgcagtgagcccgagatcgcaccactgcagcccagcctgggcgacagagtaagactcatctcaagagaaaaaaaaaaaggatttgatccaacccaganttcngaaaaaccaaacccaaaaccctgggactnggtacattattaaattngggacnccgnnaaaac

SEQ ID NO: 10436 - DNA, 574 bp, Homo sapiens
  misc_feature (418)..(418): "n" may be a, t, c, g, other or unknown
  misc_feature (422)..(422): "n" may be a, t, c, g, other or unknown
  misc_feature (462)..(462): "n" may be a, t, c, g, other or unknown
  misc_feature (473)..(473): "n" may be a, t, c, g, other or unknown
  misc_feature (515)..(515): "n" may be a, t, c, g, other or unknown
  misc_feature (523)..(523): "n" may be a, t, c, g, other or unknown
  misc_feature (526)..(526): "n" may be a, t, c, g, other or unknown
  misc_feature (563)..(563): "n" may be a, t, c, g, other or unknown
  misc_feature (573)..(574): "n" may be a, t, c, g, other or unknown
gattttgaggctcagttaatatttcaaaattgtaaccgtagcaaaactgcattggtatttagaaaaataaaaaatttccaatatgtagtgctgtgttatacctgcctctgccatgcagcatcatagcctgtgggaaccaggagggcttcccttaccacccagagcagaggaggaaggtgatggaatatggggtgaggggaggaacctggtggcccctccctgagatggccagaaagcccttggcctcacctgggactgaccaggcagccctagtctaggcacaaggtgccctttcacccttcatggctgtgggaatatttcctcttactctttttctcccatacagctactgccaaaatgcccaaacttgggccaaatgttgcccaaacttgggccaaaaatgttgcccaagagaccnaaancagaggaaaacaggttccaaatctatggagatcatgagcngaaatcttgangctttgaataaagggcttaaaagggcaggaactctttggggnggccaaancanacgcccattcccaagggctttcattggaatggggggnaaggcttgtnn

SEQ ID NO: 10437 - DNA, 562 bp, Homo sapiens
  misc_feature (471)..(471): "n" may be a, t, c, g, other or unknown
  misc_feature (483)..(483): "n" may be a, t, c, g, other or unknown
  misc_feature (485)..(485): "n" may be a, t, c, g, other or unknown
  misc_feature (510)..(510): "n" may be a, t, c, g, other or unknown
  misc_feature (526)..(526): "n" may be a, t, c, g, other or unknown
  misc_feature (547)..(547): "n" may be a, t, c, g, other or unknown
  misc_feature (550)..(550): "n" may be a, t, c, g, other or unknown
gaggtattttagtaacctactttttatttttacttttacaaaagctttgggttggtgaaaaattaagtaatctaggcatgatttatgggatgcaggaggatgtggataggttacatgcaaatgtccttttataaaaggaacacagcatctgtggatttaggtatgcttagggggtctggaaccaatcccctgcatatggttaggggataaccatattcaaaagaaacatcttaaggctttaccatgtgtttgcattcatgaggcttatctcctatgtgatttctttcacgtttctgaaatgaaataaaattaatgaatgcttttccacatttatagagtatctctccagtgagtccttttatgtctatgcaaggaactgagagaactcagtgccttcccacattccttacattcatgcatcttctcttcagtggtgagtttttcatgtcctcgaaggaaaccgagaaccantggaagctttancncattggtgacattcataagaattcntttccagggggaatcnttcatggtcccaaaaggcaanggncccaaaaaaagc

SEQ ID NO: 10438 - DNA, 552 bp, Homo sapiens
  misc_feature (498)..(498): "n" may be a, t, c, g, other or unknown
cagtttgtgcgtgtcacttgaatcagaaaccaaacacatgtaaaaaaatatcatcctcaatgccccccattaactctctctccagaaggtgacaatgttagtgaactcaagactctcactgatgatggtattttacaatgaaaacacaaggaaaccctttgaggtccaattttcacatcatattctccaaatagtaaaatagcagctctacatgttgatgaaaagaaatttcaatttcttcctatttgtttttactcatatcaacattaatatgtatctggatttattaatttccaaaaagaaaattttagttaccaaatatttcagaaatttaataaagcattacatatatgtaattagcacttatctaccaaaaaaacatatgtgtatgtatttatttatcttaccttcactgaagttcttttttctggctggacatgagaaacaggattaagtgatcaatgctggctttatttcttcataagcagtaatttgggnctttttcattcaacacacgcagcatttcataataaattcccaaaggccattcct

SEQ ID NO: 10439 - DNA, 538 bp, Homo sapiens
  misc_feature (461)..(461): "n" may be a, t, c, g, other or unknown
  misc_feature (475)..(475): "n" may be a, t, c, g, other or unknown
  misc_feature (491)..(491): "n" may be a, t, c, g, other or unknown
  misc_feature (518)..(518): "n" may be a, t, c, g, other or unknown
  misc_feature (521)..(521): "n" may be a, t, c, g, other or unknown
  misc_feature (532)..(532): "n" may be a, t, c, g, other or unknown
  misc_feature (536)..(536): "n" may be a, t, c, g, other or unknown
aaaaaaatggtattttattataacttttaaaattgcggaacatcagactgaatatcatcagacacatacacaaaaccactcatctctaaagtcattttctataccctctcaaaatttggccagtgagttttgcctcagggaattttccagttcaaccccatacaccaacatggaataaatggaaacactagccttttggttttgcccacagttccaaagtgctattacaggcggaatatctgctgcaggaggtcattcttgctgctgtgggtgtgagtaaaatgcttagttccttctaaaatcataattgcaatatggacttctgcttcacgctgcatcctaaggcacaaatcaggtaacctacatctcccaaatgatcaacagagcactccatcctattttaccctcaatgctgagaaattactcctgggcccagaagttgtcacataggtggcttgggntacttggtgctcangcacaactgggcacanggcccaacttggtgacacatcaattcnttnaatatgtgatnctanaa

SEQ ID NO: 10440 - DNA, 523 bp, Homo sapiens
  misc_feature (441)..(441): "n" may be a, t, c, g, other or unknown
  misc_feature (450)..(450): "n" may be a, t, c, g, other or unknown
  misc_feature (475)..(475): "n" may be a, t, c, g, other or unknown
  misc_feature (494)..(494): "n" may be a, t, c, g, other or unknown
  misc_feature (505)..(505): "n" may be a, t, c, g, other or unknown
  misc_feature (515)..(515): "n" may be a, t, c, g, other or unknown
  misc_feature (520)..(520): "n" may be a, t, c, g, other or unknown
ataaaaacagacaatcaagcgtgacatttaatggagttagttattattgcttctatttagtatcatcacagattactcatcgctgccatgaagtccataaaatgtgtgactacctgattcctgggcatctaggacagggtcttttaacctgtcaagtcagtttcattatggccaattttctagcagtggttggggatggggagaggagagctttgatttttttgtgtgtagaagaactttccataagcctgtttggctcatggacatattttacaatgtaacctccctcagtcactcagaggggatcaagaagggccccctaaaaccaggaggacagatctagttgggcagcaaaatctggctatttctagaaatgctccctcttcctgcaactgagcagttgtcccctacaagccactaaagcccccaatctttacctgngaacccatnttctgactctggggaatgcctgcanaagcctggtaggggacaanccgtcaaaagntgatgaaccntgctnggg

SEQ ID NO: 10441 - DNA, 553 bp, Homo sapiens
  misc_feature (460)..(460): "n" may be a, t, c, g, other or unknown
  misc_feature (469)..(469): "n" may be a, t, c, g, other or unknown
  misc_feature (500)..(500): "n" may be a, t, c, g, other or unknown
  misc_feature (537)..(538): "n" may be a, t, c, g, other or unknown
  misc_feature (541)..(541): "n" may be a, t, c, g, other or unknown
  misc_feature (545)..(545): "n" may be a, t, c, g, other or unknown
aaaagaatgagttacatttattgatatggtttgtcatatgctttataaatggtcaccctttgaaacatgtattattactatttgggggagagggggactgttcattttacaggggacaagcaagacaggctcaaggagggaaaggacaggctcaaagtcatcacagtgtggggctggaatgcagttgcccttccttctttctttttgcacatcttccgtctctagggtgaggaggggtgtaggcacaggcacccaagacagccgcggtccagccccggccccacctgtggtctcagtgacgccccagaggccccatcttccccacataatgaggctgctccatcctcctcaaagcccagacctatttcataagccccagaccccaccttcacccagggccccaagagaacagagctggagacacttctactcctagcactggatgccttctcccttctgngaactgtangtgggggggtggaaggcacccctttaagcangctcggggggctttgaactccaagactctggaaaccnntanaaantgggaagg

SEQ ID NO: 10442 - DNA, 563 bp, Homo sapiens
  misc_feature (1)..(563): "n" may be a, t, c, g, other or unknown
nnnnnnnnnnnnnnnnnnnnnnnnnnnnnnnnnnnnnnnnnnnnnnnnnnnnnnnnnnnnnnnnnnnnnnnnnnnnnnnnnnnnnnnnnnnnnnnnnnnnnnnnnnnnnnnnnnnnnnnnnnnnnnnnnnnnnnnnnnnnnnnnnnnnnnnnnnnnnnnnnnnnnnnnnnnnnnnnnnnnnnnnnnnnnnnnnnnnnnnnnnnnnnnnnnnnnnnnnnnnnnnnnnnnnnnnnnnnnnnnnnnnnnnnnnnnnnnnnnnnnnnnnnnnnnnnnnnnnnnnnnnnnnnnnnnnnnnnnnnnnnnnnnnnnnnnnnnnnnnnnnnnnnnnnnnnnnnnnnnnnnnnnnnnnnnnnnnnnnnnnnnnnnnnnnnnnnnnnnnnnnnnnnnnnnnnnnnnnnnnnnnnnnnnnnnnnnnnnnnnnnnnnnnnnnnnnnnnnnnnnnnnnnnnnnnnnnnnnnnnnnnnnnnnnnnnnnnnnnnnnnnnnnnnnnnnnnnnnnnnnnnnnnnnnnnnnnnnnnnnnnnnnnnnnnnnnnnnnnnnnnnnnnnnnnnnnnnnnnnnnnn

SEQ ID NO: 10443 - DNA, 549 bp, Homo sapiens
  misc_feature (526)..(526): "n" may be a, t, c, g, other or unknown
attaaacaaatatttattaaccggcccataaaaataatgaagttactcacactgagtcctagtccattctgtttttctgatttgcataagcaaaggtctaagttctggagccaacccttcagaggtcttgagaatgaatgatgggtaagtttatttggacaaccagaaggacttttcatcacaactgaagccattttataatgtagaaatttctttttcctattttaagtaaggaaagtccattcttgagaatatgttgtccaacaattaaaacactctcaggatttgttacttgttggtgatttatgctgactccgccttctgttatcattcgataccctcggggaccatctggaatggcatttgctttgcggcaagtatctaggacacttgttccaggatcgagaaaaaattcagaaaatggagcttctttaaacaactcttttaactcctgacagactgaacctccggggctttaatctctggggataaaggcttggggaccccctttagcagaatccaatcnttttggccatgaccagcttggtc

SEQ ID NO: 10444 - DNA, 537 bp, Homo sapiens
  misc_feature (99)..(99): "n" may be a, t, c, g, other or unknown
  misc_feature (118)..(118): "n" may be a, t, c, g, other or unknown
  misc_feature (158)..(158): "n" may be a, t, c, g, other or unknown
  misc_feature (235)..(235): "n" may be a, t, c, g, other or unknown
  misc_feature (316)..(316): "n" may be a, t, c, g, other or unknown
  misc_feature (483)..(483): "n" may be a, t, c, g, other or unknown
  misc_feature (512)..(512): "n" may be a, t, c, g, other or unknown
gtacatcagcatctttacaatattaaaggagccatatacaagtctacagccattgtacacaggatggtgatggctggggagccccgcccaccagtcctntgcagtttctccaccgganaacacttggggagctgtcacaaggccagggggggtccatntttgggcctgtcgtggggcaggcagcaggtctgcaaggactcctcagggccagtcctcactggaatcaggggtcaanagcgccaggtctgcctgtgtctgggtctcatcggcaggctagtgtaacaacgtgaattaaaactgggcatattcgcatganaaaactggagctggggatggctccctgagctggggacctagaagacgctgctgacagatgggccccttcatggtggggcccattcctgaggtaacgtgcaaccctgaggctggtcccaacggaaggagacttttccagcagccccaggggccagtcccacacagacnggaattggaagcccttggcaacaagtcangggacccgggaaggcaaccctgacc

SEQ ID NO: 10445 - DNA, 518 bp, Homo sapiens
  misc_feature (421)..(421): "n" may be a, t, c, g, other or unknown
  misc_feature (429)..(429): "n" may be a, t, c, g, other or unknown
  misc_feature (431)..(431): "n" may be a, t, c, g, other or unknown
  misc_feature (438)..(438): "n" may be a, t, c, g, other or unknown
  misc_feature (461)..(461): "n" may be a, t, c, g, other or unknown
  misc_feature (471)..(471): "n" may be a, t, c, g, other or unknown
  misc_feature (499)..(499): "n" may be a, t, c, g, other or unknown
ccggcaagaaatcatgtttattcacattccccaccccaccacctgagagtcactttcactccaagccctgggcctgacaggagggggccaaagaggggggctgcctaaggcagggcccagaccccacagtgtgggcctctggagctgtgtctttactcttgctgccgatcaatcccatgctctgaaatgcgcacactctggctccttagtagatgccataggtgggctcatgactgtccctgtaccggtccaggtagcgcaggggctgccggtgggggaagcgcttctgcttggggtggtaagggggcggccgcacgaactcaaacaccggctcccgcatgtccagaagctggtggaagatgtaggtgacggagtcatcccagcggcactggaagaaggacaagccggctggagtcatggnttcttggngnttcttgnaaaaatcaaaagtgccgaaaggnccctgggccnacttgatacaaggtgaagggccgtcgtncttaaaagaatcaatcggt

SEQ ID NO: 10446 - DNA, 569 bp, Homo sapiens
  misc_feature (552)..(552): "n" may be a, t, c, g, other or unknown
  misc_feature (555)..(555): "n" may be a, t, c, g, other or unknown
  misc_feature (566)..(566): "n" may be a, t, c, g, other or unknown
  misc_feature (569)..(569): "n" may be a, t, c, g, other or unknown
agcacaattccagttttaatgttcaaatcaacagcaaaaattatgatggatagcaattcattctcactaaaacacagctaatacatgttccttaaatcatgaaggtaaagtggaaaaactaaatagtttgatgaccttagagaaatcatttattctctcttatactcagttaaatgggagcctggttatcacaatagagatgagtaataatgaaggtaaaatgcctggtaaaatgcatcacagtaggcacccatcttattatacacatgtcaataaaaataagcatctattttttaagggaagaaaagaaatgcttcttaataaagctctggatgaaccatttatcttctttcaaaaaatgtaaaaacacataaaaaagcattatctgacaaagaaaagtagaaaagatttttatctttaattagagtttgtagtatacacttaactttctgtaatctgcagtgatgaatctctatgtaaacattcagaaaaagagcgaatactgggtcatgacttatgaactataaattttggcctggatactaggccagnacnggtttataccnttn

SEQ ID NO: 10447 - DNA, 557 bp, Homo sapiens
  misc_feature (408)..(408): "n" may be a, t, c, g, other or unknown
  misc_feature (410)..(410): "n" may be a, t, c, g, other or unknown
  misc_feature (449)..(449): "n" may be a, t, c, g, other or unknown
  misc_feature (476)..(476): "n" may be a, t, c, g, other or unknown
  misc_feature (506)..(506): "n" may be a, t, c, g, other or unknown
  misc_feature (551)..(551): "n" may be a, t, c, g, other or unknown
aagttactgtaggacttcaaagaacttttaatttgctcacgcatactccaaagattttataaaaaaagtatttcttaaacttagttataaaaagaaggattccataggcacgaggaccccagtgaacaagttttgggaagtgctgctccacggtgggcccataagagtcttgtaaagatagaaaagtaggccccaaaaacaaactctttcccaccagccatcagttactatcttcaaaactgcagtgtgggctcaatgttgtcattctgtactctcctgtcttcagcagggtttatggtatttttccacttgctggtcaaatctcctggaagaataccctgcctggaaaaagttcactggagtcagaagatatttgagtgctagacccctgaattcagtagctagaanangggtgcccttgctgctgtgggacaggggagaaccatggnccatccaggcactctgattcctggggnttctggcctcatcatcatcttccatgggtnccaagggggaccctaaaccaatttcctcccgggtttttgagaaanaaaccc

SEQ ID NO: 10448 - DNA, 561 bp, Homo sapiens
  misc_feature (531)..(531): "n" may be a, t, c, g, other or unknown
  misc_feature (560)..(560): "n" may be a, t, c, g, other or unknown
cagggccaaaacgttttactttccatttgaatttacaaccatatacagacaatatggtaagattttagagaaaacagatcatcactacgaatatccatattctgatttcttttgagaaccaaggtgccttttaaaatgcggctttttagaatagcatgtgttgtttctgtctgggatctagatcttgtctgctacaaaacaaatgaacacaccctgtgtaacaaaatcgaattttaacatttaaatcttgattccaatattcctgacctatctcttgtcatatgaaagaaagaagcctttttttaaaacaaagtttcaattcagaatttttacaaacaaaaacaatcctgcgtctacttaatatccctgtatatcctcaaaaagcaagttcaggaaatttaaaaatgatttataaaaggcactgaagttagcaaaagcattggtgggttttcattttggattaaacactggaaatgttcacagagaaacaactgtgtgagccagttgcccgtaacacccaggaagaaccgncttcaggcagcacctctggacacttagcng

SEQ ID NO: 10449 - DNA, 519 bp, Homo sapiens
  misc_feature (413)..(413): "n" may be a, t, c, g, other or unknown
  misc_feature (444)..(444): "n" may be a, t, c, g, other or unknown
  misc_feature (464)..(464): "n" may be a, t, c, g, other or unknown
  misc_feature (467)..(467): "n" may be a, t, c, g, other or unknown
  misc_feature (484)..(484): "n" may be a, t, c, g, other or unknown
  misc_feature (496)..(496): "n" may be a, t, c, g, other or unknown
  misc_feature (513)..(514): "n" may be a, t, c, g, other or unknown
gctcttagaatagactttattgactttagccaagggcaggccctgagatgggggtccagagagagaggcttggtggggctacgtcctgggggccaggttggttctgaggggtagaaggccatccacccattcgcacggctgctccaggagggcttgccacagctgcttctcctcaggtgtggaatccatccagggcacctgcagcccatagctgctgccggtgcccaggctgaggcgtgtgccccccagctggcggttggccagggccccatggtcccagagggagagctcggcacaagcctggcgcaggtcagcaggcccaaagccatcgtacaccatggtgtgattgaacacagggctgaggctgcgtcgcacaacccttgtacgctggcggctggcctggctgtcatcangcagcacgaagcattgtacctaagtgtccanggatcctgccgcaacggcangangtcccgaacctctttanccaaaatgcagnttcccgtttggggcaanncttgg

SEQ ID NO: 10450 - DNA, 453 bp, Homo sapiens
  misc_feature (118)..(118): "n" may be a, t, c, g, other or unknown
  misc_feature (223)..(223): "n" may be a, t, c, g, other or unknown
  misc_feature (367)..(367): "n" may be a, t, c, g, other or unknown
  misc_feature (417)..(417): "n" may be a, t, c, g, other or unknown
  misc_feature (420)..(420): "n" may be a, t, c, g, other or unknown
  misc_feature (427)..(427): "n" may be a, t, c, g, other or unknown
  misc_feature (430)..(430): "n" may be a, t, c, g, other or unknown
  misc_feature (437)..(437): "n" may be a, t, c, g, other or unknown
  misc_feature (444)..(444): "n" may be a, t, c, g, other or unknown
aacagtcaaagtgcattttattgccaacagaacacttcaggaggaaatgctaacacaaagccaaggcgctggtgctggctcatttttgctcctcctgaccttggccagtatttggtangctttccagagcacagggtgaaaggctaaagggctaggactggggtggggggagcaggagggcatggcagctgctggctctgtcctcccagcctggtcccacccntcctgccgttctccttgggctcaagggacacacattcgttcaaatctgacgggcaaagccagggcctagcccactctagccgcagggtcccctccctgagggccctggtccagcacctgggtttctgggctttttctggctganctggagggcctagggccaagcccactctccggagggctggaaaccacccnttnaggtggncantggggcncggccanaacggggga

SEQ ID NO: 10451 - DNA, 560 bp, Homo sapiens
  misc_feature (524)..(524): "n" may be a, t, c, g, other or unknown
  misc_feature (560)..(560): "n" may be a, t, c, g, other or unknown
ataccttttattttcgttctgttgaatctacattatacctcacattctcttcctatattgatagcctttatatacctcttacaaatcaaagctataagactatattaaagaaattatgaaaaactattacaattgttttttcatatgcaagatggcactagcatcttccccagaaagggaaggaagaaaaggtctcattgtactttctcttgaattctcctttaggggagaaaagtagaaccttacagctgccagcaatgcaaatcttcccattcatggaatctgggagaagaatatgttctttataaattcacatgagacaaagatgccaaccagatgcactgattgtagaggtattaattttattcaaggtgacaattaggccttataaacctccctgataatctataaaaatataaacagtggtaggttttatttttaagtgggagaagtcttggctaggtggatggtgagaatcacaatggaaggtaatattaagttacccggaatataagtttggaacnttgaaaggacttttttataggacattttaagaaggn

SEQ ID NO: 10452 - DNA, 557 bp, Homo sapiens
  misc_feature (431)..(431): "n" may be a, t, c, g, other or unknown
  misc_feature (533)..(533): "n" may be a, t, c, g, other or unknown
  misc_feature (535)..(535): "n" may be a, t, c, g, other or unknown
  misc_feature (547)..(547): "n" may be a, t, c, g, other or unknown
  misc_feature (553)..(553): "n" may be a, t, c, g, other or unknown
gagagacaataggaatttttaatgcatggacaggcctgcagggactctgggcagacccacaggtagcaggaagaggcagggtcccacaaactcaataatgtccagcaaaaaagagagagaagtccttaaagacccatgcttcctcactgcaaccatcctcagagcttccttcctggtgctgaagaggtcaaaactgtctcctctaggggtcaggtcaaaactgtccctccataggtctcctccaggggtccatggcaggaagaaagcagagtgtggcaggaagaaggaagaagagcaaaggccgcttggtctccacctgaaaacttctgcctcgggattgacagccatccataagaaaaggtttaaaaaggagagacttttgatagagtcaaataatatgtgtttcgggccattgacaccatcttctcctnacacgtgattttggtggccttgaggatgctataccacaccatgccttgcaggccggaccttcttggttggggcagaaaagataggcactggtttcacccggntntggatgtaggcncttccnagga

SEQ ID NO: 10453 - DNA, 549 bp, Homo sapiens
  misc_feature (117)..(117): "n" may be a, t, c, g, other or unknown
  misc_feature (386)..(386): "n" may be a, t, c, g, other or unknown
  misc_feature (490)..(490): "n" may be a, t, c, g, other or unknown
  misc_feature (547)..(547): "n" may be a, t, c, g, other or unknown
ccagtttttgagagtttattccagcaaaaatctgagaatagtcatccagaaacatgggctccagagaaaaggagtaagtgctccaaagttaaaagttaaagtcccaccaggcatggnggctcaatgttagtttttatccttaaaattgcctgagttcttagaacacagaaaaaacaaatttgaatgcatttctaacagcttaataatttatatgtcccattatgattttagcggaatgttttaaagcaaagcataattcactgcaaagataaacctgaaaaagcaaacaaacttacaaatggtatgttatgacctagacaaaactgattatcaactagtaatactcataattagcacatgcaacagattgagaaattaaatcctgngctatatactcttaagtattttgtcagatatatctttaaatgttctatcaattgcattcctttccacacatattttaaacaggaaaacaatggctttcctccanatctcaaggttatcaggcaaaacgtgcaatctcgtaaaaatgggtatttccatggtntt

SEQ ID NO: 10454 - DNA, 491 bp, Homo sapiens
  misc_feature (424)..(424): "n" may be a, t, c, g, other or unknown
  misc_feature (427)..(427): "n" may be a, t, c, g, other or unknown
  misc_feature (429)..(429): "n" may be a, t, c, g, other or unknown
  misc_feature (441)..(441): "n" may be a, t, c, g, other or unknown
  misc_feature (443)..(443): "n" may be a, t, c, g, other or unknown
  misc_feature (451)..(451): "n" may be a, t, c, g, other or unknown
  misc_feature (457)..(457): "n" may be a, t, c, g, other or unknown
ccttttgtattaacttttatttacctgttaatgaaatcatcaaaatacaatgagtaggcaccttctatgtacatctgtcctagtgcttttgagtgttaatctaaactcatacatcaacaaacattctagccggacaagtaggtggctactcagtccattaagaaacttaattactagtttctagtagccttaaagtctcatttaacatttaacaaatcaaagagcatgtcagaggctggacatcaatggcagatgatgccaaagtcatagggttttgcctttgtgtacagtgcataggctccaaagcatgacctgcacgtcttgatactcaggaatttttggaaaaagaaaatcacactctttggccacttttaaaaagtgaaaaggtagagccttcattaccctagtagagcttaacctaatncantncaatgaaccaancnggaagaanggcatntttacaaacccttttcaaaagtcattggccagct

SEQ ID NO: 10455 - DNA, 558 bp, Homo sapiens
  misc_feature (519)..(519): "n" may be a, t, c, g, other or unknown
  misc_feature (554)..(554): "n" may be a, t, c, g, other or unknown
agataaaattaaactgactttattaaacagagtcacttcaggcctttttcttatgaacagagtgatccttagtcgggtaacatgtcaatgacagtgcactctgtgcctctcctgcattgtggggagggcacttcttaaggcaaagtaaaattcaggacctgcatgaaatcagttttgcttccatttgagttcgatttatgctattaatagttctgatcaccaaatttataacatttaaagtactgtctgttacccgatgtctggtatgtttacataaaacgtggttctgcccagtaacagcattaagggtaaaaatggggatttcccctaaaattattaccatcatgtcatcctagagtggtacccacctgggagaggtccaaaaaacaaagcattagatttcaggctaagaacagccagttttaggagtaagaattacatcgaatagccttaagagcctttaaaaaggtcaaggcttcttaaacttcagaaatgaaaccaaaccaaaccaaaccaccnccaaaaccaacctacccaaccccaaaacttttggngcca

SEQ ID NO: 10456 - DNA, 484 bp, Homo sapiens
  misc_feature (435)..(435): "n" may be a, t, c, g, other or unknown
  misc_feature (453)..(453): "n" may be a, t, c, g, other or unknown
  misc_feature (456)..(456): "n" may be a, t, c, g, other or unknown
  misc_feature (468)..(469): "n" may be a, t, c, g, other or unknown
  misc_feature (476)..(477): "n" may be a, t, c, g, other or unknown
caagcaaaaaattattcttttaatacagcttttaccaaaacagttttaatacatgagtggctacaattttattgtgtacacaatgtgcttatagtcacatgtggcccaatggatccaaatgcctcctctggctcatgaaatcccatgtacttcacaatctagcctaatcgtgtatatgcataaaagccactggtatactttttacagacatctttgtataatagtccagaaaaaaaaatcagtggtacttaagaatgtttagacaatttgacatctacgtttgctttcttttcttttcagtagtccttctgatgattgggggcctttatcccataggtttatactgttaaaacagtacataaaattacatttagctttgcctagagtaatagataaaaaagggtaaatcacacattttcaagaagcttgagaggnaaaaaattgcagcatcgnggntttaaaaaactnnttaagcnngaaaatc

SEQ ID NO: 10457 - DNA, 552 bp, Homo sapiens
gagcattccaaatttattccctttaagtaaacctatagccactacatatgtccctgacaattagaacagaaaacaaaaaaaggacaaatagaaatactttccattctgtctatatagtagtagttttgggggtatagatagtaaacactagtcaagaatactcgtctaaatatgttggtaaaatgtagtcatcatttggcatgtgttttgctttggtatataatgaagttgagctatcccatctttcttctctatggaatatagtcacacaaacaaaaaagatgaatctcactagaggtgggtctttatcagaaatatgccccaatctagttaggtaatagaaagaaaatcattttctcctcctaggcctaagattcttcatgtaaaaattataagactgaataaagatcacttctaagtttctataattcatgtagatatatcaatttatacatcatgatgtagacagacagcaaggctatctttctggctccatgatgctaggcttggccacatgacttgcttaaagcaccgtatggatacatgcatctt

SEQ ID NO: 10458 - DNA, 544 bp, Homo sapiens
  misc_feature (456)..(456): "n" may be a, t, c, g, other or unknown
  misc_feature (466)..(466): "n" may be a, t, c, g, other or unknown
  misc_feature (471)..(471): "n" may be a, t, c, g, other or unknown
  misc_feature (473)..(473): "n" may be a, t, c, g, other or unknown
  misc_feature (484)..(484): "n" may be a, t, c, g, other or unknown
  misc_feature (489)..(489): "n" may be a, t, c, g, other or unknown
  misc_feature (518)..(518): "n" may be a, t, c, g, other or unknown
ggtatattcatacaatggaattttattcagccatagaaaggaatgaaattctgacacatgctacaacatgggtaaaccttgcaaacgccatgctaaatggaagcctgactgaccaggggctcttgggctctcaatgcaatagaaactgacatggggccaaaagacttcccagacaaagcacgcgaagggtagaggatataggttagcatcatctggttgtgatgatcatctcgagtaatgggccacctggtggtctggccagcggcaacaaggctgtaaatcaattaattattcagcattccctcccaagatgggacactctgcaatcttggttccctatttggatctcctaaggccagttcctggaattgtttaagtaaaagacatggttaagcattatgagagcacagaagaacaatacagaaaggccatcttctttggatgactaaagccctnagggtagcangtatngnggcaatgaagnaatantattggggtttgggatcagtgggaatgcntgaaaaaaagctctaatgggggtgaa

SEQ ID NO: 10459 - DNA, 135 bp, Homo sapiens
  misc_feature (129)..(135): "n" may be a, t, c, g, other or unknown
gcctttcccgggtgctttattacacgtgatggcgaccagtctacaccacagactagatcgtgcgatgccacagaagagccttcccgcttccctccaccatgtcccccttgttggggggggggaaggggnnnnnnn

SEQ ID NO: 10460 - DNA, 563 bp, Homo sapiens; identical to SEQ ID NO: 10442
  misc_feature (1)..(563): "n" may be a, t, c, g, other or unknown

SEQ ID NO: 10461 - DNA, 553 bp, Homo sapiens
  misc_feature (425)..(425): "n" may be a, t, c, g, other or unknown
  misc_feature (449)..(449): "n" may be a, t, c, g, other or unknown
  misc_feature (458)..(458): "n" may be a, t, c, g, other or unknown
  misc_feature (467)..(467): "n" may be a, t, c, g, other or unknown
  misc_feature (475)..(475): "n" may be a, t, c, g, other or unknown
  misc_feature (501)..(501): "n" may be a, t, c, g, other or unknown
  misc_feature (503)..(503): "n" may be a, t, c, g, other or unknown
  misc_feature (541)..(541): "n" may be a, t, c, g, other or unknown
gacacagagtcttgctctgttgcccagactggagtgcagtggtgcaatctctgctcggtgcaacccccacctcctgggttcaagcgattctcctgcctcagcctctccagtagctgagattacaggtgcgcaccaccacgcccagctaattttgtattttttagtagagacagggtttcaccgtggtctcaaactcttgacctcgtgatccgcctgtctcagcctcccaaagtgctggggttacaggtgtaagccactgcgcccagccagtaattcttatcaaatgaaaaatgatcttcattcacaatgactgaccaaacttctgagtttccttcagttaatttcaaatcctgaggtcaaaatcaccaatgacttttgctctttggctttcaaagtgggacatatcatcaaatggcccatatacncaaaatttacattatagacaaatncatatttgncatatgttngaagcctnattcgtgatttataggatttaaacancntaggcttttcttaaaagggatctgaagtcaatagggtnactccaccttgc

SEQ ID NO: 10462 - DNA, 566 bp, Homo sapiens
  misc_feature (498)..(498): "n" may be a, t, c, g, other or unknown
  misc_feature (510)..(510): "n" may be a, t, c, g, other or unknown
  misc_feature (537)..(537): "n" may be a, t, c, g, other or unknown
gagacggagcctcgctctgtcacccaggttggagtgcagtggcgcgatctcagctcactgcaacaacctctgcctcctggattcaagcaattctcctgcctcagcctcccgagtagctgggattgcaggcatgtgccaccacgcctggctaatttttttgtatttatagtagatatggtgtttcaccatattggccaggctggtctcaaactcctgaccttgtgatccacctgcctcaacctcccaaagtgctaggattacaggtgtgagccactgcgcccagccaattacatttttaataacccgaatattacagatcatttccacgtgtccttgcaccctttatacacatcatatcattaggttcaacatattttgacttgttggccttggcacacacaatccatttgtgtggtttcaccaaagatgaatgtttcgatgtctagtgatttggtaaggtctcgatcaagcctgggccacatatagtaccatttaaangattcttctaanatagactttcggatgtgatactggttnaactatgataaagttggccaactaattgt

SEQ ID NO: 10463 - DNA, 560 bp, Homo sapiens
  misc_feature (2)..(2): "n" may be a, t, c, g, other or unknown
  misc_feature (467)..(467): "n" may be a, t, c, g, other or unknown
  misc_feature (481)..(481): "n" may be a, t, c, g, other or unknown
  misc_feature (522)..(522): "n" may be a, t, c, g, other or unknown
  misc_feature (535)..(535): "n" may be a, t, c, g, other or unknown
  misc_feature (545)..(545): "n" may be a, t, c, g, other or unknown
  misc_feature (560)..(560): "n" may be a, t, c, g, other or unknown
gntttttccagaatttaatatttttaaaaagacagaaaatataaaaattaccaaaaaaatgtttaaaggttcattttggggctaaatactaggactgaaactcttttcttgtaattgatttatggtaaagagtaaaaataatataaaaaacacagcagttatagctgtccaaatgaaagcctatctgcaaaaaggcaggacaaggtgggctgactgagcaaatattcacatcacgaccttagtaataaatttcaaatggtttcagttcccaagatctgaaaagagaatcatcttgcacgcttagattccacttcttcaagaatccactcaatgccattcaaaaaaccagtcagagtttcagcctctgtatcctggaccagccatgggtgatttagaagattcagacgcagctcatgagccaaataaaaacagggcattcttttacatccccttgagaaatccagatnaaacccaccatggnctttccgaaaacccaaaggctggaactggcatggcctaatntgagaaaatcatnttggcatcangctttatgacctcan

SEQ ID NO: 10464 - RNA, 30 nt, Artificial Sequence
  misc_feature (1)..(30): Description of Artificial Sequence: an artificially synthesized oligo-cap linker sequence
agcaucgagucggccuuguuggccuacugg

SEQ ID NO: 10465 - DNA, 42 bp, Artificial Sequence
  misc_feature (1)..(42): Description of Artificial Sequence: an artificially synthesized oligo(dT) primer sequence
gcggctgaagacggcctatgtggccttttttttttttttttt

SEQ ID NO: 10466 - DNA, 21 bp, Artificial Sequence
  misc_feature (1)..(21): Description of Artificial Sequence: an artificially synthesized primer sequence
agcatcgagtcggccttgttg

SEQ ID NO: 10467 - DNA, 21 bp, Artificial Sequence
  misc_feature (1)..(21): Description of Artificial Sequence: an artificially synthesized primer sequence
gcggctgaagacggcctatgt

SEQ ID NO: 10468 - DNA, 1881 bp, Homo sapiens
  CDS (108)..(1769)
gcgcttttcactgacaggcgctgttccccacagccagcgccgcccgccacgtcccagctctcggccaacggagctgcgcggcgggtgacctttccgagcccagcgcgatgacggctccttgctcccagccggcgcagcttcctggacgccgccagctcgggctggtgccgttcccgccgccgccgccgcggacgccgctgctgtggctgctgctgctgctgctggccgccgtggcgccggcgcgcggctgggagagcggagacctggagttgtttgacttagtggaggaggtgcagctcaacttctaccagttcctcggggtgcagcaggatgcatcatctgcagacatcagaaaagcatatcgtaagctttcactaactttacatccagacaagaataaagatgaaaatgcagaaactcagtttagacaattggtggccatttatgaagttttaaaggatgatgaacgaaggcagaggtatgatgatattctgatcaatggacttccagattggcgacagcctgtattctactacaggcgggtgagaaaaatgagcaatgctgagctggcattactcttgttcattattctcacagtgggtcattatgctgtggtttggtcaatctacctggaaaaacaactggatgaactactaagtagaaaaaagagagaaaagaaaaaaaagactggcagcaagagtgtggatgtatcaaaactcggtgcttcagaaaaaaatgaaagattgctgatgaaaccacagtggcatgatttgcttccatgcaaactggggatttggttttgccttacactaaaagcattacctcacctcatccaggatgctgggcagttttatgctaaatataaagaaacaagattgaaggaaaaggaagatgcactgactagaactgaacttgaaacacttcaaaaacagaagaaagttaaaaaaccaaaacctgaatttcctgtatacacacctttagaaactacatatattcagtcttatgatcatggaacttccatagaagaaattgaggaacaaatggatgattggttggaaaacaggaaccgaacacagaaaaaacaggcacctgaatggacagaagaggacctcagccaactgacaagaagtatggttaagttcccaggagggactccaggtcgatgggaaaagattgcccacgaattgggtcgatctgtgacagatgtgacaaccaaagccaagcaactgaaggattcagtgacctgctccccaggaatggttagactctccgaactcaaatcgacagttcagaattccaggcccatcaaaacggccaccaccttgcccgatgacatgatcacccagcgagaggacgcagagggggtggcagcggaggaggagcaggagggagactccggtgagcaggagaccggggccactgatgcccggcctcggaggcggaagccagccaggctgctggaggctacagcgaagccggagccagaggagaagtccagagccaagcggcagaaggactttgacatagcagaacaaaacgagtccagcgacgaggagagcctgagaaaagagagagctcggtctgcagaggagccgtggactcaaaatcaacagaaacttctggaactggcgttgcagcagtacccaaggggatcctctgaccgctgggacaaaatagccagatgtgtcccgtccaagagcaaggaagactgtatcgctaggtacaagttgctggttgaactggtccaaaagaaaaaacaagctaaaagctgaatattctgggagatgatgttcaccttcattttccaaaatgaatatcttaaaaatcttatgcagaaatttgcattttgtacctcaatatttctacgtcatgtgccttagt

SEQ ID NO: 10469 - protein, 554 aa, Homo sapiens
MTAPCSQPAQLPGRRQLGLVPFPPPPPRTPLLWLLLLLLAAVAPARGWESGDLELFDLVEEVQLNFYQFLGVQQDASSADIRKAYRKLSLTLHPDKNKDENAETQFRQLVAIYEVLKDDERRQRYDDILINGLPDWRQPVFYYRRVRKMSNAELALLLFIILTVGHYAVVWSIYLEKQLDELLSRKKREKKKKTGSKSVDVSKLGASEKNERLLMKPQWHDLLPCKLGIWFCLTLKALPHLIQDAGQFYAKYKETRLKEKEDALTRTELETLQKQKKVKKPKPEFPVYTPLETTYIQSYDHGTSIEEIEEQMDDWLENRNRTQKKQAPEWTEEDLSQLTRSMVKFPGGTPGRWEKIAHELGRSVTDVTTKAKQLKDSVTCSPGMVRLSELKSTVQNSRPIKTATTLPDDMITQREDAEGVAAEEEQEGDSGEQETGATDARPRRRKPARLLEATAKPEPEEKSRAKRQKDFDIAEQNESSDEESLRKERARSAEEPWTQNQQKLLELALQQYPRGSSDRWDKIARCVPSKSKEDCIARYKLLVELVQKKKQAKS

SEQ ID NO: 10470 - DNA, 1753 bp, Homo sapiens
tttcccgccacggcagtggagccgacagtgactatgagaacacgcaaagtggggacccactgctggggctggaagggaagaggtttctagagctgggcaaagaggaagacttccacccagagctggaaagcctggatggagacctagatcctgggcttcccagcacagaggatgtcatcttgaagacagagcaggtcaccaagaacattcaggaactgttgcgggcagcccaggagttcaagcatgacagcttcgtgccctgctcagagaagatccatttggctgtgaccgagatggcctccctcttcccaaagaggccagccctggagccagtgcggagctcactgcggctgctcaacgccagcgcctaccggctgcagagtgagtgccggaagacagtgcccccagagcccggcgccccagtggacttccagctgctgactcagcaggtgatccagtgcgcctatgacatcgccaaggctgccaagcagctggtcaccatcaccacccgagagaagaagcagtgacctctctccccacaccctcacctgcaccctaggacctcactggccataggagctgggccactccagacattaatccccaccccaacagagccactggcacaagtgcccttagtgctgccacactccctggcagccaggtgccctggtgcccacccctgtcgagcccctaaggatggggaggtgggggggcaggagcttctgtcccccacattccatgcacctcccctctgtatatagcatctcccccctcctagtgagcaggggcctgcaaggcatcactcccagcccctcgccttctagggcaccctcagcaaaggggcaggtggggacactccaagtggggcagctctccgtacatgcgccccacccccatgagccagttcagccctactgggggctgagcgggggcatcccctcctttgtacatagtctccatggatgtccctgccctgtagccaccagccccttgctgctctccctttaatgccatatggcccctgcctagggcacaggccccaacctgtgtgctggggtccccagcagcaaacactggaaagtctgttttttttttttctttcttcttccccaccccttaattttaactttgtggtaactgagtgcccccgcgtgcctgcgtgttgagtgtgtgggcggcagtgccgttccggaggcctggtccatctggagttttgaggggtgaggggaccagagcagtgggaccagcatggggatcagcttcccttccccacctggagccagggactgtccgggtagccagttttggtcctgccagctgcctccctgatccctccccactctcgccccttctctatgaacttaaatcaaaaaccacttccctccatctcctcctgctcctgcgtggagggggaatgtgtgctggctagggtggaggactgagcacctgagcctggggctggctccccggggtccccgactcagctggtggctgtggagctgagtcccctccccgtaacctctgcaaggccagcacccaccatcactacctgcacctgctgtggtcccaccctctggaggcctgggaacctggctgcagcctgggaaggctggagaggcagacggtgggacccaccagctctctccccatcccgcttcttccctgggggccaggccctacctgtgtggtggtgggtgggctgtcaagacgtgtcatgtacatttgtatcaaaaataaagaagtgaccatg

SEQ ID NO: 10471 - DNA, 1545 bp, Homo sapiens
ttgtagaatgtaatctctggtaacactgactttaagaggcaatgagtgtgtgtgtgtgtgtgtatgtgtgtgagtgtatatatattcccataggctagcaaatgaaaactgacagtgaacttttcctctagctctgatagagtgactggcattgggcatttcctcctggcatagacaactctaaagctggtaaaatgtgcatgacaaatgttttaaggcattaaacaacaggcagcacagaactgtaattcttgagagaaaggaaacatgagaggtgaggctcagtttgccccagtgctctgcctgggaccgtttcctgcacatctccagcagaactgtggcctcactgacctgaggaggagattggagctgtggtctcagaagcagctgagatttggggagccaagtgcaagagcagaagctgaggacaagggtttccagaagtcttgatgaagactcattgctggtttttggctgaaggctgcccacaccatggcaggcagtacacagggcctagcagtggttgccttctgcagggctgggaatgaatgaaggcattattgctatgcaccaccaggagatgctggagctccagctcagccagaatggagagaactcattgagcatctcagtcaggcattcagttgaaacctcagaaagtccacaccatagcagtaaaagctataccctcaaataagggccacaccttagcccataactagaataagttcatgtccatgaaaggaaagacatgaagcctggtatgaccaaaaagatcagttggtgatttccctgctgccaaaacaaaactcagagcacttctaatttaaaaagagattatctagaatcatgaaaacattttgtctatagtatccagaataaaatttttttaaaaaattgctagagtttcaaagaaacatgaatataagacccatgatcaaggaaaacaacagtcaatagaaacaagccctgagattaaatgcctttgatgttgaaattttcagacaaggattttaaggcagttataaatatagccaaggaattaaaggaaaacatggtcataatgagtaaacagagggaaagttgcagtagagaaattataactgtaaaaaataaaattttagaactgaaaatatgtagtagatgggtataataatagttaagaatggcagaagaggccggggcacagtggctcgtgcctgtaatcccagcactttgggaggccaaggtgggcagatcacgaggtcaggagattgagaccatcctggctaacacactgaaaccccgtctctactaaaagtacaaaaaattagccgggcatggtggcgggtgcctgtggtcccagctgctcgggaggctgaggcaggagaatgatgtgaacccgggaggccagagcttgcagtgggccgagatcacgccactgcactccagcctgggcgacagtgcaagactccatctcaaaaaaaaaagaaaagagtggcagaagaaatgctagccaaactgcaggcagatcaagagaattatttgacctgaaaagcagagatt

SEQ ID NO: 10472 - DNA, 2060 bp, Homo sapiens
gttaccatgctaaatgtaatgcgtttatttattattcagcaaaatctatggcagaggcattccaaatagtagctcgtggagaattaaaagtatcagggacttgtagaaatcttggtttctttatttttttaaagcatcagaaggtacttgaaagatgtgaacagataaattaaggctaaaaagaaaacagaaatggctacattttaaactgcctttctaccctcagtatttaattagatcaattgtatagaggaatgaacagaggtgacattcctcattgggattccttccaggactcttatagactttgcattcagaatgttcccattttcattgtgttgtactgatgataatttaagtattaggggaaaatccatttataaattaaacaaaatgacttgatatccatcagtcccctagttcatcaagctgttcaaacacggggaagattggctggtcggcctgggtcttccgagagcgctggtaattagatctgcgaaggatttattctttgctgattggggctttaaattaattgaagttccacatttgtggttttgtcctttttgtacttttttagaggagatatttcatattcttgtgtggtggagtgcttggccaagcagcagtggtttaaatgttaatttttctcatgagaagtttaagattttttgatgaatcaaggcctgatttgaagtgcaaagttgtatttgcttacttggaaaattattttttcactcttcaaagatgcttgtactttacttgatctgttgttttaaaatagattcgtaatacaaaagcattttattaacaagaaaaatagaaaaacctatgttaagattaacattaaaataactcaacatacttcgaagacaataatttggcctgcctagaagtaatcacgatatgttttctcacacagaaggaaaaaaaaaacaacacacattggactcttggaagtattttaagaaccaatccattttcctcactgaagttaactgtagtttctagggcattcattattcttagcactggtgatcatccttcttcagtgagccccacacatgagaaaagagaatatttaagattattctttaccttttaaaaatgaaaatacttttgttcaggtgggcaagtgatatattcttataccatagctcactgactttactgagcagctatgtcagcgagataactggaactgttttttagtcaatagaatgttcatatctgggcatatttgagaaacagcacatgcaaacggttttctactctttcatcctgatgttggagaacctcttcctcatgactcaaacacgcagcatgaaagaatttaagtttctaagcctttgtatgagggaaggtcttagaaaagtttgtttccttgaatcacaaatgctcaagtttgaaaggatcttcatgatccttttatccaacctccaacatacgcagccaaatctctacagcaaaaccagcaggcagcctttccagtctctgctagattctgccctgataggaagctcatgaacttgcgaggctgcccactcccttgttgagtagttctcgtagatagttatgcctgatatggagcccaaatctgcttcgctgcaacttcccactgatccaaggtctgccctctgggacatttctgatttactccttcttccctatcctagcttctcacacatgtgaagtcaattacatcagatcctcctttcctcctgtcatccttctcctttccaggtcaaacagtgctaattcacaacccttattcaatggcgtgttcctaaaagcctcaccatcctagtcatcctgccctggctgtgcttcagtttgcagagaaccctctaaaaatacagtgaagagaatagcacagccctctagatatattctgattagtgcaaagcagaggaactgtcacctttctcagggtaggctactatacttctcttaatgcagcctgaggttaaatttggtcttcttggaagctagatcatcctgtcaattcatactgagtttgatgtctccccaaatacatgttgacagtgagactttgggag

SEQ ID NO: 10473 - DNA, 1974 bp, Homo sapiens
  CDS (30)..(383)
agggcgggtggagtcgcggagtagtcctcatggccgccccgccggagcccggtgagcccgaggagaggaagtcccttaagctcctaggatttttagatgttgaaaatactccctgcgcccggcattcaatattgtatggttcattaggatctgttgtggctggctttggacattttttgttcactagtagaattagaagatcatgtgatgttggagtaggagggtttatcttggtgactttgggatgctggtttcattgtaggtataattatgcaaagcaaagaatccaggaaagaattgccagagaagaaattaaaaagaagatattatatgaaggtacccacctcgatcctgaaagaaaacacaacggcagcagcagcaattgaacaatcttgagcatagaagtcaatgtaaacgaagttaagatcaaccacataaaacatttcatgtgcaataagctctcaatcaagtaaataaagtttaagttgtagtcatttttttcccacacttgtgtggaatgaaaacttgccagtttattctggccctgtgtctactgccaggatagcattcttacgtgttacatatagtggacttgtcatccttaaaatgtgaacagaatttattggcagtgtggcaaagaattataaaacatagtgtttaatgtacttggagtttccttgtagtagtaagtatagagtttgatgataagtaaacgtcccttaacaaaaacctcaaccttattactatcccattaaaaaacagcaaatacttactgagttcttgtaagagctaatgtcattgtaagatttaaaactaagggcttttatcactttgcaaattattttttaaatgcattcatcatttgacagtgttctctcatttcttaaaatgcgagtcatcttccaaaagagttgtttttaactgccctaaacatttttggggaagtatgcagggtttaaatttttaagtataattagttctgaattaaaatatgcacatggaacttgtctggcagactgatgcaatagtaaaacaactgcagaattactattaatgtaaacaatccatttgaaagtcaatcagctgctcccattaaaatattatttaaaatacaatacccacagcatctaactaaatcctcaggatttattctccgggagaaattatccctttctaggaaaatgaagttatttctggttttaattcatacaatactttaagaaaatctgttaaatataacaaaacacaagctagatgcttaagaaatgcttaaagaaatattggggcgaaggtaacagcagtcaacaggattgtggccattactggtcctattattttgatgtaccatggaaggcacagaaatcgagcaaggaagaaaatattagttattttgatctacatctttttctaaagaaaagtggagcttgcctccagttcaattcacaagagcattttccctcccatgcccaccttttcttgtggctgtcgctaggaaggatgcagaggctgtgtggtttaccaaatgccttaacttagcagtgaatgacaactgtcaaacacatgttgagggaaaatttttactgattcacaaaaaggaagacagtttgcccactcttagtggcacaaatcaaagctgcatgcactacattatccaaattagtcgtaaccaaatagttaaaaaattctgctgggcacggtggctcatacctgtaatcccagcactttgggaggccgaggcagttggatcacctgaggttaggagtttgagaccagcctggccaacagggtgaaaccctgtctcgtctaaaaatacaaaaattagccgggcgtggtggtgcatgcctgtagtcccaggtactcaggaggctgaggcaggagaatcacttgaacccgaggtggggcaggcggaggttgcagtaagccaagatcgcgccattgcactctagcctaggtgacagagtgagactccatctc

SEQ ID NO: 10474 - protein, 118 aa, Homo sapiens
MAAPPEPGEPEERKSLKLLGFLDVENTPCARHSILYGSLGSVVAGFGHFLFTSRIRRSCDVGVGGFILVTLGCWFHCRYNYAKQRIQERIAREEIKKKILYEGTHLDPERKHNGSSSN

SEQ ID NO: 10475 - DNA, 1535 bp, Homo sapiens
  CDS (4)..(1533)
aagatggctgccgctaccggtgcggtggcagcctcggccgcctcgggtcaggcggaaggtaaaaagatcaccgatctgcgggtcatcgatctgaagtccgagctgaagcggcggaacttagacatcaccggagtcaagaccgtgctcatctcccgactcaagcaggctattgaagaggaaggaggcgatccagataatattgaattaactgtttcaactgatactccaaacaagaaaccaactaaaggcaaaggtaaaaaacatgaagcagatgagttgagtggagatgcttctgtggaagatgatgcttttatcaaggactgtgaattggagaatcaagaggcacatgagcaagatggaaatgatgaactaaaggactttgaagaatttggtgaaaatgaagaagaaaatgtgcattccaaggagttactctctgcagaagaaaacaagagagctcatgaattaatagaggcagaaggaatagaagatatagaaaaagaggacatcgaaagtcaggaaattgaagctcaagaaggtgaagatgatacctttctaacagcccaagatggtgaggaagaagaaaatgagaaagatatagcaggttctggtgatggtacacaagaagtatctaaacctcttccttcagaagggagcctagctgaggctgatcacacagctcatgaagagatggaagctcatacgactgtgaaagaagctgaggatgacaacatctcggtcacaatccaggctgaagatgccatcactctggattttgatggtgatgacctcctagaaacaggtaaaaatgtgaaaattacagattctgaagcaagtaagccaaaagatgggcaggacgccattgcacagagcccggagaaggaaagcaaggattatgagatgaatgcgaaccataaagatggtaagaaggaagactgcgtgaagggtgaccctgtcgagaaggaagccagagaaagttctaagaaagcagaatctggagacaaagaaaaggatactttgaagaaagggccctcgtctactggggcctctggtcaagcaaagagctcttcaaaggaatctaaagacagcaagacatcatctaaagatgacaaaggaagtacaagtagtactagtggtagcagtggaagctcaactaaaaatatctgggttagtggactttcatctaataccaaagctgctgatttgaagaacctctttggcaaatatggaaaggttctgagtgcaaaagtagttacaaatgctcgaagtcctggggcaaaatgctatggcattgtaactatgtcttcaagcacagaggtgtccaggtgtattgcacatcttcatcgcactgagctgcatggacagctgatttctgttgaaaaagtaaaaggtgatccctctaagaaagaaatgaagaaagaaaatgatgaaaagagtagttcaagaagttctggagataaaaaaaatacgagtgatagaagtagcaagacacaagcctctgtcaaaaaagaagagaaaagatcgtctgagaaatctgt

SEQ ID NO: 10476 - protein, 510 aa, Homo sapiens
MAAATGAVAASAASGQAEGKKITDLRVIDLKSELKRRNLDITGVKTVLISRLKQAIEEEGGDPDNIELTVSTDTPNKKPTKGKGKKHEADELSGDASVEDDAFIKDCELENQEAHEQDGNDELKDFEEFGENEEENVHSKELLSAEENKRAHELIEAEGIEDIEKEDIESQEIEAQEGEDDTFLTAQDGEEEENEKDIAGSGDGTQEVSKPLPSEGSLAEADHTAHEEMEAHTTVKEAEDDNISVTIQAEDAITLDFDGDDLLETGKNVKITDSEASKPKDGQDAIAQSPEKESKDYEMNANHKDGKKEDCVKGDPVEKEARESSKKAESGDKEKDTLKKGPSSTGASGQAKSSSKESKDSKTSSKDDKGSTSSTSGSSGSSTKNIWVSGLSSNTKAADLKNLFGKYGKVLSAKVVTNARSPGAKCYGIVTMSSSTEVSRCIAHLHRTELHGQLISVEKVKGDPSKKEMKKENDEKSSSRSSGDKKNTSDRSSKTQASVKKEEKRSSEKS

SEQ ID NO: 10477 - DNA, 1973 bp, Homo sapiens
  CDS (197)..(1927)
acccatctacagcaagaagacggaaatccaaaggcagacagtacgggctcccttcgccaaactcttcattttctctgcacttcaggtggcaagacagctccttcttcagcagcaacagcagcagcaagttagtggattaaaatctcccaagaggaatgacaaacaaccagctcttcaggttcccgtgtcagtggctatgatgacacctcaagttatcactccccagcaaatgcagcagatcctccagcaacaagtgctgagccctcagcagctccaggttctcctccagcagcagcaggccctcatgcttcaacagcagcagcttcaagagttttataaaaaacaacaggaacagttgcagcttcaacttttacaacaacaacatgctggaaaacagcctaaagagcaacagcgggtggctacccagcagttggcttttcagcagcagcttttacagatgcagcagttacagcagcagcacctcctgtctttgcagcgccaaggccttgtgacaattcagcccgggcagcctgcccttccccttcaacctcttgctcaaggcatgattccaacagaactgcagcagctctggaaagaagtgacaagtgctcatactgcagaagaaaccacaggcaacaatcacagcagtttggatctgaccacgacatgtgtctcctcctctgcaccttccaagacctccttaataatgaacccacatgcctctaccaatggacagctctcagtccacactcccaaaagggaaagtttgtcccatgaggagcacccccatagccatcctctctatggacatggtgtatgcaagtggccaggctgtgaagcagtgtgcgaagatttccaatcatttctaaaacatctcaacagtgagcatgcgctggacgatagaagtacagcccaatgtagagtacaaatgcaggttgtacagcagttagagctacagcttgcaaaagacaaagaacgcctgcaagccatgatgacccacctgcatgtgaagtctacagaacccaaagccgcccctcagcccttgaatctggtatcaagtgtcactctctccaagtccgcatcggaggcttctccacagagcttacctcatactccaacgaccccaaccgcccccctgactcccgtcacccaaggcccctctgtcatcacaaccaccagcatgcacacggtgggacccatccgcaggcggtactcagacaaatacaacgtgcccatttcgtcagcagatattgcgcagaaccaagaattttataagaacgcagaagttagaccaccatttacatatgcatctttaattaggcaggccattctcgaatctccagaaaagcagctaacactaaatgagatctataactggttcacacgaatgtttgcttacttccgacgcaacgcggccacgtggaagaatgcagtgcgtcataatcttagtcttcacaagtgttttgtgcgagtagaaaacgttaaaggggcagtatggacagtggatgaagtagaattccaaaaacgaaggccacaaaagatcagtggtaacccttcccttattaaaaacatgcagagcagccacgcctactgcacacctctcaatgcagctttacaggcttcaatggctgagaatagtatacctctatacactaccgcttccatgggaaatcccactctgggcaacttagccagcgcaatacgggaagagctgaacggggcaatggagcataccaacagcaacgagagtgacagcagtccaggcagatctcctatgcaagccgtgcatcctgtacacgtcaaagaagagcccctcgatccagaggaagctgaagggcccctgtccttagtgacaacagccaaccacagtccagattttgaccatgacagagattacgaagatgaaccagtaaacgaggacatggagtgactatcggggcgggccaaccccgagaatgaagattggaaaaagg

SEQ ID NO: 10478 - protein, 577 aa, Homo sapiens [sequence omitted]

SEQ ID NO: 10479 - DNA, 1718 bp, Homo sapiens
  CDS (252)..(1718)
aggaagtagaacgccggctcgcatgcctgcccgcccgccagcctgccgggtacggccttttccgccggggcttccaggtcaaagaattcgcctttgccgctaccgctttcttaccctccgcacccgttaagttctccggtcgggcggcagtctctgaacacttagccgcgccatccggggtcacaccgcctggaaggaggtgacgggggcggcgcggggcgcggacactccccgctgagagtccgcctgccatggactcggaatattacagcggcgaccagtcagatgatggtggtgctaccccagtacaggatgaacgggattcagggtcagacggtgaggatgatgtaaatgagcaacactccggatcagacactggaagtgtagaacgtcattcagagaatgaaactagtgactcagaaaatgaagagcttcccaaaccccgaatcagtgattcggaaagtgaggatcccccaaggaaccaggccagtgattcggaaaatgaggagctacccaaaccccgagtcagtgactctgagagtgaggggcctcagaaggggcctgccagtgactcagaaactgaggatgcgtccagacacaaacagaagccagagtcagatgatgacagcgacagggagaataagggagaggatacagaaatgcagaatgactccttccattcagacagccatatggacagaaaaaagtttcacagttctgatagtgaggaggaagaacacaaaaagcaaaaaatggacagtgatgaagatgaaaaagagggtgaggaggagaaagtagcgaagagaaaagctgctgtgctttctgatagtgaagatgaagagaaagcatcagcaaagaagagtcgtgttgtctctgatgcagatgactctgacagtgatgctgtatcagacaagtcaggcaaaagagagaagaccatagcatctgacagtgaggaagaagctgggaaagaattgtctgataagaaaaatgaagagaaggatctgtttgggagtgacagtgagtcaggcaatgaagaagaaaatcttattgcagacatatttggagaatctggtgatgaagaggaagaagaatttacaggttttaaccaagaagatctggaagaagaaaaaggtgaaacacaggtaaaagaagcagaagattcagattctgatgataacataaagagaggaaaacatatggactttctgtcagattttgggatgatgttgcagcgaaaaaagagcatgagtggcaagcgcagacggaaccgcgatggtggcacctttattagtgatgcagacgacgtcgtgagtgccatgatcgtcaagatgaatgaagctgctgaggaagacagacagttgaacaatcaaaaaaagccagcactgaaaaaattaactttactgcctgctgtagttatgcaccttaagaagcaggaccttaaagaaacattcattgacagtggtgtgatgtctgccatcaaagaatggctctcacctctaccagataggagtttgcctgcactcaagatccgggaggagctgctgaagatcctgcaagagctgcctagtgtgagccaggagaccctgaagcatagtgggattggacgagcagtgatgtatctctataaacaccccaaggagtcaaggtctaacaaggacatggcagggaaattaatcaatgagtggtctaggcctatatttggtcttacctcaaactac

SEQ ID NO: 10480 - protein, 489 aa, Homo sapiens
MDSEYYSGDQSDDGGATPVQDERDSGSDGEDDVNEQHSGSDTGSVERHSENETSDSENEELPKPRISDSESEDPPRNQASDSENEELPKPRVSDSESEGPQKGPASDSETEDASRHKQKPESDDDSDRENKGEDTEMQNDSFHSDSHMDRKKFHSSDSEEEEHKKQKMDSDEDEKEGEEEKVAKRKAAVLSDSEDEEKASAKKSRVVSDADDSDSDAVSDKSGKREKTIASDSEEEAGKELSDKKNEEKDLFGSDSESGNEEENLIADIFGESGDEEEEEFTGFNQEDLEEEKGETQVKEAEDSDSDDNIKRGKHMDFLSDFGMMLQRKKSMSGKRRRNRDGGTFISDADDVVSAMIVKMNEAAEEDRQLNNQKKPALKKLTLLPAVVMHLKKQDLKETFIDSGVMSAIKEWLSPLPDRSLPALKIREELLKILQELPSVSQETLKHSGIGRAVMYLYKHPKESRSNKDMAGKLINEWSRPIFGLTSNY

SEQ ID NO: 10481 - DNA, 1479 bp, Homo sapiens
  CDS (142)..(654)
agcctacaccgactctggaggaagactggagcctttgcggcggcgctgcccctcccctggtccccgcgagctcggagggcccggctggtgctgcgggggccccgggagcgtgcttctgttcttcaagattgaaaactaagcatggggaagagctgcaaggtggtcgtgtgtggccaggcgtctgtgggcaaaacttcaatcctggagcagcttctgtatgggaaccatgtagtgggttcggagatgatcgagacgcaggaggacatctacgtgggctccattgagacagaccggggggtgcgagagcaggtgcgtttctatgacacccgggggctccgggatggggccgaactgccccgacactgcttctcttgcactgatggctacgtcctggtctatagcacagatagcagagagtcttttcagcgtgtggagctgctcaagaaggagattgacaaatccaaggacaagaaggaggtcaccatcgtggtccttggcaacaagtgtgacttacaggagcagcggcgtgtagacccagagcaagtctgccttccccctcagccggaagaacaagggcagcggctccttggatggctgaagagctgccgttcctctttcacgatcccagccccatttcagtgtctggggctctggtagatgtgttgagggcaaagtagaggacaagctgtctttcccagtcagccagggagctccccgccaggccacgccccagccactttgctccctctcacctctgggaagtgcaaatactcttggttgacatccccttcctcagccctcccagcctactccccatcccagcttttagaggatctgctccactgtctcctggggcagttgtgggtcactgtcccttccagctgccccagacaggaagcagagtcaccacgcagcagtgtcccttcttgggtctgagttcctattataggtaggggccccaccctctgggcttcccatcagcgacacacacacacttatggcaccagcctggactccagaaaaagggtgtccaggtattgtgtgtatgcatttagttgtgcacacacaaatatgctcctatactggcattaggcgtctcctcatccctcaccctgacctttctcctgtccttttcttggctggaagaagttggcctcctgggagtgtagttttctgttttaaatcccccacccctggctgggctcagtggctcacccctgtaatcccagcactttgggaggccaaggcgggtcgattacttgaggtcaggagttcacgaccagcctggccaacattgtgaaaccccatctctgccaaaaatacaaaagttagccgggcgtagtggcacatgcctgtaatcccagctacccggggaggctgaggcaggagaattgcttgaactcagaaggcggaggctgcagtgagccgagatcgtgccactgcactccagcctggtcaacagagcaagactccatctcg

SEQ ID NO: 10482 - protein, 171 aa, Homo sapiens
MGKSCKVVVCGQASVGKTSILEQLLYGNHVVGSEMIETQEDIYVGSIETDRGVREQVRFYDTRGLRDGAELPRHCFSCTDGYVLVYSTDSRESFQRVELLKKEIDKSKDKKEVTIVVLGNKCDLQEQRRVDPEQVCLPPQPEEQGQRLLGWLKSCRSSFTIPAPFQCLGLW

SEQ ID NO: 10483 - DNA, 1739 bp, Homo sapiens
  CDS (166)..(1629)
gcttctccggcggaacccaggctggaccgcgggccccggcctgggggccactgctgccaccgccgccgccacctcgtctcctccccgtccccgcccagccccaggtctccccgcctcactcgggcccgtggccggggtcactccccgccgcccctccccgcacggatgccgaaggtgaaggcgctgcagtgcgccctggcgctggagatcagctcagtaacttgcccaggagtcgtgcttaaagacaaagaggacatctatcttagcatctgtgtgtttggccaatacaaaaagacacaatgtgtcccagccacttttcccctggtcttcaatgccagaatggtgtttgaaaaggtgttcccggacgcagtagatcctggagatgtggttacacagcttgaatatgatacagcagtgttcgagttgatacagctagttccaccagtgggtgaaacactgtctacgtatgacgaaaatacacgagatttcatgtttccgggtccaaaccaaatgtctggacaccatgattcaaaccgccaggttaccatgaggaggatttctggccttcgaggaaatgctccaaggctggaattttctacgacttcagtgattactgaatgtctgataagttcaaggaaatgccacactcaggataaatttatttaccatttggctccagttgaaaaatcacatggcagactgcaaaacagaacatcaagatcacaaaagaaaaaatccaagtcacctgagagaagtaaatactgtataaatgcaaaaaactacgaacagcctacaatttcttcaaaatcacactctccatctccctacacaaaaagacgcatgtgtgagctatctgaagacaccaggcggcggctggcccatttaaatctgggaccctatgagttcaaaaaagaaacagataaacctccatttgtgattagacatgttgatcccccaagtcccagggctgatactttattgggatcttctggaagagactgtgaaagagatggatggtcaagggtgcacaatgatcattctcatcttggctgctgccgacccaaggattataaggttatcaggacaccccatgggagagacttcgatgactctttagaaaaatgtgaagagtatttgagcccaaggtcgtgtagtaagccccggcattcagcgaggaccttgctagtccattcagcaccctcaacaatgccaaagcattctccaagccctgtgttaaatagagcttctctcagggaaagatttcattctgattggtgttcaccttcaaactgcgatgagatccatgaccgggtaaaaaatgtcttgaaatcacatcaggctcatcaaagacatttatatgatgagagagacctagagaaagatgatgaactggaactgaaaagaagtcttttatgtagagactctgcctatgacagtgaccccgagtatagctcatgtcagcagccacgtggcactttccatttggatgacggtgaatactggtccaacagggcagcctcttataagggaaaatcccaccgacccatctttgagaacagcatggacaagatgtacaggaacttatacaaaaaggcctgtagttctgcttcacatacacaggaaagcttctgagaccatccatgataaacctcattagtgtccgtgtcaatttctcaatgaaaatgtttgatgtgatcaatatctgtattcctttttttaaaaaaaatgggattataact

SEQ ID NO: 10484 - protein, 488 aa, Homo sapiens
MPKVKALQCALALEISSVTCPGVVLKDKEDIYLSICVFGQYKKTQCVPATFPLVFNARMVFEKVFPDAVDPGDVVTQLEYDTAVFELIQLVPPVGETLSTYDENTRDFMFPGPNQMSGHHDSNRQVTMRRISGLRGNAPRLEFSTTSVITECLISSRKCHTQDKFIYHLAPVEKSHGRLQNRTSRSQKKKSKSPERSKYCINAKNYEQPTISSKSHSPSPYTKRRMCELSEDTRRRLAHLNLGPYEFKKETDKPPFVIRHVDPPSPRADTLLGSSGRDCERDGWSRVHNDHSHLGCCRPKDYKVIRTPHGRDFDDSLEKCEEYLSPRSCSKPRHSARTLLVHSAPSTMPKHSPSPVLNRASLRERFHSDWCSPSNCDEIHDRVKNVLKSHQAHQRHLYDERDLEKDDELELKRSLLCRDSAYDSDPEYSSCQQPRGTFHLDDGEYWSNRAASYKGKSHRPIFENSMDKMYRNLYKKACSSASHTQESF

SEQ ID NO: 10485 - DNA, 1873 bp, Homo sapiens
  CDS (32)..(1873)
atagagaagaacggaggtacggcctgtggtcatggcgctgttcccagcctttgcggggcttagtgaggctcccgatggcgggagctccaggaaagagttagactggctgagcaacccaagcttttgtgttggatccataacgtccctgagccaacaaactgaagcagctccagcccatgtttctgaagggttaccgctgacaaggagtcatctgaaatcagagtcttcagatgaaagtgacactaacaaaaagctcaaacaaacaagtagaaaaaagaagaaagagaaaaagaaaaaaaggaagcatcagcatcataagaaaacaaagaggaagcatgggccgtcgagtagcagcaggtctgagacagacaccgattctggaaaggacaaaccttccagaggcgttggaggcagtaaaaaggaatctgaggaaccgaatcaaggaaataatgctgcagctgatactggacatcgctttgtttggcttgaggacattcaggctgtgacgggagaaaccttcagaacagataagaaaccagatcctgcgaactgggagtacaagtctctctaccgaggggatatagcaagatacaagaggaaaggagactcctgccttggcattaaccctaagaagcagtgcatatcttgggaagggacttccacagagaagaagcattcacgcaagcaggttgaacgctattttactaagaagagtgtgggattaatgaacatcgatggagttgccattagcagtaaaactgaacctccctcatctgagcccatctcctttataccagtgaaggacttggaagatgcggctcctgttacaacctggttgaatcctctggggatttatgatcagtcaaccacacattggctacaaggacagggtcctccagagcaggaatcaaagcagccagacgcacagccagacagcgagagtgcggctctcaaggccaaggtggaggagtttaacaggagggtgcgggagaatcctcgggatacgcagctgtggatggcatttgttgcttttcaggacgaggtcatgaaaagtcctggcctgtatgccatcgaggaaggagagcaggaaaagcgaaaggggtccctgaagctcattctggagaagaagctggccattctggagcgggccattgagagcaaccagagcagtgtggatctgaaactggccaagctgaagctctgcacagagttctgggagccctccactctggtcaaagagtggcagaaactgatatttttgcatcccaataatacagccctttggcagaaataccttttattttgccagagccagtttagtaccttttcgatatcaaaaattcacagtctttatggaaaatgcttgagcactttgtctgctgttaaggacggcagcatcttatctcaccctgcgttgcctggcacggaagaggccatgtttgcactctttcttcagcagtgccactttctgcggcaggctggccactctgagaaggccatctcattgttccaggccatggtggacttcaccttcttcaaacccgacagcgtaaaagatctgcctaccaaaggacaggtggaattctttgaacccttttgggacagtggagagccccgggctggggagaagggagcccgaggctggaaggcgtggatgcaccagcaggaacgaggtggctgggtggtcatcaacccagatgaggatgacgatgaaccagaagaggatgaccaggaaataaaagataagactctgcccaggtggcagatctggcttgctgctgagcgttcccgtgaccagaggcactggcggccctggcgccctgataagaccaagaagcaaaccgaggaagactgtgaggatcccgagagacag

SEQ ID NO: 10486 - protein, 614 aa, Homo sapiens
MALFPAFAGLSEAPDGGSSRKELDWLSNPSFCVGSITSLSQQTEAAPAHVSEGLPLTRSHLKSESSDESDTNKKLKQTSRKKKKEKKKKRKHQHHKKTKRKHGPSSSSRSETDTDSGKDKPSRGVGGSKKESEEPNQGNNAAADTGHRFVWLEDIQAVTGETFRTDKKPDPANWEYKSLYRGDIARYKRKGDSCLGINPKKQCISWEGTSTEKKHSRKQVERYFTKKSVGLMNIDGVAISSKTEPPSSEPISFIPVKDLEDAAPVTTWLNPLGIYDQSTTHWLQGQGPPEQESKQPDAQPDSESAALKAKVEEFNRRVRENPRDTQLWMAFVAFQDEVMKSPGLYAIEEGEQEKRKGSLKLILEKKLAILERAIESNQSSVDLKLAKLKLCTEFWEPSTLVKEWQKLIFLHPNNTALWQKYLLFCQSQFSTFSISKIHSLYGKCLSTLSAVKDGSILSHPALPGTEEAMFALFLQQCHFLRQAGHSEKAISLFQAMVDFTFFKPDSVKDLPTKGQVEFFEPFWDSGEPRAGEKGARGWKAWMHQQERGGWVVINPDEDDDEPEEDDQEIKDKTLPRWQIWLAAERSRDQRHWRPWRPDKTKKQTEEDCEDPERQ

SEQ ID NO: 10487 - DNA, 1481 bp, Homo sapiens
agaactcccctgtttcccgagtgcataggaaagtgcttagcattgaatgtggagcgatagaatgaacaaagaaatgacaaaatgactaggtggatgaatgcatagcttaatatcagcgaggcaggaagtaaacaaagagacactgagcaccaagtaattcaatacaattcatcatgagaacttatctttaagctcctgtttcatgaggttagatactgtccaacatggttcttacagcacttgttttagctgacagcactggcattcagtgaaaattacagtgggcttgagtatctttggaaataacggttttgcaaatttgattaccattaaacagcctttataaaacacctacctgagtaggaatggagtatatatgttagccaagacttaattattcatctcaggaattggcacactatctgttggctaaagccatcttcctgtctacttaccttatctgtttttatagagcccatattctaaaaatgatttttacatttttatatgtttggggaaaaaaattcaaaagaatgatacatgataattacatgaattttgaatttttttgcccaccaacgaagttttattggaacacagcccgggaaacaacaacaacaaaaatgatactgaaaataataaatctatttatggacaaaagaataggagtcaaaaataggaggcaagagagcacactggaatttagggaaaaagaaagaaaggcaatttttggagcaagaatcatcattaatgtgtgtgatttgaggtgatacatggttaatgaacatttgctaattttttataattacacaaaatccatataaatatatttactttgattatatataaatatattaatattgttaaaaaattaaaacacttctaataaacaaaatcccttgaccactgagttatcacatcccaattccaggtccctctctggatcttttatgatggtcagcaagcatgcctgccagacgagccaaagggaaacatctttattgtattggatagtacacaaacccaatgtttactccttaggaaaacaccatctctatctttcaaggctcttcactatacaagcatccgtgaaaaatagttcgtaacaaagacaggtcttctgctcacaagatctgtagaaacatgagacccatagagaattgtctcccaacaatttccttcagagaggatttgcacttgattgcatcaagagccatggtatcctagcactttgggaggccgaggcgggcagatcacgaggtcaagagattgagaccatcctggctgacacggtgaaaccctgtctctactaaaaatacaaaaaaaattagcctggcatggtggcaggtgcctgtagtcccagctgcttgggaggctgaggaaggagaatggcttgaatccgggcggcagagcttgcagtgagctgagattgcgccactgcattccagcctgggtgacagagcgagactccatctcaaaag

SEQ ID NO: 10488 - DNA, 1917 bp, Homo sapiens
gactttggactcacgtaggcataggagaacgaaacttctgtacattttaatctgaataattcttcaggatttaaaattaattggctctggcttggttggaccgtactcggatctcgccacctctgcgtttcccgagtcactggcgaagaggtcccagttcctctgggaatcgtcctgtatgcaacatcttcacaagagtggcaggcagttgaatctctggccttcgtgggaccactggacatctggcagagaaccaggaaaccacggttcccttctgtgagtccctcagccggaaaactacaagctcctcatgcagctgctgtctacagaccccctggactgcctggggaagtgagtcggagctcctgcagcagaggggtggaacagctacacgaagatccgaaggtggccaaaaataacagcgctttccagatgagggagccagttgtccagcacagtgtcatgggacagtgggccctggtgccacaatgcccggcatctccaccagatacagctttgagatcttcatgatgaagcttgctccaatccaagggctgtcaggtggggtttgcggttcagctgctaacctttctttgatccaaatcctgtcttcactggcttcaagaatcctgtcttcactggcttcaaaactgggatgaaggaggctccttagtggagagcaaagcaaagagaaactcaaattggatccatattaaagaagagaaggatggatttgtttagacaacacaaacctaggaagggtttgagaggtgaaacaagctgggttatggatgaacgggggcaattggaatgtagaattgaagcagtaattaacatcttggtaagttacccaccataaaacgctttagagcaagatagatttttgtttttcttttttttttcttctatttcttcttttctattttttttctatcttctcatgtaggacaccctttttttttctctaattttgagatcctcatggatgaaagcaaaacatatattgaaatattgcataggaagaacacaaatagctttgataatgcaccaactgcaagtggattcattggctctgtgtcagctggtgcatgtaggaagctgaagaatattttcttgccaacgttttggcaagacttattttttcccggggggtgggcgcaagggtgcaatccaataataattaaaaaaaagactgtataaccattgtgtaggaagagcttcagccaccctacagccgagagcgagttggtcttccacaagtcactgggggagatgaagggtacactgtagtcaggtggagtctctttgggcctaaaatcactataggacacttttccaaagtaccctggtgtcttcagtgatcctgagtgctggcacttgcactttgtcactacatccatcccagagctgccccagtggctggaggcctcttgaatatcagcatcatgctctcccccaacctaggggattcgttttcctcccctgcagtagacatttgcgtgaaggttaatccacagttaggagttgcttaactcaagcctcagaaagcgtacactgcatctttaagaaatagtttacttgtgaatcagtaaacgtactagacaaagcagccattacttatgcattcctgcatatccagcaaggtgaaaataatagaataaacatcatatacttcattatgatatcggtttacacttccagggtacacaaaaagaggccatttcatcaagctaattgcctgaaagtaaaagagagagaactttagctattagtctattatggggcttttttcttaatcacaaataggggccgtgtgtccctggggggatgtgtattctaatttacaattgaactacagatcagagcaatcaatcttgggcagcacttttacagtgtaattgctgcaacataacaaat

SEQ ID NO: 10489 - DNA, 2052 bp, Homo sapiens
  CDS (1472)..(2050)
tactaaatgatgtttatttcactatatcccatgtgctctgactctgagacttcaaggtttgaagggggctaaacatgaaatacaagttcccctggaattcagactggttgaatccaagcagtttcactggccaagaaaacctttatgttttggccgggcacagtggttcacgcctgtaatgccagcactttggaaggctgaggcgggcggatctcctgaggtaaggagtttgggaccatcctggccagcaaggtgaaactctgtctctactaaaaatacaaaaatcagcccggcgtggtggcgggtgcctgtaatcccagctactcaggaggctgaggcaggaggatcacttgaacccaggaggcagaggttgcagtgagctgagatcgcaccactgccctccagcctgggcaacagaataaatgagactccgtctccaaaaaaaaaacaagaaaaagaaaagaaagaaagaaaacctcctttatgttttaaatattactgttttcccaaaggaaaaaagtttgtaatttttggaacataatgacattgtcaaactcatgaactcagctctaaaaagaaggcaacataagccagggttcagattcttcttgagctgggtaaaaatacaacactttcagtttaagagaaactaaaaacaaagaaaacaattaagtacattgtttcagtttaactgataaaatttcaattgtaacaaccagtagcacaaactatcacaacccattcaataatctactcctaacacccttttaagaattattattcctgactaatggcccaggcatatccaatttttcttttctatctcctccctggacaacttgaagcagacatttgaatctgcattttcaaaatgaacgttccaacatacgcgagcctgcaatgaaaaattacgctgtagcatttaataactaatctaaaaaacaaatgtaacagcaatcaatattaaacttctgttaatcttcccacttcaggtagcataattacaatctagagagtggtatagtacatttatgctgtctttaaagaacatgtgtacaaaatgtcactaaatttgatatgggctgtcatagacttaatatagcttcatatgcaaatttgaagctggagcactgcttttttctaatatatattataataatggtgataataataaaatggctttatggtttgctcactactaattacatggcacttaacatttgcatgaattttttttaaaaaactgataactattctcaatttcttatccactagttctaatggccataaaagtagcctgccactttcgctgaattttaacacaaactcttgtactacagaaaatgtaggccggttaatcactcctgccaaaaagcttgaagatacaatacgtcttgctgaactagtcattgaagttcttcagcaaaatgaggagcaccacgcagaggcctttgcgtggtggtcagatttaatggtggagcatgcggagacgttcctgtcactctttgcagtagacatggatgcagccttagaggtgcaacctccagacacatgggacagttttccactatttcagctgctgaatgattttctccgtactgactataatttgtgcaatggaaaatttcacaaacacctgcaagacctgtttgccccacttgttgttagatatgtggatctgatggagtcctcaattgcacaatccattcacaggggctttgagcgggagtcatgggaaccagtcaataatgggtcaggcacctcagaagatctgttttggaaacttgacgcccttcagaccttcattcgggacctgcactggcctgaagaagagtttggaaagcacctggaacaacggctgaagttgatggcaagtgacatgatcgaatcttgtgtcaaaagaaccaggattgcatttgaagttaagctgcaaaaaaccagtcgatcaacagattttcgagtcccacagtcaatatgcaccatgtttaatgttatggttgatgccaaagctcaatcaacaaaactctgcagcatggaaatgggccaagaggt

SEQ ID NO: 10490 - protein, 193 aa, Homo sapiens
MVEHAETFLSLFAVDMDAALEVQPPDTWDSFPLFQLLNDFLRTDYNLCNGKFHKHLQDLFAPLVVRYVDLMESSIAQSIHRGFERESWEPVNNGSGTSEDLFWKLDALQTFIRDLHWPEEEFGKHLEQRLKLMASDMIESCVKRTRIAFEVKLQKTSRSTDFRVPQSICTMFNVMVDAKAQSTKLCSMEMGQE

SEQ ID NO: 10491 - DNA, 1901 bp, Homo sapiens
  CDS (1019)..(1339)
aatcagctatttcatgcagtgcaaagattgcaaagagtacaaaaccagctgaaaagcatgcgccaagctgcagcagatgcaaagcctgaaagtttaatgaagaggctagaggaggagataaaatttaatttatatatggtaactgaaaaatttcctaaagaattagaaaataagaaaaaggaattacattttttacaaaaagtagtttcagagccagctatgggccattctgatcttcttgaacttgaatctaaaataaatgaaataaacacagaaattaaccagttgattgaaaagaaaatgatgagaaatgagcccattgaaggcaaactctcactgtataggcaacaggcatctatcatttcccgtaaaaaagaagccaaagctgaggaacttcaggaggccaaggagaagttagccagcctagagagagaagcatcagtaaagagaaatcagacccgtgaatttgatggtactgaagttttaaagggagatgagttcaaacgatatgtcaataaacttcgaagcaagagtacagttttcaaaaagaagcatcagataatagctgaacttaaagctgaattcggtcttttgcagaggactgaagaacttcttaagcaacgtcatgaaaatattcaacaacaactgcaaactatggaggagaaaaagggtatatctggatatagttacacccaagaagagctagaaagagtatctgcactgaagagtgaagttgatgaaatgaaaggacgaacattggatgatatgtctgaaatggtgaaaaaaactgtattcattggtatctgaaaagaagtcagctcttgcctcagttataaaagagctacgacagttgcgtcaaaaatatcaagaactgacccaggagtgtgatgaaaagaaatcccagtatgatagctgtgcagcaggcctcgaaagcaatcggtccaaattagaacaggaagttagaagactccgtgaagaatgtcttcaagaagaaagtagataccattatacaaattgtatgattaagaacctagaagttcaacttcgtcgtgctactgatgagatgaaggcatatatctcttctgatcaacaagaaaaaagaaaggcaattagggaacagtataccaaaaatactgctgaacaagaaaaccttggaaagaaacttcgggaaaaacaaaaagttatacgagaaagtcatggtccaaatatgaaacaagcaaaaatgtggcgtgatttggaacaattaatggaatgtaagaaacagtgctttctgaaacaacaaagccaaacttccattggtcaggtaattcaggagggtggggaggaccggctaatactgtgaattcttgtgtcatcgtttggggttttacttgataccactagctataagcctaatctcataatgtatttcttttttgaaactgatttgtatagcattttgttttcagaagagccattctttattaagttttcatagaaaataatgttaaggtagatttagtttgaatgttttttcatatgaaaaagaggcttttattcttttccatagtttagacatcactggcgtcttctgagttttatgagacaggaaactaagtttactatctgtaaatgtaaacatatgtccattaagaaacatgtagtttttttttagaatgtaataacccagtggcttactgtttttcttaatctcttttaaaaaaactttagaagaatcttttaggaactaatatctcttgttctgaagaaacatttatctgacgttcagcagttcctacagttttacttcagtttatttttcttctgtaaaatgcaagaaaatttaatattttgactaacatgtcttttctgtttgtatcatttaaaggcaaataaacttggtacgtatttcatatctattt

SEQ ID NO: 10492 - protein, 107 aa, Homo sapiens
MIKNLEVQLRRATDEMKAYISSDQQEKRKAIREQYTKNTAEQENLGKKLREKQKVIRESHGPNMKQAKMWRDLEQLMECKKQCFLKQQSQTSIGQVIQEGGEDRLIL

SEQ ID NO: 10493 - DNA, 1962 bp, Homo sapiens
  CDS (147)..(1391)
aaagacaatcgcggccaccgccaggtggaacggcaggtgggttcaggtaccagcctggccgggacccggctgtgggaccaacgcttccgttccccattcccctaccgagctgggcagttagccagcccactccaactctcggaaccatgtttgcagacttggattatgacatcgaagaggataaactcggaatcccgactgtgcctgggaaggtgaccctgcagaaggatgctcagaacctgatcgggatcagcattggaggaggggcccagtactgtccctgcctctatatcgtccaggtatttgacaacaccccagcagccttggacggcacagtggcagctggcgatgagatcaccggtgtcaatggcaggtcaatcaaagggaaaactaaggtggaggtggcgaagatgattcaggaggtgaagggggaggtgaccatccactacaacaagctgcaggcggaccccaagcagggcatgtccctggacattgtgttgaagaaagtcaagcaccggctggtggagaacatgagttcagggaccgcagatgctctgggcctgagccgggccatcctgtgcaatgatgggcttgtcaagaggctagaggagctggagcggaccgctgagctatacaaagggatgacggaacacaccaagaacctcctacgggccttttatgagctgtcgcagactcaccgggcctttggggacgtgttctccgtgatcggggtgcgggagccccagccagctgcgagcgaggcttttgtgaagttcgccgatgcccaccgcagcatcgagaagttcggcattcggcttctgaaagccatcaagccgatgctgacggatctgaacacgtacctcaacaaagccatcccggacactcgcctcaccatcaagaagtacctggacgtgaagtttgagtacctgtcgtactgcctgaaggtgaaggagatggatgacgaggaatacagctgcattgccctaggcgagcccctttaccgggtgagcaccggcaactatgagtaccgcctgatcctgcgctgccgccaggaggcgcgcgcccgcttctcccagatgcgcaaggatgtgctggagaagatggagctgctggaccagaagcacgtccaggacatcgtgttccagctgcagcgcctcgtgtccaccatgtccaagtactacaacgactgctacgcagtgctgcgggatgccgacgtcttccccatcgaggtagacctggcgcacaccacattggcctatggcctcaaccaggaggagttcacagatggggaggaggaggaggaggaggaagacacggcagctggggagccgtccagggatacacgaggggctgctgggcccttggacaagggtggaagctggtgtgactcctgagtgccccgcggctgtggtgccgggggcagggtgcgtgggaggacggagcctgggagcggggcggggccgccgcgcaagggggcgacgcataaaggcctgctggcttggggcgcctgcctccctgctcctctgtcctcgcacagcgaacctgggctcctgcccaggacaggcaccagggtcatggcctgggacctggacactggcccctccaccctccctcccctcccggctccccggccagagggagagcttggtctctggacctgccttaggaaggagagggagggcaggaaggaaaagaaaggacttggaggtggcaggagtccgagccctgctccttgtgggcgctcacactgcccccggagcctgctgggagtggggccagccgtggacagctgaggttggggtcaatgcctcctgggcacccttgcctcgccccagaccggcccgtccagtccccatcacacctcggcggcctttatttattctgttcccccagctcggccacttctctgaaggagggctgggttctgggcctgtatcgaataaacacaaacctggatggcgc

SEQ ID NO: 10494 - protein, 415 aa, Homo sapiens [sequence omitted]

SEQ ID NO: 10495 - DNA, 1445 bp, Homo sapiens
tatctgatgaccatgtcctcatcctgcctattggacactaccagtcagtggtggagctttcagcagaggtggtagaagaggtggagaagtataaggccactctgagacggttctttaagagtcgagggaaatggtgtgttgtatttgagagaaattataagagccatcacctccagctacaggtcattcctgtcccaatcagctgctctactactgatgacattaaagatgccttcattacccaggcacaggagcagcagatagagctgttggaaatcccagagcactctgacatcaagcagattgcacagccaggagcagcatatttttatgttgaacttgacacaggagaaaagcttttccacagaattaaaaagaattttcctttgcagtttggaagggaggtcctggccagtgaagccatccttaatgttcctgataagtctgactggaggcagtgtcagatcagcaaggaagacgaggagaccctggctcgccgcttccggaaagactttgagccctatgactttactctggatgactaaaacaaagggaagaactttttatgaactccacaggaagtagtaaagcttttttttttttttaattaaaagaattttttttgagacggagtctcgctctgtcacccaagcaggattgcagtggcataactgtggctcactgtagcctcaacctcctgggctctggagttcctcccacctcagcctcatgagtggctgggaccgcaggcgcatgctaccatgcctggcaaacttttttgattttttatagagacaggagggtctccctgtgttgcccaggctggtctgtaatgcctaggctcaagggatcctctgccttggcttcttaacctgctgggattacaagcatgagacaccattcctggcctagaagcctatttttaaagaaactacaatctcccatggggactgtttccctgcctcttttgtgcagtcccatggaacttgcctacagcaagaggcctaagattgaatctttttggggaaaagtcattctaggatgaaaatcctatgttaaggccgggcgcagtggctcacgcctgtaatcccagtactttgggaagccgaggcaggtggatcacctgaggtgaggagtttgagaccagcctggccaacatggtgaaaccccgtctttactaaagctacaaaaattagctgggcgtggtgccaggcgcttgtggtcccggctactcaggaggctgaggcaggagaattgcttgagcctgggaggtggaggttgcagtgagccaagatcgctccattgcactccagcctgggtgacagtgaaactccatctcaaaaataaaagaataaaagtatgtctgtcatccagctcctatgtctgttatccagctccaagtacagcttgtgtatatcaacattttcaaaaacctttaaactacc

SEQ ID NO: 10496 - DNA, 2135 bp, Homo sapiens
gaaaagagatgcaccattttcttcttgttctttggataagctaagctcattcccatcttggagctgttgcactggcccttgtgtggctggtccctcctcatcaccagggtcccagctccaatgtcatcttctctgagaagccgtccctgaccaggcttagttgcttcccaccccagcctgacacactccagcccatcacccagtcagtgttatttgcttcatttttacattatggtctaaaattaacttgctagtttactggtttactagtttattatctgtctccttccattatccctctccttccctccttcccttccccttccttccttccttccttccttccttccttccttccttcgagacacagtcgtactctgtcaccccggctggagtgcagtggtgtgatcttgcctcactacaacccctgcctcctgggttttagcgattcttctgcctcagcctcccgagtagctgggactacaggcacccaccacgatgccaggctaatttttgtatttttattggagacagggtttcaccatgttggccaagctggtctcgaactcttgacttcaagtgatccacctgtctcggcctcccaaagtgctgggattacaggcatgagccactgcacctggcccttttattattcatagtaagacacacagggaccacaattgtctcttctactcagtagttggattctgagtgcctagttcagtatttggcaagtaagagttctacatttgatatcctggtttacctgacaacaaagtatctccaaattcattcattcattctttcattcattcgataggtatttactgaacatctaacttatgcccaacactatgctgagagatatgagataaccatgaatagtacaaaagcaatccctgcccttgcagagcaaacagccaaatatcaggagacaggtaacacacaaggaaatgtacaagaaagttgagccagcacttttataagtgctggttctagtactagctttcataagaaagtactggttctagtactagctttcagtactctcttgtgaaattttcaatattcagtcatttcaacctcaaaaatggcaacataattatgtttcaacataattgttgttttaaacaaacaattttgtttcaacataattctcctgaactgggtggaaggctatcaagaaaaagcttagcttcttcttcaggtaactgcaagagacagggttctctagagaaacagaacaaatatacaaagagattcattataaggaattggaagtccaaaatctccagagcctctgtacttgtacaagtctgaaggccgacaggcaggagaattctctctttttggggcaaaggtcagtgttttgttctatccaggctttcagatgattggttgaggctcactcacattagaagggcaatctgtcttactgccattagaatgcaacctgttttacttagcttactgatttcaatgttaatctatttcaagagcaccctcacagaaacacccagaataatgtttgatgaaatatctgggcaccctgtgacccagtcaagttgacacatgacactaaccatcacagtacgcttagggtcttgtcactcggagtgtggcctgtgaaccagcagcatttttatcttctgggagcttgggcacgatctcaggccccacctcctgcttattgattcagaatctgcattttaacaagatccccaggtgatctggatgcaccgtaacatctgagaagcactcaaactatgtgccgcaaacaaacgccaaattcttaggcatttgtgtggcttggagcacatagttggttctttctactgtctaattcattacattttttcagcacattcctgtctataaaatgtttttttgtatgcaccccaatatatgcacatttataagcatatgcatgaacccacgaacaatgattaggtacattatgaagcatacgtaaggacagaaatttcaaaccaagcttgagggtgaaataaatattatttgaaaacctgttgctaattgtgatgacttcatactatcattagttactatctcaatgcataatgtacagtgacgggtgaagtttatcattaataaaaaaaatctggattttaaccatt

SEQ ID NO: 10497 - DNA, 1401 bp, Homo sapiens
cttgaaaagttaacgtagaaaatatccaaaaagcagtatttctagaaagtgtccaaaaagcagtatttctttcccttggttgtgagagtaactaattatataaatattacctcaaaaatacatacactggtatcacacagtctttctacaatgtttctgtattctgaaagctaaatattaagtactatttttccattcaaatattcatttagaatttcctttagaagatggcagtgattataatattaatatgatttcatttgttccagtgtttagacatgaaatcatcttccttgtctcatgaaaacctaaatataaaaaaaaggaaaatactggagtttttatttctcttgtctttgttacatcctctgtttattataattttagcaccaacttcacacctagctaattttttttcatcataaagtggatgaaatgagcaagtacctaaaaattttatttcagacaaaagtcaggagttactgctaaaaaacagacatgtaggagacattcaacaggagtatgaaatgagagttagaccatatgggctgacaacaccataaataacaagaaaagggagtgctgaaataggagagaacagagcaaatgttagctcaaagtatagacttagaaatatcaaagtaagagctatctggataaatatatagatattgagtgcttggaatcctagcctactatgtgaaaattaagtctaatgtcagaataacttacagaaaaatagaaaatgcacagctttaaaatgggcagagttaaaatctattcccagctttatcacttatttagccatgctagcctaggcctctatttccttgtctccaaaatgagaataataaaatttaggtcaggattactatataaactaagataatacagtgattctcaaagttgttcagactgtatagtaaggagaaagtctggttgcactttgaagagcttgaagatttgaaagattcccaaaaaagcattttaaagtttacatttaagggaccttggacctcaaccctctcaagtttacaagtctgaaactttagacatcaaaagtttgagcagtttttccaaggcaacattgatagttagattcagggccaggctgtaagtctagaatttagatatcctgatcccccagataccgctcttctggttatacacagaccagctataatttgctaaacataaaatattgcagtgtattagccagctgtggctccagagtctgtgccctttaccaccgtgcccaactgtttcacatgctgtgtttggtagtttttcctagtgctctccttaataatggtggtgtttagcaaattgtattacataaataaatatttatttcatggattgagttatgttgcatattaaattactttccttcccattgtc

SEQ ID NO: 10498 - DNA, 1742 bp, Homo sapiens
  CDS (97)..(1671)
cccgcctcccgcctcccgcctccctccagctgcgagtgcggcctcggctggcggcggcaccaggccacagttgtaagggatcttgtggctgtcaggatggcagaggagcaggagttcacccagctctgcaagttgcctgcacagccctcacacccacactgcgtgaacaacacctaccgcagcgcacagcactcccaggctctgctccgagggctgctggctctccgggacagcggaatcctcttcgatgttgtgctggtggtggagggcagacacatcgaggcccatcgcatcctgctggctgcgtcctgcgattacttcagaggaatgtttgctgggggattgaaggagatggaacaggaagaggtcctgatccacggtgtgtcctacaatgctatgtgccaaatcctacatttcatatacacctccgagctggagctcagcctgagcaatgtacaagagacactggtggctgcctgccagcttcagatcccagaaattatccatttctgctgtgatttcctcatgtcctgggtggacgaagagaacattctcgatgtctaccggctggcagagctgtttgacttgagccgcctgactgagcaactggacacctatatcctcaaaaactttgtggccttctctcggactgacaagtaccgccagcttccattggagaaggtctactccctcctcagcagcaatcgcctggaggtctcctgcgagaccgaggtatatgagggggcccttctctaccattatagcctggagcaggtgcaggctgaccagatctcgctgcacgagcccccaaagctccttgagacagtgcggtttccgctgatggaagctgaggtcctgcagcggctgcatgacaagctggaccccagccctttgagggacacagtggccagcgccctcatgtaccaccggaacgagagcctacagcccagcctgcagagcccgcaaacggagctgcggtcggacttccagtgcgttgtgggcttcgggggcattcactccacgccgtccactgtcctcagcgaccaggccaagtatctaaaccccttactgggagagtggaagcacttcactgcctccctggccccccgcatgtccaaccagggcatcgcggtgctcaacaacttcgtatacttgattggaggggacaacaatgtccaaggatttcgagcagagtcccgatgctggaggtatgacccacggcacaaccgctggttccagatccagtccctgcagcaggagcacgccgacctgtccgtgtgtgttgtaggcaggtacatctacgctgtggcgggccgtgactaccacaatgacctgaatgctgtggagcgctacgaccctgccaccaactcctgggcatacgtggccccactcaagagggaggtgtatgcccacgcaggcgcgacgctggaggggaagatgtatatcacctgcggccgcagaggggaggattacctgaaagagacacactgctacgatccaggcagcaacacttggcacacactggctgacgggcctgtgcggcgcgcctggcacggcatggcaaccctcctcaacaagctgtatgtgatcgggggcagctggggttggaggatgagagctcctgaggggcagaggagcagagatgcatcagctcgcctgggactggctctgtgataaaaagacccctcccgctgggttttcagaccccatgttgttggtcaatgaaataaagcatcttacag

SEQ ID NO: 10499 - protein, 525 aa, Homo sapiens
MAEEQEFTQLCKLPAQPSHPHCVNNTYRSAQHSQALLRGLLALRDSGILFDVVLVVEGRHIEAHRILLAASCDYFRGMFAGGLKEMEQEEVLIHGVSYNAMCQILHFIYTSELELSLSNVQETLVAACQLQIPEIIHFCCDFLMSWVDEENILDVYRLAELFDLSRLTEQLDTYILKNFVAFSRTDKYRQLPLEKVYSLLSSNRLEVSCETEVYEGALLYHYSLEQVQADQISLHEPPKLLETVRFPLMEAEVLQRLHDKLDPSPLRDTVASALMYHRNESLQPSLQSPQTELRSDFQCVVGFGGIHSTPSTVLSDQAKYLNPLLGEWKHFTASLAPRMSNQGIAVLNNFVYLIGGDNNVQGFRAESRCWRYDPRHNRWFQIQSLQQEHADLSVCVVGRYIYAVAGRDYHNDLNAVERYDPATNSWAYVAPLKREVYAHAGATLEGKMYITCGRRGEDYLKETHCYDPGSNTWHTLADGPVRRAWHGMATLLNKLYVIGGSWGWRMRAPEGQRSRDASARLGLAL

SEQ ID NO: 10500 - DNA, 1966 bp, Homo sapiens
  CDS (192)..(935)
agtctgggtctggagcctgagccctgcggaacctcggcgcccggccccaccccgcccgtacctgcacttatttattgttgttatttcttaccgcggagccccgcagtcgggtcctcccgcccgctcccgcgcagcgctagcattctccagtccctcagtcccttcccgcgcggtgcgccgcagccgaggcgatgcgccacattcagaacatgtgcaccatcgccgagtaccccgcgccgggcaacgccgcggcctccgactgctgtgtgggcgccgccggccgccgcctggtcaagatcgccgtggtgggcgccagcggcgtgggcaagaccgcactgttggtccggttcctcaccaaacgattcatcggtgactatgaaagaaatgcaggtaatctctatactagacaagtccagatagaaggtgaaaccctggctcttcaggttcaagacactccaggtattcaggtccatgagaacagcctgagctgcagtgaacagctgaataggtgcattcgctgggcagatgctgtggtgatcgttttctccatcactgactacaagagctatgaactcatcagccagctccaccagcacgtgcagcagctacacctgggcacccggctgcctgtggtggtcgtggccaacaaagctgacctgttgcacatcaaacaggttgaccctcagcttggactgcagctagccagcatgctaggctgctcattctatgaagtgtctgtcagtgaaaattataatgatgtctacagcgccttccacgtcctctgtaaagaggtcagtcacaaacagcagcctagcagtacacccgagaagcgaagaacctccctcattcccaggcccaagtcacccaacatgcaggacctgaagaggaggtttaagcaagccctctctgccaaagtgaggactgtcacctccgtctgaagcaggaggagcactcaagggggtttggtcttcccaggaagagggcctgaggttctcctagtgcaggaacgttgaatattggcaatgattcctggttccagaaagggctggagcagaagggctaagagggcctgtggaactgctacagaaaaggaagtgttgttctgagcagggggacaggattgatgaggcttgaaagagcccactgagccactctctgaatatgtgaaatgtactctgtgtcttttcctttagagtggggagggggcataatcgtttcggtttctgcattcaactaccttgtaaatggtggtccgttgcagtttcaccaaatgtattgatgtgatttacagtgggaatgaaagaacagattaagcattgataggctttcttttttcccccttttttcttttttctcttttcttctttcttttcctctttttccccaagaggaagaattgcttttctcttatcagtatgatttgtaactctggaacactattcttacagaatgcctttctaacctgaaggatacccagatttctttctttatgtacaagatggaaaatcccctacccctcaaaaacaggttgagtttatgggccagaatattctgtataccagacattggtaagctcgcatggtttacaggaaggctctggttccccctcacaggatgagcatgctcagttgggcgtgtgtggaggagctgtgaacttcacgctcttcaaccccagactttgactgtatagttttttgtttttttaactgttccatcaggaaaaaaatgtgtcagttgattttggtgtgacttgtgtaaatggttcatggcaatgacgttgggttgcttcctaggcctggctgagttgtgcctaagggtggctgaaatactaaaacactatcttacagcaagtgaacaggggctacctgccacatcccctccacagatgcactttaaaaagccactcaagctttggcttaaactgtaattaatttattttatgtacaataaatcgcatttgaaaaag

SEQ ID NO: 10501 - protein, 248 aa, Homo sapiens [sequence omitted]

SEQ ID NO: 10502 - DNA, 1619 bp, Homo sapiens
aattataatggatttgaaatttgccctaaccaagagtcacagacagaaaaaaggaagttaatgtatctcttgatcactgtcaagatgtggtattgaaccttcaagatccttttcagggaatatgtgagatcaaaatttttatactggcactatgatgttatttgccttttcctcatattcacaagtgaacagtggagttttacagaagctatataatgtcatgacatcactgatgggtaatagaatgtgtgcttgtatattccgaaactttcagttccaatttcttcgatcaatgtaatcctcataagtaaaagttatttgaggacctcagacatttttaaaaatgtaaagggggtggggtcaggctcagtggctcatgcctgtaatcccagcattttggaaggccgaggcgaacggatcacttgaggccaggagtttgaaactagtctggtcaacatggtgaaaccccgtctccactaaaacaaaaagttttctggatgtggtggcacacatacctgtaatcccagctactttggtggctgaggcatgagaatcacttgaacccagaagacaggttgcagtgagccaagattgtgcccctgcattctagcctgggtgacagtgagactgtctcaaaaaataaaggtgtacagggattgtatatttgacaacttggtatgtaggatgtgctacctctaatgttccatgctgttacttagttttcactcactactatattttggagatttgttcatattgctctgtgtacatttaattcttcagtgtgtatccaccacatttaacttattcacttacagaactatgcaagaatttctctggtaaatttcactaagtacttatgtacttttcagaacgattgtgagtttacacccctaccagcaggactgagttgagtacccatttcctcacatccttgccagtacttcatttgcctaatttttgccattctcataatgtggcaattgttcaattttgcatttcttccattttatttttttgcatctctgcttttcttttggttagctttgccagttctgcctattatattaatctcccagaatcagcttttagttttgttaaatctctgacatgtttcgttgattcctgctttcatcttaaacatttcttcgttgttaatttgtgtttgctataaaataagcaacatcttaaatgcttgatttgctttcgatgtttattctgtaataagatatttaaagatataattttttccctaaatgctttattagacttttctcataagttttgactggtactgttttcattgttatttaattttgtgtcttttaacttctttcatgatttccttttaactgaaggttttcttagatatttagtttgctggtatattcttttaaaattgtatcattgctttctttctatattggattattgtcagagaacatgatttgcatgatattaactttttggagtatattgttgcatctttgtggcctagtacatagttaatttagtgaatgcttccagttgtacttgaaaagaatgtatattttctgattattgagggtaaatttctctatatatgttttcctgtttaataaatatgtagctatgtgctt

SEQ ID NO: 10503 - DNA, 1898 bp, Homo sapiens
atgacaggttcctgggccgcgccgcctcgccctgcctgggcggggttgggacctttctggcacctgcgtcgaagccggcggcaggatggactttgttgtcccggtcccagaccaccctcctccaccgtcgcctcccactgcaaaaaggcctggataaggaacctaattcgagctacccttctctgtgaagctcgacggctgagaacgtcagggcttgttcccaagtctctttccagaggccaggctttatgggagcatgggttaccagcgacgcaccctgatcaagcagagaaagagaggctggagaaggaagagtgacagaagtaagaagagagtgtctctccacttccactccagccccctacagctcatcctccagcaggcagccaagggcacttttaggatctcacatcaggtccttgcctcacattctgcactggcttcccaagtaattaaagtaaaatccaaattccagctcacagcttagaaaactcagcaggactggcctctgtcctatcccacaccccacctcagtccctcaagctcatctcctgtcattcctgcccatttctggaccccagccactcctcaaacagggtgaggatgcagtgtccaaggcaccatcttgaactcatcatcgccaaatatgtgagcaccttgatgttggacttcccaacctccagaccgtaaggcagtacatttctttgtaaattacgcagtctcagctattctgttacagcagcacaaatggactaagacaacccccgagataggaaggggtaaggtaaatgcaatgagagttggggttttcgatcttagtccagtaaaggagctggaactgttctgtataaacaaagggcaaggtaattgctacatagattcttttcttattattgctgattcttatcctaaaataaaggacattgccactacacatcctctagaatgaccaaaaataaaaatacagcatcaaatgggacgacatggtgccaactggaattctcataccctgctgatgggagtataatgtggtacagtcactttggaaaaaagtttgacaatttcttataaaattatacataaacctgtactatgacctagagattctactcctgtttgttcaaaagaaaggcaaacatctgtccactaaaagatatgtacaagaatgctcacagtggcattatttatgacggtccaaaccaggagataatccaaatgtctgtaaccaagagaatggataaagaaattttgatacgtcaatttaatggattactacttagcaataaaaataattagccatgctgggcgcggtggcttatgcctgtaatcccagcactttgggaggctgaggcaggtggatcacctgaggttgggagttcaagaccagcctgaccaacatggagaacccccgtctctactaaaatacaaaattagccggggtggtggcgcatgcctgtaatcccagctactcgggaggctgaggcaggagaatcacttgaacccgggaggtggaggttgcattgagccgagattgcgccattgcactccagcatgggcaaaaagagcaaaactccgtctcaaaaaaaataaataaataataattagccacatatccacacaacaatattgcattatcacaggtatagtgataaatactgtatgattccatttatatgaagttcaagaacaggcaagtaatccatgatgaaagaagtacttacctctgggggtggcagcattgactaaagaggtacaagggagtcttctggggcctggaaatgttctatatcttgatctgggtggtggttacacaggtatacgcgtgttaagaaatcatcaggctgtatacttagtgtactgtaatggcattacactgtctttcaattaaaatgtgaaag

SEQ ID NO: 10504 - DNA, 1541 bp, Homo sapiens
aaaaaaaaatagatgctgcgtccagcgttaccgtggctgtaccttggcctctgcagcctcctggtgggggaggcagaggccccgagccccgtggatccgctggagcggagccggccgtacgcggtgctgcgagggcagaacctggagtccctgtcgcccaggctggagtgcaatggtgcgatctcggctcgctgcaacctccgcgtctggggttcaagcgattctcctgcctcagccccctgagtagctgggattacagtgttgatgggaaccattttcggcatcctgctggtgactgtcatccttatggcattttgtgtctacaagcccattcggcgtcggtgacagccagacaagttcttcaatgagtatttgggaataggataagttgtgttgcacacaggccagtggagaagttggaaccaaaactttcctacttggaaatgacctttggtctggacagttggtaaatgctaaatgaagtagaagaaaacatgtactagacattattttttcctaacactgtagcgcaaataattggcccctgagtccgcttctcagtgtttctgactgtacttgttaaaagtaagacctgaaagctccaaaggtcagtgtaaagatggagtgttcatgagaaagaaaacatggtaaccttgtgagtgcctgtaagaaccacactgtaaagaactcatcattaatgcttgaaaatgttattaagaaggagacttaccatgcagacattccctatttaagaaccatttggttacagtgggttaagaatcacagatttttttttttaatctcacctgagttagcctagaatgcgctggttgcaaagtggtgtcagctgtggggatcttgggccctcgttcctcacctgcatcctgccctgcactcaggtgctccccctgaagtcagggtcacatcaggtagacctgttactatatgcacctttggcctggaatgctctgaagttggactggaaatgttactaggttggcctgttacaaaaaggaccccatcctgcttaaacacattgatctcccttgccctgcatttgagtctttctagcccacggtctgaaacttgaggcagctttccagatttggaatgtaaaaggctcagtgggcactctgttcatccctgggtggggagggcccagccaacagaaatgcatgtccactgtgcgggccagtgtgtgtttacacaaatttcatctcagctttgaaaatgctgctattagtttccactgttggtgaactggattttttcctcctattgaaatgatactttcatacttataaagctgtcgtcaatatttatttcaaggtgctagatttaattttgttattaaattgaaatgcttatcttgtgttcaagcacagcactgattttaacaacctgcatttaatgtgaagtaaccgaagtaggatactgtaactgtgtaaggattttgtttgtaatcttgtaacattgaaccattgaaatgttcagttctttgcttttgagcaaaacgtcaattaaaactaaagtaaaatcct

SEQ ID NO: 10505 - DNA, 1978 bp, Homo sapiens
  CDS (85)..(354)
gtgcctgatggggccgttgggcggccggtagctgttgctgttgggggaccccctcattcctgccgctgccgtccctgctgcctcatggcggccatcggagttcacctgggctgcacctcagcctgtgtggccgtctataaggatggccgggctggtgtggttgcaaatgatgccggtgaccgagttactccagctgttgttgcttactcagaaaatgaagagattgttggattggcagcaaaacaaagtagaataagaaatatttcaaatacagtaatgaaagtaaagcagatcctgggcagaagccagaaatgcggtccttggacctggcttctcagcttctccgaaatcagatagtgactgacccagacaacttaatggaggatgctgcttgggccaagcactgtgatcagaacttagtggcctctgacgccccaggggaagagggaaccggcattctaaaatcaaaaaggactcaggcagctgatcatcagcctatcttgaaaacagttaaggcatcagatgaggattgtcagctaagaatcagtgaccggatacgagaaaccagtgaccttgaggactcctgggatgaatcctcgggtgcagggtgctctcaagggacccccagctacagcagctcccacagccttttcagaggtgcagttgctccctgtcagagcagccccatggccagactgggtgtgtccggggagcccagcccctgcaccagcaccaaccgcagcactcctggggtagcctccacaccgcagactccagtctcctcttcgagagctggttttgtttctggtggggataggcccttgaccagtgagccccctccaaggtgggcaaggcgaagaaggcggtcagtggccaggactatcgcagccgagttggcagaaaacaggcgattggcacgagaactctcaaagcgggaggaagaaaaactggacaggctgattgctattggtgaggaggccagtgctcagcaagatactgccaatgagctccgcagggatgctgtcatcgcagtcagacgtttggcaacagcagtggaagaggcaactggtgcttttcagctaggccttgaaaaattgcttcagaggttgatttcgaataccaaaagctaggaaccaattacaaaaggctctgcttcctaaactggtagaagtctagttcccaaacctgccttctgaatccctggctccttttctgtgtcctcagaaaaaaacatggatgaaccatttatatccagatagtatgaaaataattgctagttcattttcccaagattctccaccaaatggaagacctttcagaaatgccaggggtgacctaatagaaaacgatggagccacgttctagacagctggttcatcctagctttgtcacagatgtgaagcagtttacctccctccagtggtttcctcatccgtaaaatggggatcaataataactcctgccctgcctacctcacagggttgttgtgaggatcacgtagttcatagatgtgaaggggtttaaaagtttaaaagcactgtacacatttaagttattaattcatatggccttggctgaggtaaggcagattggtttacaagatacagaagtatggatatatactgtgacttcattgcttgaatctttcctttgctggtctaacttgactgcttcatggagtttgaaatcttaatttttaaaatccctgtgtggctcattagacgactataagcacaacctgtatttgtaccttaatctcttacatttccactgctgtgtatctgacatatctactagtaagcactgttttgtcaaaccgtctttctctccttcattttactggttcttagtctcctatcaatataaggaaataagaagtgccagggagccgccattgtgtgttacggtttatatcgataatcttcaatataaaatactggccattttataaaatattaaatatatgtaaattctttgc

SEQ ID NO: 10506 - protein, 90 aa, Homo sapiens
MAAIGVHLGCTSACVAVYKDGRAGVVANDAGDRVTPAVVAYSENEEIVGLAAKQSRIRNISNTVMKVKQILGRSQKCGPWTWLLSFSEIR

SEQ ID NO: 10507 - DNA, 1457 bp, Homo sapiens
aagagatgacaaggtaacatggacgtttaggctccaggaaactttaagacaaattaacgtaaaaatggtttctgggctggtaatacccttggtgtttctgttaaaaacatgaagaacggctgggcgtggtggctcacgtctgtaatcccagcactttgggaggccgaggcgggtggatcacctaaggtcgagagttcgagaccagcttgaccaacctggagaaaccccatctctacttaaaaaattaaggcatcctacatgcctgtaatcccagctactcagaaggctgaggcaggagaatcgcttgaacctgggaggcggaggttgtggtgagccgagattgcgccattgcactccagcctggggaacaagagaaactctatctcaaaaaaaaaaaaaaaaaaaaaacctgaaaaacattttctggaggaaatttcatggtttagatcacaaggaatttcagataaagcaagccttgcaaaagatatgttcatagtaaattgcagagctttaggaaacatttcactgaaatgagagtcaatgacaaataggattagagcctctaacaggttatctgagagaatatttttatgtttaaaattgttaaaataaacctaaaggaaggaatcaaccctaagatcaaggttggccgggtgcggtggctcatgcctgtaatcccagccctttgggatcctgaagcaggtggatcacctgaggtcagaagttcgagaccagcctggccaccatggcgaaaccccatctctactaaaagtataaaaattgccaggtgaggtggcgggaacctgtaatcccagatccttgtgaggctgaggcaccagaattggttgaagctaggaggcagaggttgcagtttgagacactgcactccagcttgggtgacagagcaagactctgtctcaaaaaaaaaaaaaaaaaaaaaaagatcaaggtgttaataaaacaagccacatagatttgaaaaagaatcaagtaaaacgtttagaattaattaggaaaagtgaataagttggaatagcagacctagcagaagaaagaattacagatatgatggatgtgacttatctcacagatgtggaaggtagatgtgatcttccagcattcaattcagggggataagatatgaaaatgaaaggtttcaggcatggtggctcatgcctataatcccagcactttaagaggctgaggtgggtagatcgcgtgagctcaggagtttgaaaacagcctgggcaacgtgatgaaactcccgtctctacaaaatacagaaaagatcagctgaatgtggcggtatgcatgtgtagtcccagctactcgggaggttgaagtgggaggattgcttgagcccaggaaatcgaggctacagtgagctgtgattgtcctacagcacttcagccttggcaacagagcgagaccctgtccccccccccccgcaaaaaaag

SEQ ID NO: 10508 - DNA, 1502 bp, Homo sapiens
  CDS (42)..(1502)
cagaaaagcaaaaaccagaggtcaagaaaagcagtccagagatggaggatgctcgcgtgctttcaaaaaagcagcctgacgtgtcctctagagaggtcattctgctgagggaaggagaggctgaaagaaagcctgtgaggaaagaaattcttaaaagagaatctaaaaaaatcaaactggacagacttaatactgttgccagccccaaagactgtcaggagcttgccagtatttctgttgggtctggctcaaggcccagctcagacctacaagcaagactgggagaaccagcaggtgaatctgtggaaaatcaagaagtccaatcaaaaaagcccattccctcaaaaccacagctcaaacagctgcaggtattagatgatcaaggaccagagagagaagacgttaggaaaaactattgcagtcttcgtgatgaaacacctgaacgtaaatcaggccaagagaaatcacattcagtaaatactgaagaaaaaattggcattgacatcgatcacacgcagagttaccgaaaacaaatggaacagagtcgtaggaaacagcagatggaaatggaaatagccaagtctgagaagtttggcagtcctaaaaaagatgtagatgaatatgaaagacgtagcctcgttcacgaggtaggcaaaccccctcaagatgtcactgatgactctcctcctagcaaaaagaaaaggatggatcatgtcgattttgatatctgcaccaagcgagaacggaattacagaagttcacgccaaatcagcgaagattctgaaaggactggtggttctcccagtgtccgacatggttccttccatgaagatgaggatcccataggctcccctaggctactgtcagtaaaagggtctcctaaagtagatgaaaaagtcctcccctattctaacataacagtcagggaagagtctttaaaatttaatccttatgattctagcaggagagaacagatggcagatatggccaaaataaaactatctgtcttgaattctgaagatgaactaaatcgttgggactctcagatgaaacaggatgctggcagatttgatgtgagtttcccaaacagcataattaagagagatagccttcgaaaaaggtctgtacgagatctggaacctggtgaggtgccttctgattctgacgaagatggtgaacacaaatcccactcacccagagcctctgcattatatgaaagttctcgattgtcttttttattgagggacagagaagacaagctacgtgagcgagatgaaagactctctagttctttagaaaggaacaaattttactcttttgcattggataagacaatcacaccagacactaaagctttgcttgaaagagctaaatccctctcttcatctcgtgaagaaaattggtcttttcttgattgggactcccgatttgcaaattttcgaaacaacaaagataaagaaaaggttgactctgctccaagacctattccatcctggtacatg

SEQ ID NO: 10509 - protein, 487 aa, Homo sapiens
MEDARVLSKKQPDVSSREVILLREGEAERKPVRKEILKRESKKIKLDRLNTVASPKDCQELASISVGSGSRPSSDLQARLGEPAGESVENQEVQSKKPIPSKPQLKQLQVLDDQGPEREDVRKNYCSLRDETPERKSGQEKSHSVNTEEKIGIDIDHTQSYRKQMEQSRRKQQMEMEIAKSEKFGSPKKDVDEYERRSLVHEVGKPPQDVTDDSPPSKKKRMDHVDFDICTKRERNYRSSRQISEDSERTGGSPSVRHGSFHEDEDPIGSPRLLSVKGSPKVDEKVLPYSNITVREESLKFNPYDSSRREQMADMAKIKLSVLNSEDELNRWDSQMKQDAGRFDVSFPNSIIKRDSLRKRSVRDLEPGEVPSDSDEDGEHKSHSPRASALYESSRLSFLLRDREDKLRERDERLSSSLERNKFYSFALDKTITPDTKALLERAKSLSSSREENWSFLDWDSRFANFRNNKDKEKVDSAPRPIPSWYM

SEQ ID NO: 10510 - DNA, 1705 bp, Homo sapiens
aaattttaggagattctttgaataaacctcatttagtctctctcctataaaaggaaaagcagaacctcaagtccacatttattttgcatttgctctcttgttcacattcttctctatgtcaataaaagttagatggcattttttatagctgtgtatcaaatatgtgaatatagaattccaactaaaatagcaatagatgggaaaactttctagttcattcattgtcaaaagtgagtgctgagaggacatctgaagccccacctaaaagtaaatcctcagcaggaaagataatgcagataaattttgggtccaaattcttaatctgggcaaagaaagaaaacaaacacacttactagatggatttttcataaaagttcctttccatgctgtccaaagtgattaaattagtcatccattcttttatctcttctgttgataatcatataagcaactcctgaatctatatgagtattcagtcttctttattattcagaagatttgccattttagtcaactcaaatatcagtactatttcatagcatgctagttcaggttacacaaagcccaccaggtacacctggaatctagccagaatgcagtccaatcatgagcactttaaacatttacctcattttactatttgtcttagagctatggaaacattattctgtttctggagtatctcacacttcaggagcattagttgaagcagtacagatacagttagtgtcctctctggacattcatttgttaactttgaaacaactggattcaaagaccttaagttaaaaacaaacttattgcctatttatggaagaaaaacctgttattttattctggtttaaaagttaaaagcgttgcctctaccactggataacctgtttgcacaattaaatgatttccggagttaaaacattatgattataaattttctctgaataagttgataggagattattcctgttcttataatgaggtttttcccttagcacttttcaagtgtgcctttcaaccaatgatatgtttttaaaaaataatgtaacttaagtaccttatgattaaccatcatggagtctagaaaatgtggagattctaaaacagtattgtctgaaaacatagaatagttggacttaatgttctcttcagaaaatctaactgtaaacttggtactttcctacagttcacttgtgaaaaataatatctatgaagatggagagattcctaaaggaattccactattttaccatagagcccaaagtttccttgacccaagcaagaccatcaaggagctatctggattgtatgatactggacctcagtagaactacttttactgaattgctggagccaaaactaggctgcagcaagagaaggcaattagggtacaaaatctaaggaagctgtcattctgaggatcatatgatagatgctgggttaagacatatggctgggcatggtggctcatgcctgtaatcccagccctttgagaggccaaggcaggtggatcacttgaggtcaggagttcaagaccagcctgggcaacatggtgaaaccccacatctactaaaaatacaaaaacagctgggcgtggtggcatggacctctaatcccagttacttaggaggctgaggcaggagaatagcttgaacccaggaggtggacgttgcagtgagccgagatcatgccactcgactccagcgtgggc

SEQ ID NO: 10511 - DNA, 1957 bp, Homo sapiens
atttgacatgctgcttcctttctgatgggctctaacttcagcttttcggtctcattcagagtagagaaattaacagattttactggcgggtgttttcagattaagaaactcaaagggcagctggaggagagacagaagattggcaaactagacaatcttcgatctgaagatgatgtcttggaaaacgggacagacatgcatgtaatggacctacaaagtaaatgtcaattcttgtgtagaagtaaatgctttcacatgtgctgttttagtatacttgtgctggcagagaaaactgtcacggcaaagaatgccctcattccctcacatccccacaaaagcccttaaaaataaaagcacaaggaggggtaggtagacagaacaatggtgtttctctctgagcctatgaaatagaacaggtacccaaaaacgtgcaccaagataccaccacatgttgtgccgatggaaaccacatttactttgctggatacagcaatctttcgatctgttgattgtatgaaaaaaaaaaaaatgaaaggcttttttcatgctaataaactagaaacagtcttaagggagataaaattatgcccagtctctctccgcccttttccctaccccctaccatctctttgtcttcttcactcataggcactctcttgcctgaggtttcctgccccaagcacaggggcggaaggcactttccctgggttcatggggagagagtgccttctcctactctcagctctgggaggttgtggaggcagggccagaactaacagatttgtgagatgattacaaagtaagggcttggttcccagtaactattgttttaatatttgaaaagcccaagagcttaacagattttccttctctttcaacctttaggggatgccaacagacagatcagcgacctcaaatttaaacttgcaaaatctgagcaagagataactgcattagaacaaaatgtaataaggttagagagtcaagtatcacgttacaaatcagcggctgaaaatgcagaaaaaatagaagatgaacttaaggcagaaaaacggaaactccaaagagagctccgctctgcattggataaaacagaagagctcgaggtgagcaacggccacttagtgaagcgtctggaaaaaatgaaagcaaatcggagtgcactcttgtcccagcagtaaattccagctctgatcaggcaactggttggtgactggagagcattgtttcataggcttttctctgtcctgtctgggagcgctgcttcttcccctgccttctgagagacgaagaccgtggcgagcttggcgtttaggggctcccgtgccatggctcaccccagggagccccagcagccaccaggtgcctctgtctgcagacccctggcccgggctggcgccgacgctcagaacctgcaggtacttcataagcacacaggggcctcgagggagctctgtgtctgaccgcacagcagcctctgaatgccgctggaagtgatgatcaaagtaaagattcagttgggacttgagtttttttttttttcatgtgtcttgctgaagattaaggggaaatgttacagtgttgggacttcctttcatggcagaatctacaatttgagcgacttcagtagtatctcttagtctacgcttttcatacacaaaacactgtggaaccacaagccattaccaagcaaaactctttcactggaaacaagggggcagtctagaagtaaaagtgaccttaagaagactctttacaggcaacaaatgaagcttttctaagggatttttgcatcagttcagtcataagaatacttttttccagggtaattaggcaatagcttcactgaaaatgacagcttttcattgcattatttaatccttatatttggaattgaagtcgttaacttcttttaaagaatgtactattagaaaaattaaaaatgaaatgttgagag

SEQ ID NO: 10512 - DNA, 1691 bp, Homo sapiens
  CDS (136)..(558)
gtgccagagggccacgaccaggtgtcctgccaagcccacgtgaatgagctgatcaaaaccatcatcatccagcatgagaacatcttcccaagccccagggagctggagggccctgtctacagcagaggaggaagcatggaggattactgtgatagccctcatggagagactacctcggttgaagactcaacccaggatgtgaccgcagagcaccacacgagcgatgacgaatgtgagcccatcgaggccattgccaagtttgactacgtgggccggacagcccgagagctgtcctttaagaagggagcatccctgctgctttaccagcgggcttccgacgactggtgggaaggccggcacaatggcatcgacggactcatcccccatcagtacatcgtggtccaagacaccgaggacggtgtcgtggagaggtccagccccaagtctgagattgaggtcatttctgagccacctgaagaaaaggtgacagccagagcgggggccagctgtcccagtgggggtcatgtagccgatatttatcttgcaaacatcaacaagtaagctctgcttttcattttctgctcccctgaatgacttgcaacacccagcctcaccctctggcctaacccccatctccattcctgtgctgcacgtagggctcccagctcccccagcctaacagtttgcatgtggtcattgctgctgcaaggcggacagggctgaggatgctgctacaagcctcggggcaggtccaggtctccagctagctgccctcgtgctgtggaagggtgctttactgtgtgttcccgcagtgtctgtccacccagacctttgtggcagtcttacagctaaaactttgaccaaagctttggtcactttatgcaacctggttttgtactgtttctcagaggtgccttcttttttccaatccatactcaaataatagtctttgatgtctgtcttccttgacccgtgttcgtgcaaagattcagagtctgtgtgtggcttctactaggctgatgttacaccaggtgggtttattgagatatcatgtgtctgttcctccccctgtcctgcattcactcctgtggaggaaaggaggccacgatgtccctaaggaaagctttgtcctgagctcttcattcattggctaacccctagctcccttttcttctgccctttcacaccaggagaaataattttccattttgttcctattgctttggccttttgtattattctacccccttagtccctttgcagatccccactcctgctcagcaggctcttacctctgacccccagctttcattgtggctgttagcaacatcctggggtttaaaccccacccacgcccgatctggctgtctagagggattctacgcctgcgtgctgccgcctccccaagaggcattcaggttattggagaactaatctcatctcaaggggccagacaccaagtcccaaagcctacagacctctttccgccaggccctgaaacctggccccgtgccagcaggatgacaagccccagggcgctcctgatgaatatggattggagatgatgtacagtttttattcccctctggcttttgaggaatgaaatgatttgcactttgaaaacctgttaaccgtagcctctggacactgagactggaaggagaataaaggatgcttgttgtttttaaact

SEQ ID NO: 10513 - protein, 141 aa, Homo sapiens
MEDYCDSPHGETTSVEDSTQDVTAEHHTSDDECEPIEAIAKFDYVGRTARELSFKKGASLLLYQRASDDWWEGRHNGIDGLIPHQYIVVQDTEDGVVERSSPKSEIEVISEPPEEKVTARAGASCPSGGHVADIYLANINK

SEQ ID NO: 10514 - DNA, 1672 bp, Homo sapiens
  CDS (31)..(474)
gagtgttcgggacgcgggcctgcaggcgccatggtcttcctcaccgcgcagctctggctgcggaatcgcgtcaccgaccgctactttcggatccaggaggtgctgaagcacgccaggcacttctggggaaggaaaaatcgctgctacaggttggcggtcagaaccgtgattcgagcctttgtgaaatgcaccaaagcccgatacctgaagaaaaagaacatgaggaccgtaagcgtggacccgggacacccgccggccagcgcactcgcggcccctgcgtttctgcgccgcgacccagctagtgtgcagccgcccggccaccctcagccccttcctttcataccttgcttcgaaactccgacaaattatgtcgccccgcaggcaaactgtgggacatccgttctcccgccccgccgccacccccactgtcaccccctgctccagcccctcgcccgggccactgcagagccgccttgacactctccctgcgtcgccagccaccgccctagtcgctgctgctctcatccctccggtggcttcccttccctttggcagctgaagtcaacccagccccttgccaaccctccagggctactatctgctgccgtggtgctcctcgaagagaccacgcctgctgccaagctctgcccacccggaaccccccgcatttctgggaggctggcgcctccactctgtccacgtgccgcctcattactgcgcctcaccactcccgtctcagcctcatgaacctagcatctaacgtaccccggtttttttttcttaccccgagacggagtctcgcgctgtcacccaggctggagtgcaatggcgcgatctaggcttaatgcaacctcgtctcccgggttcaagcgattttcccgccccagtctcccgagtaactgtgactgcaggtgtgcgccaccaagctattttttgtatttttagtagagaccgggttccgccatgttggtcaggctggtctcgaactccagatctgaaatgatctgcctgccttgccctcccaaagtgctgggattacaggcgtgagacaccgtgcccagctgggtttttgctgtttttaattttgaaacagggtcttgatttcgcttaggccagagtgatggcaccatcatagctcactgattttgctatttacttttagaaaaatattctttagatcaattagaggctttgctgggacataacatccagaagtcatttttaagtatcttcatgttttcttatttcagctctggattaatcgaattacagctgctagccaggaacatggactgaagtatccagcgctcattgggaatttagttaagtgccaggtggagctcaacaggaaagtcctagcggatctggccatctacgagccaaagactttcaaatctttggctgccttggccagtaggaggcgacacgaaggatttgctgctgccttgggggatgggaaggaacctgaaggcattttttccagagtggtgcagtaccactgaggactgttgctgtattgattaggaaaagagacagagtaatttgcagtttgtttgatttatacttttgtttatctacaacccaataacagacatgagggatggccctgtctctctgggacagagcctcaaagatgatgtccatgttttgtgtgaatgaaactcaaacactc

SEQ ID NO: 10515 - protein, 148 aa, Homo sapiens
MVFLTAQLWLRNRVTDRYFRIQEVLKHARHFWGRKNRCYRLAVRTVIRAFVKCTKARYLKKKNMRTVSVDPGHPPASALAAPAFLRRDPASVQPPGHPQPLPFIPCFETPTNYVAPQANCGTSVLPPRRHPHCHPLLQPLARATAEPP

SEQ ID NO: 10516 - DNA, 1601 bp, Homo sapiens
ggaaacatgcagcatgtagtaatttatgacagcttctttcacttagcatgaggttttcaaagttcattgatgtggtagcatttgtcagtactctgtgcctttttatggctgaataatattttatcatatggatttaccacattttatcattttatttatccatcatcagttgattgacatttgagttgcttctactttttgagtattatcaataattctgttatgaacattcttgtacaattttttggtagacatttatcttcatatttcttggatatatacctaggagcagaattgctgcgtcagatggtaatgctgtttaaccttttcaggaactgtcagactgttctgaagtgggtacattattttacattccaaccagcagtgtatgagaattccagtttccccacatcctcatcaacagttgttattgtctgtcttttttattatattcatctgtaatgtgaagtgtttatctcattgtggttttgatttacatttccctgatggttgatgattttcaacatcttttcatatacttattagtcattatgtatcttctttggagaatgtctgttcagatcctttacctactttataattggtttatctttttaatattgaactgtaatagtttttaaaaaatatatcctaaatacaagtctcttatcagataatatgatttgcagatattttctgtcattctatgtactgtcttttcacattcttgatgatagacttttcagcccaaatgtttttaacttgatggaatacaatttattttttcttttgttgcttgtgctttcagtcatatttgtgaaaactttgcttatcccacattacaaagatttactatttctaagtgatttataattttaccacctacctttaggtctctgatccattttgagttaatttttatgtgcgaggagggagtctaacttgattcttttacatgtggatatttagttgtcccaggaccatttgttgaattaagtgcccagaacaagtacatctatatatagagaaagtagattagtggttgtcagagactgtaagaagtggggaattggagagtgactgcccataggtacaggcatgctttttggcattatgaaaatattctggaattaggtagtggtgatggttgcagaacttttggaatatggtaaaagacactgaaatatatgcttaaaaatggtgatttttgtgatatatgaattatactatagaactaataataacagtaataaagcaaggtgtctttccacatctccatgccttgtattttcattaaaaaaaaaaaaaaaaaagcatttcagggccaggctcagtggtttactcttgtaatcccagcacttttggaggcctaggtgggaggatcacttgaggccagaagttcaaaaccagcctgagcaacatagcaagaccttgtctccatgaaaaataaaaaattagccagaaatggtgatgtgtgcctagagttccaactacttggaaagctgaggcaagaggatcgcttgagcctaggagttcaaggttgcagtgatctataatcaccactgcactccagcctgggtgacagaacaagaccctgtctc

SEQ ID NO: 10517 - DNA, 1770 bp, Homo sapiens
  CDS (54)..(1181)
agctggcccgcttgaggcgtagggggtggcgctctccgttcggcggcgctcccatggcgcacattaccattaaccagtacctgcagcaggtgtacgaagccatcgacagcagagatggagcatcttgtgcagagttggtgtcttttaaacatcctcatgttgcaaacccacgacttcaaatggcctctccagaggagaagtgtcaacaagtcttggaacccccttatgatgaaatgtttgcagctcatttaaggtgcacttatgcagtggggaatcatgacttcatagaggcatacaagtgccagaccgtgttagtccaatcattcttgcgagtgtttgccaataatgcagatcaacagttggtaaagaaaggaaaaagcaaagttggggacatgttggaaaaggcagcagagttaatgatgagctgtttccgggtctgtgccagcgacacccgtgctggtatagaggactctaagaagtggggcatgctgtttctggtgaaccagctgtttaaaatctacttcaagatcaacaaactccatttatgtaaacccctaattagagcaattgacagctcaaacctgaaagacgattacagcactgcacagagagtaacatacaaatactacgttggacgcaaggctatgtttgacagcgattttaagcaagctgaggagtacctgtcatttgcctttgagcattgtcaccgttctagtcagaagaacaaaaggatgattctgatctatttgcttccagtaaaaatgctattgggtcacatgcccactgtggagctcctgaaaaagtatcacctgatgcagtttgcggaagtaaccagagctgtgagcgagggcaacctgctgctgctgcacgaggcgctggcgaagcacgaggccttcttcattcgctgcggaatcttcctcatcctggagaagctgaagatcatcacctacaggaacctctttaagaaagtgtatttgttactgaaaacacaccagctgtctctggatgcttttctggttgccttgaagttcatgcaggtggaggacgtggacattgacgaagttcagtgtattctggctaacttgatatacatgggacacgtcaaaggctacatatcgcatcagcatcagaagctggtggtcagcaagcagaacccatttcctcccctgtccacggtgtgttgaaagtacacggagccccgaggacgggtgagcagttgtttctttccactttggttgtgctgatgagaccggtccggtactgcaacaaggctccctgaagccggaactcttggaggcgcttttcccagggatgctgaggctgagattttcagcacacccgagttaatctccttcatttgtaactaatttcaacctgatgaaaacctggaattcctttttcacagactcggctggttctggagtctttgtgagacttctttgaaggaggctttgcgtgaaggctgctcggctcacttttcctaagtgtggttcctgaaggctgtctttgtaactttttgtagttctttgtgtaaaaagcgtattctgaatttatacacatggcatgttcttcattatatcttccaggatacatctatttttatatattaaatttgaatgtgttatcaaaatgcttggttaacttaaggcacctttttaaaagcagaatttaatttgatttaaattttccagattttatagcttgcctgtatggatgctcctcaatttatgatggggttacatcccaataaacttattttatttgcctttg

SEQ ID NO: 10518 - protein, 376 aa, Homo sapiens [sequence omitted]

SEQ ID NO: 10519 - DNA, 2005 bp, Homo sapiens
  CDS (44)..(1393)
aaaaagagccgagtgggacaaagcctggggctgggcgggggccatggcgctgccatcccgaatcctgctttggaaacttgtgcttctgcagagctctgctgttctcctgcactcagggtcctcggtacccgccgctgctggcagctccgtggtgtccgagtccgcggtgagctgggaggcgggcgcccgggcggtgctgcgctgccagagcccgcgcatggtgtggacccaggaccggctgcacgaccgccagcgcgtgctccactgggacctgcgcggccccgggggtggccccgcgcggcgcctgctggacttgtactcggcgggcgagcagcgcgtgtacgaggcgcgggaccgcggccgcctggagctctcggcctcggccttcgacgacggcaacttctcgctgctcatccgcgcggtggaggagacggacgcggggctgtacacctgcaacctgcaccatcactactgccacctctacgagagcctggccgtccgcctggaggtcaccgacggccccccggccacccccgcctactgggacggcgagaaggaggtgctggcggtggcgcgcggcgcacccgcgcttctgacctgcgtgaaccgcgggcacgtgtggaccgaccggcacgtggaggaggctcaacaggtggtgcactgggaccggcagccgcccggggtcccgcacgaccgcgcggaccgcctgctggacctctacgcgtcgggcgagcgccgcgcctacgggcccctttttctgcgcgaccgcgtggctgtgggcgcggatgcctttgagcgcggtgacttctcactgcgtatcgagccgctggaggtcgccgacgagggcacctactcctgccacctgcaccaccattactgtggcctgcacgaacgccgcgtcttccacctgacggtcgccgaaccccacgcggagccgcccccccggggctctccgggcaacggctccagccacagcggcgccccaggcccagaccccacactggcgcgcggccacaacgtcatcaatgtcatcgtccccgagagccgagcccacttcttccagcagctgggctacgtgctggccacgctgctgctcttcatcctgctactggtcactgtcctcctggccgcccgcaggcgccgcggaggctacgaatactcggaccagaagtcgggaaagtcaaaggggaaggatgttaacttggcggagttcgctgtggctgcaggggaccagatgctttacaggagtgaggacgtccagctagcctcctctcctcccacagattacaaaaacaacatcctgaaggagagggcggagctggcccacagccccctgcctgccaagtacatcgacctagacaaagacccttctgggctctgcccgctgggggcctgaagacattcctggaggacactcccatcagaacctggcagccccaaaactggggtcagcctcagggcaggagtcccactcctccagggctctgctcgtccggggctgggagatgttcctggaggaggacactcccatcagaacttggcagccttgaagttggggtcagcctcggcaggagtcccactcctcctggggtgctgcctgccaccaagagctcccccacctgtaccaccatgtgggactccaggcaccatctgttctccccagggacctgctgacttgaatgccagcccttgctcctctgtgttgctttgggccacctggggctgcaccccctgccctttctctgccccatccctaccctagccttgctctcagccaccttgatagtcactgggctccctgtgacttctgaccctgacacccctcccttggactctgcctgggctggagtctagggctggggctacatttggcttctgtactggctgaggacaggggagggagtgaagttggtttggggtggcctgtgttgccactctcagcaccccacatttgcatctgctggtggacctgccaccatcacaataaagtccccatctgattttt

SEQ ID NO: 10520 - protein, 450 aa, Homo sapiens [sequence omitted]

SEQ ID NO: 10521 - DNA, 1607 bp, Homo sapiens
  CDS (385)..(885)
gattaaatgttctgagtaagtgagtttgtagacattttcttgtaagaaaatgttccatgctttactctgttttggacattttcttttgaaaaattttgagatagaaaccttaatatcatttcatatatttacagcatatagttaatttgagtagagtcaaattaatcttactttagaatttgattactaagtattagcatggataataatgcttcttttgcttaaatgtaaaaattaggccgttttactaggtgtactttgtcttaatcatattcctatttttttatacagctgtgcaaccatattgcttctgggaaaaaatgtcaatatgtgggaaactgttcctttgctcatagtcctgaggaaagagaagtttggacttacatgaaggagaatgggatacaagatatggagcaattttacgaactatggctcaagagtcaaaaaaatgaaaaaagtgaagacatagccagtcagtcaaacaaggaaaatggaaaacaaattcacatgccaacagattatgctgaagttacagtggactttcactgctggatgtgtgggaaaaactgcaacagtgagaagcagtggcagggccacatctcctccgagaagcacaaagagaaggttttccacaccgaggacgaccagtactgctggcagcaccgcttcccaacaggctatttcagtatttgtgataggtatatgaatggcacctgcccagaaggaaacagctgtaaatttgcacatggaaatgccgaacttcatgaatgggaagaaagaagagatgccctaaagatgaagctcaacaaagcacgaaaagatcacttaattggcccaaatgataatgactttggaaaatatagttttttgtttaaagatttaaactaatatgctggcttttatgtatgatacctaatcagagcattgaccagaaaaattgaaagtgttctgaggcacatagcagaggagctgcagatttcctgcttgtattggcgtatatcgttcctcctgagcagcaacccacagtaggtaggaaaatgggctgtttcacaggcctggccacgctctcacggaaccactggcatcagatggtgaagtgactgctacccggttgccatctgttgaacagacttttggatgaagtgtgttggggaagaggatgaggttatatctaggacaactctttgagttggtccttcatataagaatcgtgacggtaagagaataaacacttgtactgggatcagaatacatgatggatgaaattctttacatgttttagcagaatgaatttgtttaatataataaagtttgctacttatctgtatgtaggttgctaaaaaggattttcttaactcagattttaagccaaataaccatttaacactagtatttgttaaatggggtatttttctgtatttgtatgtttcactataataagggaattaaggataatgtgcattgagaatattttgaaaaataattgactcaaattttatttcttggtcttttgctgtttaaatgatgattttgaaagattaaacctgtactgttggtattgtgttagtgtatggaccaatactgcctgtaataaagattttatatat

SEQ ID NO: 10522 - protein, 167 aa, Homo sapiens
MKENGIQDMEQFYELWLKSQKNEKSEDIASQSNKENGKQIHMPTDYAEVTVDFHCWMCGKNCNSEKQWQGHISSEKHKEKVFHTEDDQYCWQHRFPTGYFSICDRYMNGTCPEGNSCKFAHGNAELHEWEERRDALKMKLNKARKDHLIGPNDNDFGKYSFLFKDLN

SEQ ID NO: 10523 - DNA, 1731 bp, Homo sapiens
aataagtagcctccaggcattcccttccaccagaggagcaattgttttttaaatagccctttggcgcccagtctattactaaaccatatgagtcattttttaatattactgcatgtgagttaacatagtcttcccaaattaaagttttagatgggccctcaaaatttttagggcatggttttcctgcaggtttatatggaaagtatggggtccctgacttctcgcaacagtggcctacactgcctttcagttctgtacctaggcctccaaagcactttagcctgtggggcttgccagaactcgggttccagctcctggaatggacagttcccctctggctagggttgatctaatgttccctctgggttactggctgagttctgccctgtgtggctttctgctgtgccagggctgcactgagttcaaatgcagagtctcacaatcattgtattcttcctcccccaggagcacccattctctctttacaccaattggccactgccaggggatgaagagggatgatgttgacaattcaagactatttcttaccctcttcagtgcctgtttccttaatatgataataaaccaggtactgcgatcactcacctgattattggttcttatgaaggtgcttttttaatgtagttgttcagtttgatatttctgtcggagggatgactgctggaggattctattaagccatcttgctctgccttcttgcaacacataaaattcaacagttttgtgcaactgtaagttcaagtgtttgtaattttatttatttcatttttttctttgagatgaagtctccctcttgttacccaggctggagtgcagtggcgcgatcttggctcactgcaacctctacctcctgggttcaagcaatcctcctgccttatcctcccaagtagctgggattacagatgcctgccaccatgtcttgctaacttttgtacatttggtagacatgaggttttgccatgttgtccgggctggtcttgaactcctgacttcaagtgatccacctgtcttagcctcccaaagtactgggattacaggtgagagtcactgctccctgctgcaaatttcttattaaatctgtttgacagattttagaatttctataagtaatgtttaaaattacaaccatttgggctgggtgtggtggctcatgcctgtaatcccagcacttattttatttcttatcaggagaacgagaatcatcatactactttgcatcggaggttaagctcattcttttccttaaaatgggaagataaaggcattaccccctctccgaggcctcatatgatactccccattctgacccagaacacccagaactttggaaattggctattgccatgtctggactgcaagtatgggaagcagaaactattctgtctgttgtccccactaccatctccctctctcagtatcaacgtagatccagacattctgctttacctacctccaacctgtttccatacagagttctgttaagcctccttgcatgctgttagtgagatatatcaaaatttggatgaacaatcaaactgtccaatgcattaattgtcatttatacacttgtattaactcccattttgattccaggaaaagtgtaatgttggttcgagctcaagaaggaatctggattccggtaactttgcccagaccttgggaatcctccccttcaatacatttaattaatgaagtgttacagtgaattct

SEQ ID NO: 10524 - DNA, 1564 bp, Homo sapiens
  CDS (9)..(431)
acctaaacatggagacagcgggcgctgcaactgggcagccggcctctgggctggaggctccggggtccacgaatgaccggcttttcctggttaaaggtggaattttccttggtaccgttgctgcagcgggaatgctagctggatttattacaacattatcattggctaaaaagaaaagccctgaatggttcaataagggaagtatggccacggctgcattaccggaaagcgggtcttcccttgccttgcgagctctgggctggggctccctgtatgcatggtgtggggttggtgtgattagcttcgcagtctggaaagctttaggagttcacagtatgaacgactttcgaagtaaaatgcaatcaatatttccaacaattcccaagaactccgaatcggctgttgagtgggaggaaacattgaaatccaaatgagatgagcatggatgaatttcaaaatgcttgttacagaaaggggtggctctggagacaccatgacagcaaaaggactgggactgatttctcccaggaacatgggcagattgctgactgaaccagtgcactggatagcattcagcctcatcacaggaaagtatgtgtgtgcgtgctgggggagggtaaagttttcccacagttaagaagactatttaaaaatagtaattacaggaataacttccttatgtgggggggaccccataggaaatgattctgtttgtaacagttgaagcaaatttcatactaaaaaaagtttataataaaagtatgataagaaaatatttataaaacagaccccctaatagcaatagtactgcaatgtgtctaattaaaggagtttcaagagcctttcttgtcaatatatgacagaacttggaagtcttattctgattagccagactacaaagtgacagtcacctggtaagtcctgtatggtaggaagtgggtgtggctctcgggtcctaaatgtggtctgtgctttacagccatcacacacgtgctagttatttacctgatgcccttgcttgaaggccctataaattcttatacttaaaacaaaaagccagtaatgagttgtgatcaccccaaaaggcacagttgggctaaaataatgatgatatcaggggtaaacatatttttttgagaagttggtctggatctctgaacactgacaatttgtcattttgtctcagttgtcaaagtaaaaagagcccagttgtcatccgtcttcaatatttttaaccagaaagtcacctgagtacggagtcccaatataaagtatttgggaccacctccctaacaaagctgttagggtaaattctgtgtgcacgcccaactccctcctgtcttccacagtctcctacaaaaaaaacagatggagaataatgtctacatgcaattgtttttactgcaattgtattttaaaatattttcaagaagagaaatactttaatatgtcaatatgtccagagaaaaaacctgtagttaaatatcagttgtgcaatttcttcctacttgcctaggctctaattagtcagcaatcaggtttaataaaggacatttgaaatttc

SEQ ID NO: 10525 - protein, 141 aa, Homo sapiens
METAGAATGQPASGLEAPGSTNDRLFLVKGGIFLGTVAAAGMLAGFITTLSLAKKKSPEWFNKGSMATAALPESGSSLALRALGWGSLYAWCGVGVISFAVWKALGVHSMNDFRSKMQSIFPTIPKNSESAVEWEETLKSK

SEQ ID NO: 10526 - DNA, 1930 bp, Homo sapiens
  CDS (139)..(1827)
aagcccggcctggcggcggcggtggcggtagctgccgtggcggcctctgcgcatgctccgtcgcctgcccgccctggccgctcgccgcccgcccgcccgacggagacgcagtcccagctatctgacttcatgtgaaagatggctaatgcagaagtgagtgtcccagtgggggatgtggttgtggtacctactgaaggaaatgaaggggagaatcctgaagacactaaaacccaagtgattttgcagttacagcctgtgcaacaagggatttatgaagctgggtcggagaacaacacggcagttgtagcagtagaaactcacacgatacacaaaattgaagaagggattgatacaggcactatagaagcaaatgaggatatggaaattgcttaccccataacttgtggggagagcaaagccatcctcctctggaagaagtttgtatgtccaggaataaacgtgaagtgtgtcaagttcaatgatcagttgatcagccccaagcactttgttcatctggctggcaagtccactctgaaggactggaagagagctattcgtctgggtgggatcatgctcaggaaaatgatggactccggacagattgatttttaccaacatgacaaagtttgctccaatacctgcagaagcaccaaatttgatcttctgatcagcagtgcaagagctccagtgccaggacagcagacaagtgtggtgcagacacccacttcggctgatggtagcatcacgcagattgccatctcagaagagagcatggaagaggcagggctggaatggaactcagctctcaccgctgctgtcaccatggccacggaggagggtgtaaagaaagactcagaggaaatttcagaggacactttgatgttctggaaaggaatagctgatgtagggctgatggaagaggttgtctgcaatatacagaaggaaatagaggagctactcaggggagttcagcagcggctcatccaggctcccttccaagtcacagatgctgctgttctcaacaatgtagcacacacatttggcctaatggacacagtcaagaaggttttagacaacagaaggaaccaagtagagcagggagaagaacagtttctctatactctgacagacttggaacgccagttggaggagcagaagaagcaaggccaggatcacaggctgaaatctcagacagttcaaaatgtggtactgatgcctgtgagcactcctaagcctccaaaaaggccccggctccagcggccagcctccaccactgtcttgagcccttctcctcctgtccagcagcctcagttcacagtcatctcacccatcaccatcaccccagtgggtcagtcattttccatgggcaatattccagtggccaccctcagccagggctccagtcctgtgactgtccacacactgccttctggccctcagctcttccgctatgccacagtggtctcctctgccaagagcagctcaccagacacaatgaccatccacccttcatctagcttggcgctgctgagctctactgccatgcaggatgggagtacactgggcaacatgaccaccatggttagccctgtggaattggtggccatggagtccggcctaacctcggcaattcaggctgttgaaagcacctcagaggatgggcagaccatcattgagattgatccagccccggacccagaagctgaagatactgagggcaaagcagtcatcttggagacagagctgaggattgaggagaaagttgtggctgagatggaagaacaccagcatcaagttcacaatgtggagattgtggtcttagaggattaactggggatctcagggccaggagttatgttttgatttggaattttaattatttgtttatttttatcattgtcccactcatttccacataggaccctttttt

SEQ ID NO: 10527 - protein, 563 aa, Homo sapiens [sequence omitted]

SEQ ID NO: 10528 - DNA, 1559 bp, Homo sapiens
ttaaaatgctattatgaaacagattcattcattcattcatgttgcccacctggtccccatagtcatcggagttttccactcttgacgaacgaatacttgccctattttccaagctaagtcttgaataccttgtaatgttttacttcttgtggcatcctgcactttgtgtaaaatcaggagtggggagtgccaataaatatttgattgactaattgacagcttgagtcaaggttctggaagagaataaatacaagggaaaggcattccctttttcatttagaccatattttgcctaagccaaatggacgatttacagctaatcattgcgtcttaaccagggacagctggagcttactgcttgcctcctgcctagtcgtctttattccttctataaaggcagaaaacagaagggctctgcacacagcagtcacagacgctcatcaaagacaaaccactgacatggaaactgaacaagaaaaggcttcctggttcaaggctggcttttgggagccatgttcaagcatgccctaagtagcacagtcagcagcctttttccttcactctttaggggctggggttgaggaacaagattccctcaattttccaacaaataacctatttcagtgaaataaaaaaagggggggtggggcattggtgcagtcagtcattcatatgccaagttgtagccatgttagtatttcatgccagtaattctgtctagcagaaactcatcctggctcttttccattccttttagcaagattgcagttgtaaatcagcaggaatgtcctggagactgctccaggtgggttgtcgggagcagtctggaagaagaatcttcagaataatttaggttatgagtctaagagggaaggtcaatgctgctatttagaaccagagcactatgccaaatttggctttggagggatgcgttaaatgtcattcttggaatttgaatttagaatattttaaaaacacgatcgtttgtacattcacccctacaagatttagccagggttctcatctctgacctctgaacatcctctaaatttgcgagaccactatagtaataatccaatttgggttagtactttttactcataagaagagtttcatttgtagcttttagaggaaatggagtgagtatcattctgatctcaagggcactgtggacagaaattggatttgcagagttagtgtaggtcttggttctacctcttaataacagtatggccttagacaaatactttgtcctctctgggccctttctttctttctttctttctttctttctttctttctttctttctttctttctttctttctttctttccttctttcagaaacagagttgggtggaggttggaaggagggagaggatcggaaaaaataactattggtcactagccttagtacctgtgtgatgaaataaataatctgtacagcaaacccccgtgacatgagtttatctatataacaaacctgcacatgtacccttgaagctaaaatgcaagtttgtttgttttaaagaaacagttattcagaggaatgaatgccac

SEQ ID NO: 10529 - DNA, 1744 bp, Homo sapiens
tgtaaaatgtggacaataataataatgctaacagtaaaaactacctcataggattgatgtgaggattaaatgagctatgaaaacctcttagaaggtacctgttagctagtactcagctcagtgagtattaactgttttgttattaagacgtgtgtgtctctgccatttgtatttaacacgtgtccttgtgcctggcttacctccctgttatactgtaacctccgtaaggacaggcatagtgcccccttcttccttatctctttactgcttgtattagtccatcttgcgctgctacaaaggtacacctgaagctaggtaatttataaagacatgagatttaattggcttatggttctgcaggctgtgcaggaagcatattgctggcatctgcttctggtgaagacctcaggaagttgccttatggcagaaggcacaggggaagcaggcagtcacatggtgagagagaaggagcaatagagagaaacaggaggttctttcaaccaaccagatctcacgtgagctcattaccacggggagttcaccaagacaaggatgaaggatccgcccctatgacccaatacctcccactaggccccacctccaacactggggatcacatttcaacacaggatttggaggggagaaacatccgaacagtatcactgcttttcggtgctgtatatacaatttgggccccatggttttggcatcctggatattccagtactgttcagacttcagagattcagctgtactttctaagctcagttattatgacctcagttcataattacttttgcaccaacataatatcagatcacgtatcccaatatggggttcagaaaaaaagtccctatcaataggtatcattggcagcctctagcagctttgctttctcttggcagagtgctctagcaatgcccaggagcccttctgcagaggctggacaactctcctggtgtttggcagccagctctgttctgcatgccttcggcacaatatgctttcacctgtccccaccctaaccccacccacagaatcctttccttggttttaataaacttccagctgtcttcgtccattttctgctgctataacagaataccacagattgggtcattgataaagaacagaaatgtaattctcacagttccagaggctggtaaatccaagatcaaggcacgggcaggttggtgtctggtgagcatctggtctcttctgccaagatgacacctagaatgctgcatcctctggagaagaagaacacgtgtcctcacatggcagaaggcaggagggcaaaaaggagccaaactccccacctctcaatactgttgcattggggattaagtctccaacacatgaatttgggggaaacattcagaccatagcatcaggcatggccaagttaagtaacttgccacctactgccaagcaacccaaactcaaaggtctgcgacctgcaagttcagataaggaaactgtctcaagcttccaagataataactggtgaagacagagtcagactgacccaagcaaaggggtgacagagctgcatgaacagaaattctctaaagatcagggatggaaaatgaaaaatcaaaatgaactataaaaacatgaacctgggttgggtacagtggcatgtgcctgtaatcccagcactttgggaggttgaggcaggaagactgcttgagcccagtagttcaagaccagccctggcaacagagtgagaccctgtccctac

SEQ ID NO: 10530 - DNA, 1851 bp, Homo sapiens
  CDS (82)..(906)
ccctggacctcatcaggccacggattgtgtgaatcagcagaaaataggactttcctaagcaaaacaggaaggaaagaaaggatggagtgtgaaacagatgaacaaaaacagggctctgatgagaacatgtcagaatgtgaaaccagcagtgtgtgtagcagcagtgacactgggctctttaccaatgatgaagggcgacaaggtgatgacgaacagagtgattggttctatgaaggagaatgtgtcccaggattcactgtccctaatcttctgcccaagtgggctcctgatcattgttctgaagtagaaagaatggattctggattggataaattttcagattccacattccttttaccttctcggccagctcaaagagggtaccatactcgcttgaatcgtctacctggagctgcagctcgatgcctcagaaaggggcgaagaaggctggttgggaaggagaccagcataaacactttggggactgagaggataagccatatcattagtgaccctcggcagaaagatttctggttaccatcagctgggaaaagagaacgaaatcagttcaatcccctgtctcccctttactccctggatgttcttgccgatgcttctcaccgaaggtgttcaccagcacactgctctgccagacaggcaaatgtacactggggaccaccatgttcacgtgtcatcaagaggaagcggaaaccagtggccacagcatctttgtctagccccagtgcagttcacatggatgcagtggagccaaccacaccagcatcacaagcccccaaatcacccagctctgagtggttggtgaggacctctgcagcagagaaagccacagacgcaactactgctacattttttaaaatgccacaagaaaagagccctggatacagctagagagcaggacttcaccctccaggagctgactgggtgttgctgaagcaaatgttggactttgtgttagatagtcttgcatatcttaatcgacattcccagtcctttcaccaccagaaccaactcctctttcaaacacagcagtggattctttctctcagaaggtcatgttgtgggaatcttttttttaaatagtgaaatattgaggcagcaattttttacaaaaaggtcatcctctgctctatttgttaccttgttattgctgtctcaacatttactacagctccatttacagaactgttgctttttttgcagttgtctttgttcttgaaaaaccagtaactgcttctgcataccttttgtgtagagcttttaatatcatttgaggaagttccaaatttgtagccagttccaaacaaatttaaatattgagttgagacctgtatggaattgtgttcgcaggagataaggcttgcctttgagcctactcttgattcatgcagagtgccaataagataaatcaaccaagttttggggcctcaaaagagacaccagcaactgggccttgagaacttccatttttttgcagattgtctgcagaaactcagacagctcatcagcagcagcagctgtattgtattttacctcatcttcagagtttatgttctactgaaagaggacgtgtgtatacacacacacacacacacacacacacacagagattggtataatggagaagatggtttaggtgtacagcaaatttaaaatagtcagtggattgtgtcttactacttcatgtcccagtgtaagcctttatgtcctaagcaggactttattgttagtattataggctaataacctgcagcagaaattcatactctattataataatggcttcttggggccatgctttggggaagtaaaatgtctttttgacatgccttt

SEQ ID NO: 10531 - protein, 275 aa, Homo sapiens
MECETDEQKQGSDENMSECETSSVCSSSDTGLFTNDEGRQGDDEQSDWFYEGECVPGFTVPNLLPKWAPDHCSEVERMDSGLDKFSDSTFLLPSRPAQRGYHTRLNRLPGAAARCLRKGRRRLVGKETSINTLGTERISHIISDPRQKDFWLPSAGKRERNQFNPLSPLYSLDVLADASHRRCSPAHCSARQANVHWGPPCSRVIKRKRKPVATASLSSPSAVHMDAVEPTTPASQAPKSPSSEWLVRTSAAEKATDATTATFFKMPQEKSPGYS

SEQ ID NO: 10532 - DNA, 1406 bp, Homo sapiens
  CDS (238)..(891)
aatgctgctctggtttcttgcgcgcttggcgctacagggagtgcgggcggcgactccttgcgcaagtcagcttgcctgggaaagggctttgtggctgaaagcgactggttccttgccacaaaggctccgctggcgtttgcggttcagcggccgtccctgagtaagatagccacttttctccgacgctgccaatagccttctccaagtgctgcaggctttcatcgctttgcaggagccatgcctcggggacggaagagtcggcgccgccggaacgcaaaggcagctgaagagaatcgcaacaatcgcaagagccaggcctcagaggcttcagagaccccgatggcggcttctgtagccccgagcacacccgaagaatacctgagcggcccggaggaagacacaagcaccctggagaaggcctccagtaccccttcagaagcttcgagcactgccctagtgcaaaagccggttacccggagcaattttcagggcaccaagaaaagtctcctaatgtccatattagccctcatcttcatcatgggcaacagcgcaaaggaggccctggtgtggaaagtgctggggaagttagggatgcagcctgggaggcagcacagcatctttggagatccgaagaaggtcgttacagaagagtttgtgcgcagagggtatctgatttataagccagtgccccgcagcagtccagtggagtatgagttcttctggggccctcgagcacacgtggaatctagcaagctgaaagtcatgcattttgtggcaagagttcggaaccgatgctccaaagactggccatgtaactatgactgggattcagatgatgatgcagaggttgaggctattctcaattcgggtgctaggggttattctgctccatagagagatcctaggcaaacccttaggagtggaaaagagaatccaaagtatctgctccatggagtagataggcagggtcctgaattcaaaaggttgtggagggtggggagggcactgtatttggtatttgtgaccagtgctaattgttaaactgcaaagtagtgtttgctatagatattgttatcttgtattcattttataacactgttgactaagaatcacaatatgtttaaatatatacttgaggaaaagtttatgttatttttttctgtcgttggcatttgatattaacagctgtgctaaccttattaaatgaagtctttgtgtcatgttgtgtgatggatagaaagtaccactgagaggctgttctttgaaagtttggaataaccagtaaagtgtgagtggaagaagattacagatttgttctgtctttcccttgtgtctgatgtcttgtaatggaacacatttgtaaatatgctcactgtgcaaatagtataaataaaagcatagtaaac

SEQ ID NO: 10533 - protein, 218 aa, Homo sapiens
MPRGRKSRRRRNAKAAEENRNNRKSQASEASETPMAASVAPSTPEEYLSGPEEDTSTLEKASSTPSEASSTALVQKPVTRSNFQGTKKSLLMSILALIFIMGNSAKEALVWKVLGKLGMQPGRQHSIFGDPKKVVTEEFVRRGYLIYKPVPRSSPVEYEFFWGPRAHVESSKLKVMHFVARVRNRCSKDWPCNYDWDSDDDAEVEAILNSGARGYSAP

SEQ ID NO: 10534 - DNA, 1590 bp, Homo sapiens
cctactatgtaattctgtaactttttttcctgaatgtttaggtctattttggcatgcagggattaagaaaatagctatctgagcatatattttatagttcactaatgaaccctactttgaccctgtgggttaatgaatgaaaagtatctgctattatggtgtggtttcatcttatcaattacatatttttgttttgaaatttgtcacctttgtcttcaccattcttttctcttggacagactgttagccccttaactcatgtacttgccttgacttaagttaccagtctgtccaagagaaaagaattacattcatggcaaatgcccccagtcaggcacaacataccatatacataatattcttgatgagcttaaagtagccacacagcactcagggcagcctccactaactgattggaaataagcctatttgccatatctccctgaaactttctattaacaaagccacaaaacgcttaaacaaagaaaaattagataatatcaatagcccatcttctaacacattgcctagctcattactttcaatacatattttccaaactaaaaattaaaatctcaactctttaagagaagtttcgtaattttgtagtataagagattatcctggcaatatagttttaatgccaatatattgaaacttacatgacatttcagtggttttgcagtgttttcccaagtatggtacctttaccactgaaggtacacagtgatttctgggtgttaaacagatgaacattttttattttaatagctatacaatataaccagcaaataaaatccatgttttcatggatattattgcttagagttagttaagttttaaaatgtgatttaaaggaaaatattaagtactagtacaagagatacccagtatgacagaaatgatagtagaaggcaaaagacaagtttaagaaatgctggtttgtgtcagcagtgggcagaaaattgggggctcggggctgccatgagaatgataggtgtttgatcaccacagctataggagttctttgaaagtagatctggacattttgaaatagtcaaggggaggtgtcctcagggatgtcataactgttgacctcaagaccaatgcatcagttagaaaaacattttaaggatgctcagcactgctatgtatcacagggtccctccataggacatacatacttgatctgctagcgtttttgtcatacgttagaatgaatgaatatgtgttggaatgtcttgacacagttaacctgaacacatacagctggaatccccctgttgcagttgttattatatgtaatataatagcaattgcagacagcttggattctttctcacagatattccttttgttcaattagaaattctacataattctggccgagcacagtggatcacttgaggtcaggaattcaagaccagcctggccaacatggtgaaaccccgtctctacttaaaatacaaaaattagccaggcgtggtggcgggcacctgtaatcccagctactcgggaggcagaggttgcagtgatccaagatcacgccattgcactctagcctgggcgacaagaaagaaattccatctc

SEQ ID NO: 10535 - DNA, 1775 bp, Homo sapiens
  CDS (157)..(1083)
aagaccgtcccggatggcctcggggactgccagtgtgtggaggtgagctccgggattgccggcattcccgcttctgctggttgcttcatgctgcaggctgcggccgtcagccctcgctcgcattggtggcgctgaggtgccggggcagcaagtgacatgtcgtcgggcctccgcgccgctgacttcccccgctggaagcgccacatctcggagcaactgaggcgccgggaccggctgcagagacaggcgttcgaggagatcatcctgcagtataacaaattgctggaaaagtcagatcttcattcagtgttggcccagaaactacaggctgaaaagcatgacgtaccaaacaggcacgagataagtcccggacatgatggcacatggaatgacaatcagctacaagaaatggcccaactgaggattaagcaccaagaggaactgactgaattacacaagaaacgtggggagttagctcaactggtgattgacctgaataaccaaatgcagcggaaggacagggagatgcagaaagagcttgcagaagcagcaaaggaacctctaccagtcgaacaggatgatgacattgaggtcattgtggatgaaacttctgatcacacagaagagacctctcctgtgcgagccatcagcagagcagccactaagcgactctcgcagcctgctggaggccttctggattctgtcactaatatctttgggagacgctctgtctcttccttcccagtcccccaggacaatgtggatactcatcctggttctggtaaagaagtgagggtaccagctactgccttgtgtgtcttcgatgcacatgatggggaagtcaacgctgtgcagttcagtccaggttcccggttactggccactggaggcatggaccgcagggttaagctttgggaagtatttggagaaaaatgtgagttcaagggttccctatctggcagtaatgcaggaattacaagcattgaatttgatagtgctggatcttacctcttagcagcttcaaatgattttgcaagccgaatctggactgtggatgattatcgattacgggtaagacccagttaagaaagttagtgcaatctccaaacttcatgtggtgttatcaaggcacaaactggcaggtgcttaattaggggactttgttttcccaaaaatcatgcttgattcaccctgcccttcctttcctccttggggaaatctgtgtttccactttatactctttgtccaaaactcagtttcaaaatatttgcaatgggaccctcacatttgcatgaaaaccttggaatactcttcataaggactaaatactttggtagatagcaattttggcttaatggcacagaacttagcaacagcatgtgaattgtgattcctgtgggctctaaaacctaattacctaaagtgggatatagaagtacaaatggatgtatcatagggataagacaattctgaaacaaaaactccaagctgagaaagaggggacaggtgtcagagcagggagaaatgattggatgttgaggaaagctgcatttgaaccaaaacttgccaagaattctcttggcatctgacagagagaccaaaacttggttgtatcatttttgattggggcagggggcggagggcgaagcatgtaacttaatttgcagacattttttttccccataagcctgaaggaatcatcacataagcttattaaatacaagctattgaaagatataatggaggatgaatttggcattagtaggcattttact

SEQ ID NO: 10536 - protein, 309 aa, Homo sapiens
MSSGLRAADFPRWKRHISEQLRRRDRLQRQAFEEIILQYNKLLEKSDLHSVLAQKLQAEKHDVPNRHEISPGHDGTWNDNQLQEMAQLRIKHQEELTELHKKRGELAQLVIDLNNQMQRKDREMQKELAEAAKEPLPVEQDDDIEVIVDETSDHTEETSPVRAISRAATKRLSQPAGGLLDSVTNIFGRRSVSSFPVPQDNVDTHPGSGKEVRVPATALCVFDAHDGEVNAVQFSPGSRLLATGGMDRRVKLWEVFGEKCEFKGSLSGSNAGITSIEFDSAGSYLLAASNDFASRIWTVDDYRLRVRPS

SEQ ID NO: 10537 - DNA, 1670 bp, Homo sapiens
  CDS (204)..(605)
gggcaaaccctttgaaaaatattctaaatgaaaatgacatagtattcatagtggaaaaagtgcctttagaaaaggaagaaacaagtcatattgaagaacttcaatctgaagaaactgccatatctgatttctctactggcgaaaatgttggaccacttgctttaccagttgggaaggcaaggcagttaattggactttacaccatggctcacaatcctaatatgacccatttgaagattaatctgcctgttactgcccttccccccctttgggtaagatgtgacagttcagatcctgaaggtacttgttggctaggagctgagcttatcacaacaaacaacagcattacaggaattgtcttatatgtggtcagttgtaaagctgataaaaattattctgtaaatcttgaaaacctaaaaaatttacacaagaaaagacatcacttgtctactgtaacatccaaaggctttgcccagtatgagctctttaagtcctctgccttggatgatacaatcacagcatcacaaactgcgatcgctttggatatttcctggagtcctgtggatgagattcttcaaatccctccactctcttcaactgcaatctgaatattaaagtggaatcaggagagcccagaggtcctttgaatcatctctacagagaactgaaatttcttcttgttttggctgatggtttgaggactggtgtcactgaatggctcgagcccctggaagcaaaatctgctgttgaacttgttcaggaatttctgaatgacttaaataagctggatggatttggtgattctacaaaaaaagacactgaggttgagaccttgaagcatgacactgctgcagtcgatcgttccgtcaagcgtcttttcaaagttcggagtgatcttgattttgctgagcaactgtggtgcaaaatgagcagtagtgtgatttcataccaagactaggtgaagtgtttcacattgatcatccagagtctacaacgtggtgatatacagccatggctccatagtggaagtaacagtttactaagtaagctcattcatcagtcttatcatggaaccatggacacagtttctctcagtgggactattccagttcaaatgcttttggaaattggtttggacaaactaaagaaagattatatcagttttttcataggtcaggaacttgcatctttgaatcatttggaatacttcattgctccatcagtagatatacaagaacaggtttatcgtgtccaaaaactccaccatattctagaaatattagtcagttgcatgcctttcattaaatctcaacatgaactcctcttttctttaacacagatctgcataaagtattacaaacaaaatcctcttgatgagcaacacatttttcagctgccagtcagaccaactgctgtaaagaacttatatcaaagtgagaagccacagaaatggagagtggaaatatatagtggtcaaaagaagattaagacagtttggcaactgagtgacagctcacccataggccatctgaattttcacaaacctgatttttcggaattaacactaagcggtagcctggaagaaaggatattctttactaacatggttacctgcagccaggtgcatttcaagtgaagtgtgctgatgaagtcctctataagcacaagcc

SEQ ID NO: 10538 - protein, 134 aa, Homo sapiens
MAHNPNMTHLKINLPVTALPPLWVRCDSSDPEGTCWLGAELITTNNSITGIVLYVVSCKADKNYSVNLENLKNLHKKRHHLSTVTSKGFAQYELFKSSALDDTITASQTAIALDISWSPVDEILQIPPLSSTAI

SEQ ID NO: 10539 - DNA, 1736 bp, Homo sapiens
gagtaaaggtgacttttgttatgttttagaagagactggtggcattttgcctctgccctagagatttgtggaactttgaacttaagaaagttgatttagggtatctggcagaagaaatttctaagcagcaaagcattcaagaggtgatttggatactgttaaaggcatttagttttataagggaagcagagcataaaagtttggaaaatttgcagcattactatgcgatagacaagaaaaacccattttctggggagagattcaagccagctgcggaaatttgtgtaagtagcaaggagcctaatgttagtccccaagaccatggggaagatgtctccagaccatgtcagagaccttcaccacagcccctcctatcacaggcccagaaggaaaaagtggttttgtgggcctggtccagggtccccttgctgtgtgcaacctagggatgtggcaccctgtgtcccagctgctgcttcagctgtggctgaaaggggccaatgtacagctcaggttgtggcctcagagggtggaagccccaagctttggcagcgtccacatggtgttgagcctgcaggtgcacagaagtcaaagaattgaggtttgggaacctctacctagatttcagatgtatggaaatgtctagatgcccaggcaaaagtttgctatggggtggggccctcatagagaacctctgctagggcagtgtggaagggaaatgtggggttggagcccccacacagagtccctactggggcactgcctagtagagctgtgagaagagggccattgtcttctagaccccagaatggcagacccactgacagcttgcaccatgtgcctggaaaagctgcagacactcaacgccagcccgtgaaagcatccgggagggaggctgtaccctgccaagccacaggggcagagctacccaagaccatgggaactcacctcttgcatcagtgtgacctggatttgagacctggaatcaaaggagatcattttggagctttaacatttgactgccccactgaattctggacttgcatgggacccgtaaccccattgttttggccaatttctctcatttggaatggctgtatttacccaatacctgcacacccattgtatctaggaagtaactagcttgcttttgattttacaggcccataggtggaagagacttgccttgtctcagatgaaactttggtctgtggacttttaagttaatgctgaaatgagttaagactttgggagactgttgggaaggcacgattggttttgaaatgggaggacatgaaattcggagggcgcaggggtgtgatatggtttgggtgtgtcctcacccaaatctcaactcgaattatatctcccagaattcacatgtattgtgggagagacccagggggaggtaattgaatcatggcagccagtcttttccgtgctattctcgtgatagtgaataagtctcacaagctctgatgggtttatcaggagtttctgcttttgctgcttcctcattttctcttgccaccgccatgtaataagtgccttttgcctcccgccataattctgaggcctccccagccatgtggaactgtaagtccaattaaacctttttttcttcccagcctcaggtatgaatcagcagcatgaaaatggatttgaatacagaagcctaatcaaatttgctgtccctcatgggtctatagatggttaataaaacattggggtaattaacc

SEQ ID NO: 10540 - DNA, 1461 bp, Homo sapiens
  CDS (167)..(574)
tttaaggcgccgggtttccggggctcctggccccgcttattccgcgggggtcggcggggtcggcctgggcgcccgcgccgccgctgcgctttgtccgctgggcacactgcttctgggaggggcgggcagacatggtggcggccgccgccccctcctcggccctagcatgccgcggccgcctcgcggctacccggcttgccggtcccgagcggcagccccggggtggcgatggggtcgcgccgaggcagcggaggttctgcgggcgactggaggttggcagtgggcgggagaaagaggaaggcaggcgcggctgggcctcggcctctggcgccgcggtaccctttgtctcggcagcctgacggccccgccgggctctccggagaggggaacgggcggcgagggtggcgggtcctgggcgccctgtgctgcggggccgagaggcgctcgggtcgcggcgggaccggccggaccagacagggttaatggaagagcctggccagtcccgcgcggggcccccgcagcgacagccttggccgcggggactggagtcctgagggggagaagcctgccgttctgaaggctcgggacttctgccccaaagacttcgccgccgagaactgcgggtgcactgcctcagggaagaagttgagaattttgccaggtcatctctgccagggcacagttcatcactgtgtgtttagtgtgtttcggtgaagctctccaagtgtgttgaatcagcgtgcctagcctcaagggtgcatcgtgaaaactgaaaccaaaggaatgatacaggcctgctttgtgtgtgtcttcccactttaagcttgttttcagtacaaatactcttgctttaaacctgattggactgtggcgagcggacatctgttcaaaggaggggccgagaccacagtacttctgaagggggcttgataatgtggaaacattttaagttttctctccggactgttttgctctctcaattcaggcaagttactgaagtacgttttttatctagaaaaaggtttgatgtagtctgtaaatggtccttgtaaagtacattgccatctcagaattaaaagatccactctcatttattatgcagaagttagtggtcattctttcctgtagatagtttatctcatgtaaagacccacccagcttggtttaaatttttttctcactgacgtataaccatcagctttgatacttccattttcaggctcagactttgaatttaaggaaactaaagatgactttattttcttttctcttggtttttttttccaaaaacaaaaaataaatccattacatgttaacatagatgataagagtgacatcttgcatttttgcaaatctttttaatgcctggtttaatagaagattctcagatctacgtcagactgttgtggttagcacaccatgtaacctctggaacactccactgtacactcatactttttt

SEQ ID NO: 10541 - protein, 136 aa, Homo sapiens
MPRPPRGYPACRSRAAAPGWRWGRAEAAEVLRATGGWQWAGERGRQARLGLGLWRRGTLCLGSLTAPPGSPERGTGGEGGGSWAPCAAGPRGARVAAGPAGPDRVNGRAWPVPRGAPAATALAAGTGVLRGRSLPF

SEQ ID NO: 10542 - DNA, 2590 bp, Homo sapiens
cacttgggctcgcgtcctcggccgcgccgcgcggcacccgggcccagcagccgggaggcggcagctctcctctacgcccgtcccctcagggcggctgtggatgttgccagtattgtcgatgcttcagagcgacgtttgccctgcgacacaggcgggccggctctcctctgtctttattttcctggaggccgacaggagcggggcccgagttcggtggtggtcgtgagcgtggggggcactcaggcccggacgggctctcaggtcgccgacggcggcggctggaggccgcgctggctgtcccaggtcgtcgttagctttagggagccgatctccgggcggccccacagaggacgcccgcgattcgatggcgatgatgcccgttttaaatggtgtccctgcagccgggtggatggatggatcgtacaccttgccttttgagagccgggaccttacgcccgactgcgtgttatttctgcggaataagaacgcaacctttggaggtgaagacgactgtcggctggattgaattggaatcgtgtttgtgatgatgcgtttatttctggaaatacgcggtctccgctgcttttgctttttgtcggcagaggtttgggttcttctctaacggtcaggataaaggcctgtaggcgacgctgcgcgagcgagaagctcgcccgcggctgcccgggcgcccccctctaggtgtgggtggagccgagcgcgcggggagaaccgccggccccgactcagccaccggtgactgcgggcgacccgcgggcctgcggccagctgatttcaaacatcgttttcctctttaggttcggaaaactgaggcgctggacaaggctggaatacaatatgtgattatacgtacagtactatggttgttgtagtttttaaattgtaaaacaagaagtaaccattgttccaccgttctctattaagtttgtgtaaattaaaaaggggctattttcggtaaaaagtgcagtaggtgtggtggtgtcgacctgtcatcccagctacttgagaggctgaagggggaggatcgcttgagcccaggaggtagaggctgcagtgagtcatgatggcaccactgcactccagcctgggtgacagagtgagagcctgtctcaacaaccagaaaaaaagtatttagttttacagtattacaaagtagtgtcacattagtttaatgaggtttatttatacaaaggtgtaaaattatgggccaagtactagccttcaagtaatttcgaagtcagcgagaatactggtatataacggatcaaactttgttcaagaaccaaaggctattgttcaacgaatggtgctgagacaactgcaaaagactaggacccttacctcacatgcaaaagactgggacccttacctcacaccattttgcaaaaattagctcaaaatggatcaatgacctaaatgtaagggaaaaactataaaattctcagaaaaaaacagaaggataaatttgtataaccttggatttgacaggattcttagctatgacaacaaaaacacaagcctccagaagcaagcaaacaaaaacaccataaactggacttcatcaaaattgaaaactttagtggttcaaaagacaccatcaagaaagtgaaaaaatccacagaataggaaagatatttgcaaatcatgtatctgataagggatctatgtctataatatgtaacgaactcttaataaaaaatagccccacttaaaatgggcaatgaatctaaatagacatttctccaaagaagaaatgcaaatggccaataagtacatgaaaagatgcttgacatcaccagagaaaagcaaataaagaaactgcaaggttttcattcttcttcacttacaaggcttcattctcactatgatagccagaataaaaaagtcagataacaacaattattggcaaagatatagaggaaaactgcaaaccttatacattctgataggagtgtaaaatggtgcagccactttggaaaacagtctggcagttcctcaagtgattaaacatctagttactatatgacccagcaattctactactaggtatatacccaagagaaatgaaaccatatgtccacacagaaacttgtacacatttgtttacagaagcattattcagaatcaccaaaaggtggaaacaacccaaatgtccatcaactgacacatgcaaaagtaaaatatggtatccatataatggtatattatggtatataaaagaatgaagtactgatacatgctgcaacatgaatggatcctgaaatcattatgttaagtgaaggaagctagtcacaaaagaccatatgttatatgattgcattcaaatgaatggaatatggaaatctatgcagacagaaagtagattactggctgtttaaagctgagggtgggagcatgggtgggcaggggaatagctaaagggtacagagtttctttccgaggtaatgaaaatgctctaaaattgactgtagtgatgattgcacatatctgtgaatatactaaaaaccactgaattgtacactttaaatgggtgaattgtatggtatgtgaattctatttcaatgaaactgtt

SEQ ID NO: 10543 - DNA, 1830 bp, Homo sapiens
  CDS (151)..(1371)
agctgagagcccaatcgcatcaggggagcacggcccagcagcaggagctccaggctggctggacacctgggtccccacgcagactgtgagtagagggagctggaccacagtgggacaaggacacctccagacaggttgccagggccccacatggaggaggcaggtgggcccatggcccgggccaaggcccaagtggtaagtgccacattgacatggcggcagtggccccccacccaggaagagatcaaacatggttttcacaaggtgtccctggtgtcaggggcccagatggaagccccgcagaaggagatgtttgagttcagccgtcgagaggaagtggaagtcaatggctttgcaacacaggaagaagagactgtgaattgccagggccctcgggatacagctggctccaagaacttccagagccatggacccatcttttccaagaagtacataccacctcccaaggagaaaaggcctgaggggaggctgaaggaggctgtggaccagagtgatggcagccgccaagctcccaggactgagcccccatgtgtgggagctatggccaggactgagcttttggttcccctgcctgggccccgagagccaagtccccacccaggtgtaggtctcaccagtggtagctcccggagcctcgaggaataccgagtgacacgcactgtgcggaccaccacagtggtgggaggtcatgtggaccggcggatgagcagctctgtgactgtgaggccagtgtcctcaggcgaggccctgccacggggccgtcaggtctcccgcatggtgccgccagtggtggtgggctccccaccaggctcgcccagccgcagccaggccgtgaaagtgctaagtaacctcgtgcctgctgggcacagcccccctgccagtcacctgcccaggcccacggctggcgggccaaggagcacaggtctgggcagcacagtgggggcagccttgaggcagctgcctgagaccgggacagcagagcttaaagacagctctgccctggcctctacaggcatcccagccagtgctcacctgcctaagaatcaggatgcccctgcagcctgtccggacagagaccagggcagagccccggatgccagggcctgtgagctctggcaggtgctgggagcccccagttccactgagctccctctccagacttctcagggtcaagcatcagtcccctcctctcccagactcgagacccatgtcccctctcctggcctaactcaccctgcaaagcagcctgtggtgcccactcaccccggggcccggctcactccccttgttctgccccctaaaaaaaggacgggcccgtggacccccctgctgccaccgtcctgcccatggtgaggagcgagcatgtgacagtccctggacaacctcctgctccatccactacaagaaggaaggatgtccccagcccaggaggtctttctgctccatcgtccccaaggaataagtttgttcagaactctgaaaatgtccctgtcctcccctttacccagagggaggtcgtgaagggccccggtgctgtgggccgagagccgcctgccgcgccagacgtggagcatcagtgaatcgggccacatctgcagccagatgttcgaaggccagatcctggacgtgaagggaggccggggctacgaccgggaccacgtggtgctatgggagccggatgaggacagggcatcccagatctggactatccacgtgctttgaaacttttcccctcaccctccagccctggaggcttttgctgggatgaatgtttttatagggtttttgttgtaacataagctattttct

SEQ ID NO: 10544 - protein, 407 aa, Homo sapiens
MEEAGGPMARAKAQVVSATLTWRQWPPTQEEIKHGFHKVSLVSGAQMEAPQKEMFEFSRREEVEVNGFATQEEETVNCQGPRDTAGSKNFQSHGPIFSKKYIPPPKEKRPEGRLKEAVDQSDGSRQAPRTEPPCVGAMARTELLVPLPGPREPSPHPGVGLTSGSSRSLEEYRVTRTVRTTTVVGGHVDRRMSSSVTVRPVSSGEALPRGRQVSRMVPPVVVGSPPGSPSRSQAVKVLSNLVPAGHSPPASHLPRPTAGGPRSTGLGSTVGAALRQLPETGTAELKDSSALASTGIPASAHLPKNQDAPAACPDRDQGRAPDARACELWQVLGAPSSTELPLQTSQGQASVPSSPRLETHVPSPGLTHPAKQPVVPTHPGARLTPLVLPPKKRTGPWTPLLPPSCPW

SEQ ID NO: 10545 - DNA, 1608 bp, Homo sapiens
caagttatgccctgacctggaaattccccagagttgctaaaagaactgaatgggggatactgtacataagagcacttaagcaacttaaaatgtcacatgtagggacatatgcgtgtcatgtgaatagcagctgcattttgaagttgcaataagtgtgaggaaaatgtgcttgttagctcagctctagacagatccatggatagaaagacatagacatggatccccatccagctaagtatttgcaatccgcaggtgaagcctggaaacccagagaaatggacctgttccatccgtgacagaagcgctcccaggacctaaattaaagggatgttagaatgttttgagaatcttggcagggccattaggtagtgtttgtagcttttggatgcttttggtggagggaaaatgagatgggctcacttgggaggtctgcctgcagtttccatccaaatttctaatcaacgttgtggttttatcatccatttccggaatcattaccccttaaaatgtgaggaaaacgactctccttttcttcaactccccatcttttccaaataccgctgcgagtttttgttgccaacagcttttcccaatgtgcgtgtacttaccaacgtccagactcctccctcccatcggccagccttgcttggtctagctattattcaaaggggaacatgcgtgagatatcactttgtttttgccatctaatggattccaccccccaaagtatctgactttgacactcaggctcatctgcaggacccgagggtgtcttccctcccctcccgttggctggctaaatgggttaatagaatacattctcttttccttttccgtgttttgtctggcgtttgcaatgccaagatttttttccagatgtcccctatttcctatttccacataccgcacatgaatcatcatctggcagaggaatcgtgagaatccatgcgatcagtgtgcgttcccacattcacctacttttgtcttttttgatagttctttgaaaacaatgaatttttttaaaaatatgcctgaattcaagggtaaaatatcaacaatgtaccctagaaaagcccctggaagcagatctatgctaaatggtttattttattctgcacacgaggcccacccgtcgctggctcccctatgccttggacgtcactgatacacacacatcccgttcccgaacagggagagtgagctgcacattctcgtttccagctccacttcctagatctgcccaccgtaaaatctgcccttttgccatgcgctgtgggacctgttagactcaggagagaccatcatacaaattgatggctcttgatttgcagctgtatctggagcttaccgaatctagtgcagctttaaaaatagggagccgattctgtttccaagttcagaaggagcagcgatttggcatctaccggttcctgcccttcttttttgtcctgggaggaacgatggagtggatcatgattaaagtgcgcgtgggccaggagaccttctatgatgtctaccgtagaaaagcctcagaaagacagtatcagagaaggctggaagatgaatgagactgaacttcagcagtcaataaagtcaatatgaattttt

SEQ ID NO: 10546 - DNA, 1560 bp, Homo sapiens
  CDS (5)..(1558)
aacaatgctcattgaagctgcaaagggtggccatactaatgtagtttcttatctgttggattatccaaataatgttctgtcagttcccaccacagatgtgtctcagctccctccaccttctcaagatcagtctcaggtgccacgtgtgccaacgcatacacttgccatggttgtacctccccaggaacctgacagaacttcacaggagaactctcctgcccttttaggagtgcaaaaaggtacatccaagcagaagtccagttccctccaggtagcagatcaggacctactgccatcttttcacccataccagcctttggagtgcatagtagaggagactgaaggcaagctgaatgaactgggacaaagaattagtgctattgaaaaagcacagcttaagtcactggagttaattcaaggtgaacctctgaacaaagataagatagaagaacttaaaaagaacagagaagagcaagtccagaagaagaagaaaatattgaaagaactgcagaaagtggaaaggcagttgcagatgaaaacacagcagcaatttaccaaagaatacttggaaaccaaaggtcagaaagacacagtgtctctacaccaacagtgctctcatagaggagtcttcccagaaggggaaggagatggtagtctcccagaggatcacttttcagagttacctcaggttgacacaatcttatttaaagataatgatgttgatgatgagcaacagtctccaccatcggcagaacagattgattttgtcccagtccagcctttatcatctccacagtgtaacttttccagtgacttaggttctaatgggacaaattctcttgaacttcagaaagtatcaggtaatcagcagattgtaggacagcctcagattgctattactggacatgatcaggggctgttagttcaagaaccagatggactaatggttgcaactccagctcagacgcttaccgacactcttgatgacctgatagcagctgtgagtaccagagtgcccactggttccaacagttcttctcagaccacagagtgtcttacacctgaatcctgttcgcagactacaagcaatgtggcttcccaatcgatgcctcctgtgtatccttcagttgacattgatgcacatactgagagcaatcatgacacagcattaacactagcttgtgcaggtggtcatgaagaacttgtatctgtgctcattgcacgggatgccaaaattgaacacagagacaaaaaaggtttcacaccactaatcctggcagcaacagcagggcatgttggagttgttgaaatccttttggataaaggtggagatatagaagcacagtctgaacgaactaaggatactccgctttcattggcatgttctggtggacgtcaggaggtggtagacttgctgctggctcgaggtgcaaataaagaacataggaacgtatctgattatacaccactgagtctagctgcgtctggaggatatgttaatatcattaagattctgcttaatgctggggcagaaattaattcaaggactgggagtaaact

SEQ ID NO: 10547 - protein, 518 aa, Homo sapiens
MLIEAAKGGHTNVVSYLLDYPNNVLSVPTTDVSQLPPPSQDQSQVPRVPTHTLAMVVPPQEPDRTSQENSPALLGVQKGTSKQKSSSLQVADQDLLPSFHPYQPLECIVEETEGKLNELGQRISAIEKAQLKSLELIQGEPLNKDKIEELKKNREEQVQKKKKILKELQKVERQLQMKTQQQFTKEYLETKGQKDTVSLHQQCSHRGVFPEGEGDGSLPEDHFSELPQVDTILFKDNDVDDEQQSPPSAEQIDFVPVQPLSSPQCNFSSDLGSNGTNSLELQKVSGNQQIVGQPQIAITGHDQGLLVQEPDGLMVATPAQTLTDTLDDLIAAVSTRVPTGSNSSSQTTECLTPESCSQTTSNVASQSMPPVYPSVDIDAHTESNHDTALTLACAGGHEELVSVLIARDAKIEHRDKKGFTPLILAATAGHVGVVEILLDKGGDIEAQSERTKDTPLSLACSGGRQEVVDLLLARGANKEHRNVSDYTPLSLAASGGYVNIIKILLNAGAEINSRTGSK

SEQ ID NO: 10548 - DNA, 1739 bp, Homo sapiens
  CDS (55)..(402)
gaaaactcacagataaagttatagttatttcagggttctgaaaagacgcagaacatgaagggactcagaagtctggcagcaacaaccttggctcttttcctggtgtttgttttcctgggaaactccagctgcgctccgcagagactgttggagagaaggaactggactcctcaagctatgctctacctgaaaggggcacagggtcgccgcttcatctccgaccagagccggagaaaggacctctccgaccggccactgccggaaagacgaagcccaaatccccaactactaactattccggaggcagcaaccatcttactggcgtcccttcagaaatcaccagaagatgaagaaaaaaactttgatcaaaccagattcctggaagacagtctgcttaactggtgaaaatatactggattatgtttaattatggttctattctctttgaaaacatgaaccatgtgaataaaacctttggacccttttattccatttgtaatcttaagaacacacacagatagttttattctttcagaaacagaatatatataggatgcttagctgagaacatcatcttctttcattgcttcaggtcctgtttagatgaccaaaaatgttttcagatcaccttgtgtcttactcttgagtttcttagaatatttataattataaggctgaagactaaagtgttctttccttttaactatagccagtacctgtcttgatcttagttgtgtttttttttttttcattttgttacccacttgcattttgttttcactcagcagaaattctccttctctgttttccttttatcccatccccaagaatgtggaaggaaggtgagaaacatggcaggatgggaaataggagagtatgactctctatagctcatccaggagtaatcaattaagaagataaattggatgactgtggagaagctctgtgataggaacacttcagtgtggttgctgagaggagacagtcattgaggtagaaggtttgccaaagatccagagctcagagctccctttgtgctctttgggaattaccttgcattcagtttagaaacatggatctaaaagttactgggaaataagcagatggagacacactctgttgtttacgtattggaagaagggaacaagccagttttgttagaggtaactcattttccatgaccaaacagactcaacagattcaagtactctgcttactctaattgactagactctaggttttatttgacatcatagcattacataaatcactctgataacataagtgcacagtaatatgcctgatctcttcctttttaaaagccaacttgagttcagtaccatctgaatacacacacatgcacatatacccacacacgcatacacacctactcctgtggcaaacataataatgtatttatttagaattataatatgaccatcatgttaattattttttacctaatcagagttgttattgacaaatgtcataagtggaaagtattaattcttattgtcatcagtatttagccattatttagtagctcaagaatatctttatgtgaatgtctctgtaacttggaattgcaatttcactgtgttaagtaatcagaactctgcttataagatttatctgtatcttgtttcataatttaataatgaaactaaattcaagttaatgtaatgttgatctccgtcgaaaaataacttgtgagcattaaaatatctgtatggcattat

SEQ ID NO: 10549 - protein, 116 aa, Homo sapiens
MKGLRSLAATTLALFLVFVFLGNSSCAPQRLLERRNWTPQAMLYLKGAQGRRFISDQSRRKDLSDRPLPERRSPNPQLLTIPEAATILLASLQKSPEDEEKNFDQTRFLEDSLLNW

SEQ ID NO: 10550 - DNA, 1330 bp, Homo sapiens
agtctgggtctggagcctgagccctgcggaacctcggcgctcggccccaccccgcccgtacctgcacttatttattgttgttatttcttaccgcggagccccgcagtcgggtcctcccgcccgctcccgcgcagcgctagcattctccagtccctcagtcccttcccgcgcggtgcgccgcagccgaggcgatgcgcctcattcagaacatgtgcaccatcgccgagtaccccgcgccgggcaacgccgcggcctccgactgctgtgtgggcgccgccggccgccgcctggtcaagatcgccgtggtgggcgccagcggcgtgggcaagaccggtgagtcgtcgcgcttagccctgggtctggtcttggacgacccctgacgggagttgaggctgaacaaggcgtggggagcggtgggagctgcagcccgaccgctctccgtccccgcgcagggagccgctgccccttgggagtgggcttagccgttgtctacgccacccgcctgcttccacagacgggggaaacaaggatcaagaatggccaggcagctttctggggaccaccggcaccgccgccatcagaactttggggtgtttgagcctctggcaatgcctggcacagaaaggggagttagtgaagctagcccccctgggaggtcttgaaggttaggaagacatgggtctactggaaggcttaggtgtggctcagccgggctcagaggagggggtgggcccagtgagccttccagctgcacagagccataattcacgatgccttctagccccctcctttttgtctggaaagaagggtcaaggagctacagggtaggaatttcacttggtggccatctatggctttctttgggagaactgttttccaggcagggggtggggtggagaacaatctaacttccaaggttaacactttgacgttcttttttctgacgtgcagcactggtggtccggttcctcaccaaacgattcatcggtgactatgaaagaaatgcaggtgagacaatgcatttgagaaaaattctgtcccattgcaggaggactgcggttcccattttccagcgcttcccagggaggttctttcagtgacagtccgagcctgaggatcccgccacttaaaactttccccagtccccagccctccatggcgcccccctcccataactaccatctggcctcattccattccaagcccattcatcattttatcaagtgcctgaaagtattccccttggtatgttttaactatagtgaccccagttggaagcaccctttgtagtcaagaacctctcccttcaaaacactcctgcaaaagtcgt

SEQ ID NO: 10551 - DNA, 1507 bp, Homo sapiens
  CDS (101)..(571)
gacaccctctccgcgatgactgtgagtggtccagggacccccgagccccggccggccacccccggggccagctcagtggagcagctgcggaaggagggcaatgagctgttcaaatgtggagactacgggggcgccctggcggcctacactcaggccctgggtctggacgcgacgccccaggaccaggccgttctgcaccggaaccgggccgcctgccacctcaagctggaagattacgacaaagcagaaacagaggcatccaaaggtaggggaatggtgggccctggtgtggagctgtagggcttctgtggtgggcaaggactctgggaccgctgcaccgtcacattctcctcctttggccccagagacacatctgccttctttctttcccactgcctcgggcctttccttttctgcagctaccctcaccttttctgaggctgaagcaccgagccccacattcgtcccccccaccttcttctggcctttcctcgagatctttccctactgctcttgcctggagacagtggcctcatgggtgctgacagcgctcctgtttgtgctcagccattgaaaaggatggtggggatgtcaaagcactctaccggcggagccaagccctagagaagctgggccgcctggaccaggctgtccttgacctgcagagatgtgtgagcttggagcccaagaacaaagttttccaggaggccttgcggaacatcgggggccagattcaggagaaggtgcgatacatgtcctcgacggatgccaaagtggaacagatgtttcagatactgttggacccagaagagaagggcactgagaaaaagcaaaaggcttctcagaacctggtggtgctggccagggaggatgctggagcggagaagatcttccggagtaatggggttcagctcttgcaacgtttactggacatgggagagactgacctcatgctggcggctctgcgtacgctggttggcatttgctctgagcatcagtcacgggtaggtggagtggagaggctggttacagcttcagtccctttgtctgtctgtccatccattcctccatccacccatctgtccatccgcccatctgcccgtccatccatccatccactcttccaccctctaccccttaccttattctaaaaagaacttaggtaggttatggtgcctcacacctgtaatcccagcactttggggggctgaggcaggtggatcacttgaggtcaggagttcaagaccagcctggccaacaaggcgaaaccctgtctctactaaaaataaaaaaattagccgggcatggtagtgcacgcctgtaatcccagctactcaggaggctgaggcacgagacttgcttgaacccaggaggtggaggttgtggtgagctgagatcgcgccactgcactccagcctgggtgacagagcgagactatctcagaaacaaaacaaaacaaaacaacaaaaaaagaaaaggcagagtacaaggagatacatgtaacaag

SEQ ID NO: 10552 - protein, 157 aa, Homo sapiens
MSCSNVETTGAPWRPTLRPWVWTRRPRTRPFCTGTGPPATSSWKITTKQKQRHPKVGEWWALVWSCRASVVGKDSGTAAPSHSPPLAPETHLPSFFPTASGLSFSAATLTFSEAEAPSPTFVPPTFFWPFLEIFPYCSCLETVASWVLTALLFVLSH

SEQ ID NO: 10553 - DNA, 1531 bp, Homo sapiens
  CDS (54)..(671)
agagggagacccgcggcaaccccggcaacccagggctcggcgtcgctgccaccatgacgggaagcaatatgtcggacgccttggccaacgccgtgtgccagcgctgccaggcccgcttctcccccgccgagcgcattgtcaacagcaatggggagctgtaccatgagcactgcttcgtgtgtgcccagtgcttccggcccttccccgaggggctcttctatgagtttgaaggccggaagtactgcgaacacgacttccaaatgctgtttgctccgtgctgtggatcctgcggtgagttcatcattggccgcgtcatcaaggccaagtgtgagaagccattcctggggcaccggcactatgagaagaagggcctggcctactgcgagactcactacaaccagctcttcggggacgtctgctacaactgcagccatgtgattgaaggcgatgtggtgtcggccctcaacaaggcctggtgtgtgagctgcttctcctgctccacctgcaacagcaagctcaccctgaagaacaagtttgtggagttcgacatgaagcccgtgtgtaagaggtgctacgagaagttcccgctggagctgaagaagcggctgaagaagctgtcggagctgacctcccgcaaggcccagcccaaggccacagacctcaactctgcctgaaggccctcttgcgcagctgcctctcggcccctccgccttctcccctcccgctgtccatgcttggccccctcgtccccatccacctgtgccctccgcatcttaccctccctttctctttcctcattgccttctcccttcctgttccctcatccctgccttccccatgtctctcctctccttggccgtggcttctgtctgtgaggaggcaggagctggggagtgggagcctatgaccccacgtctgacagccatgtccacctgtgcccacagcttccgcccacagacctccagggacaggagcaaattgcaccacagctccccgcctggcctggccctccccaggcggctcagtggctcatgctgtcctgtgagagcccctgccccagagcggccccactaagcgcatgtggctcctgggctacccacagccagggcagcctgctggagccacagggccagggccatgcagatggaggcctctgggagccacctccaatccctcaccactcactcaaccagtggcacagtgtccttgtgcccacactgagccagcaagtcctgctgtccacacccacaagctacctggagggacaggacccacctccatccttcggaaggccttcctggaatcccaccttggcctccgccctcggttccgccccgcccctctccccccgaccttggggcttgtgtcgagcccttgggtggggccaggaggaggtgatggcgtcagaggaggtgtggtcagaggtgacttgttcccacctccagggaggacgcttcgtcttcggccagcgcagacctggtgtttgtttgtttgttgggctcacgcctgcacaatgaaggcttgttcacac

SEQ ID NO: 10554 - protein, 206 aa, Homo sapiens
MTGSNMSDALANAVCQRCQARFSPAERIVNSNGELYHEHCFVCAQCFRPFPEGLFYEFEGRKYCEHDFQMLFAPCCGSCGEFIIGRVIKAKCEKPFLGHRHYEKKGLAYCETHYNQLFGDVCYNCSHVIEGDVVSALNKAWCVSCFSCSTCNSKLTLKNKFVEFDMKPVCKRCYEKFPLELKKRLKKLSELTSRKAQPKATDLNSA

SEQ ID NO: 10555 - DNA, 1561 bp, Homo sapiens
tcttgaactcctgacctcaagtgatccacccaccttggcctcccaaagtgctggaattacaggtgtgagccaccgtgcccagccaaaattcttaaagaataaaccaaatcttaaacaatcttccaattagaattattttcagccaaattatcatttaagtgtgagagtaaaataaagacattttcttttttcctttctctttttttttttttttttgagatggagtctcgctctgtcgcccaggctagagtgcagtggtgcaatctcggctcactgcaagctctgcctcaggggttcatgccattctccagcctcagcctcccaagtagccgggactacaggcgcccaccaccatgcctgactaattttttttctatttttagtagagacagggtttcaccgtgttagccaggatggtctcaatctcctgacctcgtgatctgcctgcctcggcctcccaaagtgttaggattacaggtgtgagccaccgcgcccggccgataatgtgttgttttaaggcattaattttgtggtacatacaaaagtaatttgtgtgtacatacatgcatatatacatatatatgtacacacacatatatttgttaaacctacacacagtgtttattttattatttcgataaaactattattcacagctgagccttgtggtgcactgtaatagtttcttttcgtttttttttccctgaagttaataattaccttgtttctcatctgccttatttttttgtacctgttgctaattcctaccacaacttctaatataattttatttttctttaacaatactgttaccttaggacttctttttctttttttctttttaactgacacataataattgtgcatctctatggggtacaatgtgatgtttcaatacatgcatacattgtgtaatgatcaaaacaggatagttggtatatccatcacctccagcatttatcacttctttgtggtgggcctaccacactttccaatagccatcagtattgctttccacacgggcagtcacagcaggtaaaagatgtttcagttccattttttaagttatctatcctctttcactctgggctagttgctttctaggcacattgtagctgatgctctgtgacttccttttgtggtcatctttggaattcccattactttccggttggaatctctgttttctggctttcgtgtcctcctcatgcttggctcactcccctcattagagcacatcttccaggacacacatctgtccatatcaaaatccattcatggctgggcacagtggctcacgcctctaatcccaggactttgggaggccgaggcgggtggatcacctgaggttaggagtttgagaccagcctggccaacatggcaaaatcccatctctactaaaaatgcaaaaattagccgggcatggcggcgggtgcctgtaatcccagctactcgtgaggctgaggcaggagaattgcttgaacccacaaggcagaggttgtggtgagccgagaatgcgccactgcactccagcctgggctagagagcaagggtccatctc

SEQ ID NO: 10556 - DNA, 1543 bp, Homo sapiens
gaataaaatgtacaaatttgttgtgtttttttatgttctaataatactgagacttctaggtcttaggttaatttttaggaagatcttgcatgccatcaggagtaaattttattgtggttcttaatctgaagttttcaagctctgaaattcataatccgcagtgtcagattacgtagaggaagatcttacaacattccatgtcaaatctgttaccatttattggcatttagttttcatttaagaattgaacataattatttttattgtagctatatagcatgtcagattaaatcatttacaacaaaaggggtgtgaacctaagactatttaaatgtcttatgagaaaatttcataaagccattctcttgtcattcaggtccagaaacaaattttaaactgagtgagagtctatagaatccatactgcagatgggtcatgaaatgtgaccaaatgtgtttcaaaaattgatggtgtattacctgctattgtaattgcttagtgcttggctaatttccaaattattgcataatatgttctaccttaagaaaacaggtttatgtaacaaagtaatggtgttgaatggatgatgtcagttcatgggcctttagcatagttttaagcatcattttttttttttttttttgaaagtgtgttagcatcttgttactcaaaggataagacagacaataatacttcactgaatattaataatctttactagtttacctcctctgctctttgccacccgataactggatatcttttccttcaaaggaccctaaactgattgaaatttaagatatgtatcaaaaacattatttcatttaatgcacatctgttttgctgtttttgagcagtgtgcagtttagggttcatgataaatcattgaaccacatgtgtaacaactgaatgccaaatcttaaactcattagaaaaataacaaattaggttttgacacgcattcttaattggaataatggatcaaaaatagtggttcatgaccttaccaaacacccttgctactaataaaatcaaataacacttagaagggtatgtatttttagttagggtttcttgatcttggaggatgtttgaaagttaaaaattgaatttggtaaccaaaggactgatttatgggtctttcctatcttaaccaacgttttcttagttacctagatggccaagtacagtgcctggtatgtagtaagactcagtaaaaaagtggatttttaaaaataactcccaaagtgaatagtcaaaaatcctgttagcaaactgttatatattgctaagtttgttcttttaacagctggaatttattaagatgcattattttgattttattcactgcctaaaacactttgggtggtattgatggagttggtggattttcctccaagtgattaaatgaaatttgacgtatcttttcatccaaagttttgtacatcatgttttctaacggaaaaaaatgttaatatggcttttttgtattactaaaaatagctttgagattaaggaaaaataaataactcttgtacagttc

SEQ ID NO: 10557 - DNA, 1495 bp, Homo sapiens
ttccttgttaaccaagttacttttaaaaagatcctttttaaactgattcttcctcagctgttcttcagccctctatactttttcataaaagtcaccagtgactgcccagttgccaaatagaatgaatacctttcagtgctcagctgtcttgacctctccgcagcatttcacaccacccaccaaccctcagtgaaacaacctcctcccttagcttttatgacaccacaagtctctggattctcagagaatccagaaaaacaagtctctggattctctcctcttacctctcagcccacacaggctgagctgtccttgaaacctagatgggggaaatgtctgtggctgtctgtggtctcttcttttcaggagttgggtagggaggaagaatcacagctgctcctgcttcctctgtctgtctctctatttcctgagtcccttccttttcctgaactcagttctcctcatgccaaccatgtttatgagctcctgctgggaggacagcatctgtgagtccttccctctgtctctcccagacaacacagaggttttagcctgtttgctaagagaccccatctaagtcagcccaagggtgtggattaggttttacagcatccaggccgcagtctggctaaactggattaccaggctggtgggcagctcctcaccatgatcctgcaccagttagagcctgctgtagttgggaaggagcctgggattgtggtaagatgtgtttccgtgcatgtcagtgctgctaaccaggaggagaacctggcagggtgggtgcctgctgctgataacattcggatggagggagactagggagcgcggtggctgctcccttgctggggctcagctggagtcagcatgactccttatatcagggcctttcccacctgtgctgatcaccaccacctgcttgctccagttgtttctggagttggaggcagctattggttgctttcttggaggtaaggaggtatatactagaaagatatctgatttgagagtctgaacaccaaaatttttggctctttccattatgagctgtgtaaccttggatacagtttcctcatctataaagttgtggtgggagaatggctgagaacagtgatctctcagctctccagctgtaaagatgttaattatgattttaactctcaagatcaggccacataaggaacaggggaattccaggggtgggacacagctgggggagtccagaccagggcagggaaaggagactcacaagccaaacagagctgctttggggaaagttcttatcagctggtgctgcttcctgagccatatgcccattcctcaagctgtacccctttcttggctatgtaggatgagttcctcctaggcccttgttaggagtggctattggattctaagcggttggggcatgagggaggatattttaaagggaagtatagctgattttaaaagaacctatacattcaagaacaaataaaaaacagcacttttctttacc

SEQ ID NO: 10558 - DNA, 2132 bp, Homo sapiens
  CDS (1507)..(1776)
ataggccagtgccggggtttaagggccaggaaaggaagcattcagggaatttaggtgtagccagaagaaaatcaggtcctggctccccagaagcaagagagttcaagtgaaggaaggaggaggttcctggatgtggatgtcatcatttctgggaacactcttaaatggagactcagatttcttagccaaaatttagggaggatccagaagaaaccaaagacgaagcatcccagttcttgggtatttcctgaaacagaagaaaatgacaaaggcccaggaatcactgaccctggaggatgtggctgtggacttcacctgggaggagtggcagttcctgagccctgctcagaaggacctgtaccgggatgtgatgttggagaactacagcaaccttgtgtcagtggggtatcaagccggcaaacctgatgccctcaccaagttggaacaaggagaaccactatggacactagaagatgaaatccacagtccagcccacccagaaattgagaaagctgatgatcatctgcagcagcccttgcaaaaccaaaaaatactgaagaggacgggacaacgctatgaacacggaagaactttgaaatcatatttaggtttaaccaaccagagcagaagatacaacagaaaggagcctgctgagtttaatggagatggagcttttctccatgataatcatgaacaaatgcctacggaaattgaattccctgaaagtagaaaacccatcagcaccaagtcacaattccttaaacatcagcaaacacacaacatagagaaagcccatgaatgcactgactgtgggaaagctttcctcaagaagtctcagctcactgagcataagagaattcatacaggaaagaaaccccacgtgtgtagcttgtgtgggaaagccttctacaagaagtacaggctcactgaacacgagagagctcacagaggagagaaaccccacgggtgtagcttgtgtgggaaagccttctacaagaggtacaggctcactgaacacgagagagctcacaaaggagaaaaccatacgggtgcagtgaatgtgggaaagccttccccaggaaatctgagcttactgaacatcaaaggattcacacgggaattaagccccatcaatgcagcgaatgtgggagagctttctccagaaaatcactactcgttgtacatcagcgaactcatacaggagagaagcctcatacatgcagtgaatgtggaaaaggcttcattcagaagggcaatctcaacatacatcaacgaactcacactggagagaaaccttatggatgcattgactgtggcaaggccttcagccagaagtcttgccttgtagcacatcagagatatcatacaggaaagactccctttgtatgtcctgaatgtgggcaaccctgttcacagaagtcaggactcattagacatcagaaaattcactcaggagagaaaccctataaatgcagtgactgtgggaaagccttccttacaaagacaatgctcattgtacatcacagaactcacacgggagagagaccctatggctgtgatgagtgtgagaaagcttacttctatatgtcttgccttgttaaacataagagaatacactcaagggagaaacggggggattcagtgaaggtggaaaatccttccacagcaagtcacagcttaagtcctagtgaacatgtgcaggggaaaagccctgttaatatggtaactgtggcaatggtggcagggcagtgtgagtttgcccacatcctgcattcatgataaacagtttgctgtttgatcatatagcctccagcggaatgctgagtttgtcatgtcccatgggcctttggctccctgcactaatatgtatagtagggtttacaagatatgaaatatattttacttttttatatcttataaacctcactacccctcccacaatattgtttttcatttactatcttgatcatagagtttggctggggaggggggcagttttagaggcttccacttggtgttcctcagaatgatatctcttactccgggggccaaggtaggggttagcttttgttctctttgtagtttagattgtatctcttgccttgttcaagttcacaaatctttttgtgtat

SEQ ID NO: 10559 - protein, 90 aa, Homo sapiens [sequence omitted]

SEQ ID NO: 10560 - DNA, 1574 bp, Homo sapiens
  CDS (304)..(603)
aaaaaggagaggaggggctcctgggaacagggctcagaggcaggcgaggtccctgattcactcactcactcactcattcattcgttcccacacacactaagcagacatgtgcccagcacctcctttgtgccaggccccatctggatgtccatgccaggagagaggcaggcagacctgggcctcccaggatggaggacggacgaagaccactgagcatgatgagaggggaaaagctgaaatgtgagtgggaagctcctgctcaccacggcagccccctggctagcacggcctggcagagtccatatggaaggaaggaaccaggttctatgggatcatagaggagcggacgtgatgcagcctggaaaaggcgccctggagctgagggtagggatgccaataggcattagccaggctgtgggtgggaggtggggagaggggatccctgcaagaggcaccaaggcacaaaaagcagcttcctggaggggaggttcggaggtctctgagcatcctatgaaatcccatagtgcttggccttggatcttcccaggaagcatgagacccagccaagctgaggacgaggctcagactctggcaggcgcatggtgaccccttcctgaggacttccagagggatgggtggagaaggacatgagaggtgccttcctcccatcctctgccatcttggtacttggtggacaccgcatagggtcccccagtccttcctgcactgctctgaccctgtgaaaggaccatgagttggttgtactctgaaaagtctcccaaccccaatataggctgacccagcaaagactccgcttatcctcattttaccaatggggaaactgaggctccctaccgtcaggtgactgccttaaggcgtcacaacaaactcacaccagggccgattccagggtgttccacttttccagtgactatcatcttgggccatggcaggcccgtgattggaggagatgagaaggaagtggggaagaacttggtcttcaaaaatagcaggcaggaaggatccggatcagcacaggggattggacttgggggcttggaccttgatggtaggggacaggaccatgatggggttgaacagccatccaacctagaccctttttgctcctaacactcccatcccactctcagcataatgtagtgggaagtcaggagggttctgcagtatctgtgggaaggacccatcacggcctgtggtcttcctcgcctactgttggctcctttctttgagtcagaagcagctggctcaggccaggcggggtggctcatgcctgtaattccagcactttaggaggccaaggcaggtggatcgcttgaggccaggaattcgagaccagcctggccaacatggtgaaaccccgtctctactaaaaatacaaaaaaattagcttgacatggtggctcacgcctgtaatcccttagctactcaggaggctgaggcaggagaatcacttgaacctggcaggtggaggttacagtgggccaagatcgtgccattgcactccagcctgggcaatagagtgagactctgtctcaaaacaaataaacaacaac

SEQ ID NO: 10561 - protein, 100 aa, Homo sapiens
MEGRNQVLWDHRGADVMQPGKGALELRVGMPIGISQAVGGRWGEGIPARGTKAQKAASWRGGSEVSEHPMKSHSAWPWIFPGSMRPSQAEDEAQTLAGAW

SEQ ID NO: 10562 - DNA, 1796 bp, Homo sapiens
  CDS (208)..(744)
agtgggctcgaaacaaagggctgtccggtggggattcgtcgcggcgccttctgagtggtcgggtcgaggcttctcggcctagcagtgccctcgctgcgcgatctcaggcgggttctcctcggctccgcgcagcccgcgccgcggtgggggacccggcgcagcggcacctgctgccgagggaccccgcggcccgccccggtgctcgtgatggggctgatcttcgccaaactgtggagcctcttctgtaaccaagaacacaaagtaattatagtgggactggataatgcagggaaaaccaccattctttaccaattcttaatgaatgaagtggttcatacttctccaaccataggaagcaatgttgaagaaatagttgtgaagaacactcattttcttatgtgggatattggtggtcaggagtctctgcgatcatcctggaacacatattactcaaatacagagttcatcattcttgttgttgatagcattgacagggaacgactagctattacaaaagaagaattatacagaatgttggctcatgaggatttacggaaggctgcagtccttatctttgcaaataaacaggatatgaaagggtgtatgacagcagctgaaatctcgaaatacctcacccttagttcaattaaggatcatccatggcacattcaatcctgctgtgctctcacaggagaagggttatgccaaggtctagagtggatgacctcccggattggtgtgagataacttttttgcttgaaagagactgctctatttattctgtgacatgaacattttttcctagtacctttggctgctaaggcagcagcatgtttaatttataacaacacaaacctctgagagcaacacttgaatcaagtgcagctgaactggaacataaaagattttttcttaacttttttttttttaacacactaatcttcagttggatgaatgtaatgtataactatgttttcagcaacaattcttctgtttattctaattaatcagtgactgccttgtaagaaatgtttgtcatatgcgagatgtcttctgaaatattcttataaccttaatgaccaattgctttcaattcttgaccagcactccctcccaaccagagaattactggtttgatagagtagtcttggaaaccatcaggtactgcctgcagacttctccagcactaaatatatttgttccctctataaaccattcatctttcggacagaacttactgtaaagaaagaaatctgcctagaggatatatgtaaggaagattccacatcatgagtacttgccttttaactttcccccacattactgttgagtcatggaataatgtttaagttgttatttgcatggaaattaagtaggctgtttatttatctaaaggaatcaagtccactcttctgcctgcaacatttgttcaaaaactaaccgaggtaaaatatttatttgaaagcccaactttgatgttaaatattcttgaataaatctgttattttaagaatatcacattattcaatgcatataaaactatcagaagttagtaaatcataccagcactaaaaataagacaattggaatatattttagcatcagtttacaaacaactttattatcaacagaaattttagctcttttctttgcaagatatatcacagctgctttgggcagtagctgaagccgaagtatgaacagtccattttgtttcttaaaatttgaagtcgtgtctgtcatagcatttttactaccagcaatatgttacttaaaaaactacatggctttccttg

SEQ ID NO: 10563 - protein, 179 aa, Homo sapiens
MGLIFAKLWSLFCNQEHKVIIVGLDNAGKTTILYQFLMNEVVHTSPTIGSNVEEIVVKNTHFLMWDIGGQESLRSSWNTYYSNTEFIILVVDSIDRERLAITKEELYRMLAHEDLRKAAVLIFANKQDMKGCMTAAEISKYLTLSSIKDHPWHIQSCCALTGEGLCQGLEWMTSRIGVR

SEQ ID NO: 10564 - DNA, 1534 bp, Homo sapiens
  CDS (179)..(1324)
tttcttgctgtaccccggcgatggaggcgccggcttcggagtgcgcccgccgccgcagcagcagcgctcctggaggaccccgccgtcccccggctcaccgctgcccttcctgctgctgagctacccgagcggcggcggcggcagcagcggcagcggcaagcaccatcctaattatctcatggctaatgaacgcatgaacctcatgaacatggccaagctgagtatcaagggcttgattgaatcagctctgaacctggggaggactcttgactctgactatgcacctctccagcaattctttgtggtgatggagcactgtctgaaacatggcttgaaagctaaaaaaacttttctcggacaaaataaatccttctgggggcctctagaactggtagaaaagcttgttccagaagccgcagagataacagcaagtgttaaagatcttccaggacttaagacaccagtaggtagaggaagagcctggcttcgtttggcattaatgcaaaagaaactttcagaatatatgaaagctttgatcaataagaaagaacttctcagtgaattctacgaacccaatgccctcatgatggaagaagaaggagccataattgctggtctgttggtgggtctgaatgtcattgatgccaatttctgtatgaaaggagaagacttggactctcaggttggagttatagatttttcaatgtatctcaaggacgggaacagcagtaaaggtactgaaggagacggtcagattactgcaattctggaccagaagaactatgtagaagaactgaacagacatttgaatgctactgtaaacaaccttcaggcaaaagtagatgcattagaaaaatccaacactaaactgacagaggagcttgcagttgcaaacaacaggatcattaccttacaagaagaaatggaacgagttaaagaggaaagttcctacatactggaatccaatcggaagggtcccaagcaagatagaactgcagaagggcaagcactaagtgaagcaagaaagcatttaaaagaagagacacaattacgattggatgttgagaaagaactggagatgcagatcagcatgaggcaggagatggaattggctatgaagatgctggagaaggatgtctgtgagaagcaggatgccctggtatctcttcggcagcagttggatgacctcagagctctcaagcatgaacttgcctttaagctgcagagttcagacttaggagtaaaacagaaaagtgaactaaacagtcgcttggaagagaagactaatcagatggctgctaccattaaacaacttgaacaaaggtaaaagtcctgtttctttaatgaaacactttggattgtcagtgctgaagtgaaaagaatgtgctgtacattcggcaaatagaatatacgtgaaattcttccaaattagcatcagacattctggtagaaaaaagccagttgaatgttatgtgtgttttctaaggtatgactgaaatgtttttaggaaatgtcaatcacttgactagccttt

SEQ ID NO: 10565 - protein, 382 aa, Homo sapiens
MANERMNLMNMAKLSIKGLIESALNLGRTLDSDYAPLQQFFVVMEHCLKHGLKAKKTFLGQNKSFWGPLELVEKLVPEAAEITASVKDLPGLKTPVGRGRAWLRLALMQKKLSEYMKALINKKELLSEFYEPNALMMEEEGAIIAGLLVGLNVIDANFCMKGEDLDSQVGVIDFSMYLKDGNSSKGTEGDGQITAILDQKNYVEELNRHLNATVNNLQAKVDALEKSNTKLTEELAVANNRIITLQEEMERVKEESSYILESNRKGPKQDRTAEGQALSEARKHLKEETQLRLDVEKELEMQISMRQEMELAMKMLEKDVCEKQDALVSLRQQLDDLRALKHELAFKLQSSDLGVKQKSELNSRLEEKTNQMAATIKQLEQR

SEQ ID NO: 10566 - DNA, 1813 bp, Homo sapiens
tattatcatggctacaaagtcttgtgtggtctgggccacatcctgtgccaggctccctttcattgtctatattccagtcaagctggccttcaaaatttcagcacattgggtctttctgccacaggcccttgcacatacatgcttttccctctgtacatgtgattttctttcatccccgctttccaaagctaactctgactcatccttcagactgcatcttaatgattacttccttctggaagactcccctaattttcacaactagatgagctctcccttatatgttgaaaacaagtatttcttgtgtgaacagaaatgtttaatgtctgccttcccaactcagccacaagctctgtgaggatggggactcagtctttgcatccctcagagcctagcatagtctcagttaatacgtgatagctggagcgtgacatttcattaggaacagtgaggctagttgagaaattatacctcaccagtatataggagagtaccattaggaattcttaatgggatgaaaacctgaattcatgtctagaccctgccacctgctggctgtgctgttttaaataaattgcagatcctctcagagcctgtttcctcatatataaaataatggggatcctaacagccccctcatatggttgtagcaggaatttaattaaataatatatggaaaagcatttttttaactgtaaaaccatacataaatatcctttgtcacttttcccagtgcatgacacactgggtcattaaacatctattggatgggtggatggttggatagatggacagacagattaacagttagggggccagtatgagtgacaagaggagaacttggcatatggaaagcatgatggaagccagaaaaaggagagacttcccagaagtaggaggaggcttgttgattcatccacagtgtcacatgcagtagagcaggcaggagaatgaggggggaaaatcatttaacctgggtggaaggaaatcactggtgacctccagctgattcctcctcagccttttcatgttatctgggctttcaatgacatgccttaattgtaacttaatcactttactgatttctatctttgggggggggcggaaatcaaattgatttgcacatatggcaaaattggtaagattactccagctgctgccagcaggtgctgacaagtaaagaactgaatgtcagagaataagaaaatacactaaacatttattttaataaggcctagaaaccttagttatttaataaattgccatggataattggtttcagtttctagagttgtttcatctttaactccctgtgttccagaaggaatcgtgctggatgtgtagacagggccttgtggtttgagacctatctgagctatcacacatttctctgagcattttcctgtctctctgatcacaccccacttcctgccaccactcccagcatccacctgggataggtcactctgacatacacacaaacacacacacacacacacacacacacacacacacacacactcactatccaagctgccagtcttcttattggctcctcctccagcgaggaggcttaagcctcacctccctgctgggccctgatcaagctggtctgtttgtgtatgaatcttgggagtgagtggcccaagctggatctgagcccagcatttatcatctcagcgctgcctcccacagaagaaggaagacataatgaataaatgaaaccccatgactgtatcaacattcatcaacccattactccaaacttggctgataaaattgggtacctggattaaaaaaaaaaaaaagtaag

SEQ ID NO: 10567 - DNA, 1674 bp, Homo sapiens
  CDS (82)..(1227)
aaattgggagggcttcttgcaggctgctgggctggggctaagggctgctcagtttccttcagcggggcactgggaagcgccatggcactgcagggcatctcggtcatggagctgtccggcctggccccgggcccgttctgtgctatggtcctggctgacttcggggcgcgtgtggtacgcgtggaccggcccggctcccgctacgacgtgagccgcttgggccggggcaagcgctcgctagtgctggacctgaagcagccgcggggagccgccgtgctgcggcgtctgtgcaagcggtcggatgtgctgctggagcccttccgccgcggtgtcatggagaaactccagctgggcccagagattctgcagcgggaaaatccaaggcttatttatgccaggctgagtggatttggccagtcaggaagcttctgccggttagctggccacgatatcaactatttggctttgtcaggtgttctctcaaaaattggcagaagtggtgagaatccgtatgccccgctgaatctcctggctgactttgctggtggtggccttatgtgtgcactgggcattataatggctctttttgaccgcacacgcactgacaagggtcaggtcattgatgcaaatatggtggaaggaacagcatatttaagttcttttctgtggaaaactcagaaatcgagtctgtgggaagcacctcgaggacagaacatgttggatggtggagcacctttctatacgacttacaggacagcagatggggaattcatggctgttggagcaatagaaccccagttctacgagctgctgatcaaaggacttggactaaagtctgatgaacttcccaatcagatgagcatggatgattggccagaaatgaagaagaagtttgcagatgtatttgcaaagaagacgaaggcagagtggtgtcaaatctttgacggcacagatgcctgtgtgactccggttctgacttttgaggaggttgttcatcatgatcacaacaaggaacggggctcgtttatcaccagtgaggagcaggacgtgagcccccgccctgcacctctgctgttaaacaccccagccatcccttctttcaaaagggatcctttcataggagaacacactgaggagatacttgaagaatttggattcagccgcgaagagatttgtcagcttaactcagataaaatcattgaaagtaataaggtaaaagctagtctctaacttccaggcccacggctcaagtgaatttgaatactgcatttacagtgtagagtaacacataacattgtatgcatggaaacatggaggaacagtattacagtgtcctaccactctaatcaagaaaagaattacagactctgattctacagtgatgattgaattctaaaaatggttatcattagggcttttgatttataaaactttgggtacttatactaaattatggtagttattctgccttccagtttgcttgatatatttgttgatattaagattcttgacttatattttgaatgggttctagtgaaaaaggaatgatatattcttgaagacatcgatatacatttatttacactcttgattctacaatgtagaaaatgaggaaatgccacaaattgtatggtgataaaagtcacgtgaaacagagtgattggttgcatccag

SEQ ID NO: 10568 - protein, 382 aa, Homo sapiens [sequence omitted]

SEQ ID NO: 10569 - DNA, 1578 bp, Homo sapiens
  CDS (24)..(1577)
ggtagtgaccctcgggcctcgccatgaagagccgctttagcaccattgacctccgcgccgtactcgcggagctgaatgctagcttgctaggaatgagagtaaacaatgtttatgatgtggataataagacataccttattcgtcttcaaaaaccggactttaaagctacacttttacttgaatctggcatacgaattcatacaacagaatttgagtggcctaagaatatgatgccgtctagttttgccatgaagtgccgaaaacatttgaagagtcggagattagtcagtgcaaaacagcttggtgtggatagaattgtagattttcaatttggaagtgatgaagctgcttaccatttaatcattgagctctatgatagggggaacattgttcttacagattatgagtacgtaattttaaatattctaaggtttcgaactgatgaggcagatgatgttaaatttgctgttcgtgaacgctatccacttgatcatgctagagctgctgaacctttgcttactttggaaaggttgactgaaatagtagccagcgcacctaagggtgaactactgaagagggtgcttaacccattacttccctatggaccagctctcattgaacactgtcttttagaaaatggattctcgggtaatgtcaaagtggatgaaaaacttgaaactaaagatattgaaaaagtacttgtttctctgcagaaagcagaagactatatgaaaacaacatccaacttcagtgggaagggatatatcattcagaaaagagaaataaaaccatgcttggaagcagataaaccagttgaagacatactgacgtatgaggaatttcatcctttcttgttttctcaacattcacaatgtccatatatagaatttgaatcatttgacaaggcggtggatgaattttattccaagatagaaggccagaaaattgacttaaaagctttacaacaggaaaagcaagcattgaagaaattagataatgttcgaaaggatcacgaaaacagattggaagctcttcagcaggctcaggaaatagacaaactgaaaggagagctcatagaaatgaacctacaaatagttgacagagccattcaggtagttcgaagtgctttagctaaccagatagattggacagaaattgggttaattgtgaaagaagcccaggctcaaggagaccctgttgcaagtgcaatcaaagaattaaaactacaaacaaaccatgttacaatgctgctaagaaatccatacttgttatcagaggaggaagatgatgatgttgatggtgacgtcaatgttgagaaaaatgaaactgaaccaccaaaaggaaaaaagaaaaaacaaaagaataaacagctgcagaagcctcagaaaaataagcccttacttgtagatgttgatctcagcttgtcagcatatgccaatgccaaaaagtattatgatcacaagagatatgctgctaagaaaacacaaaagactgttgaagctgctgagaaggcattcaagtcagcagaaaagaaaacaaagcaaacattaaaagaagttcagactgttacctctattc

SEQ ID NO: 10570 - protein, 518 aa, Homo sapiens
MKSRFSTIDLRAVLAELNASLLGMRVNNVYDVDNKTYLIRLQKPDFKATLLLESGIRIHTTEFEWPKNMMPSSFAMKCRKHLKSRRLVSAKQLGVDRIVDFQFGSDEAAYHLIIELYDRGNIVLTDYEYVILNILRFRTDEADDVKFAVRERYPLDHARAAEPLLTLERLTEIVASAPKGELLKRVLNPLLPYGPALIEHCLLENGFSGNVKVDEKLETKDIEKVLVSLQKAEDYMKTTSNFSGKGYIIQKREIKPCLEADKPVEDILTYEEFHPFLFSQHSQCPYIEFESFDKAVDEFYSKIEGQKIDLKALQQEKQALKKLDNVRKDHENRLEALQQAQEIDKLKGELIEMNLQIVDRAIQVVRSALANQIDWTEIGLIVKEAQAQGDPVASAIKELKLQTNHVTMLLRNPYLLSEEEDDDVDGDVNVEKNETEPPKGKKKKQKNKQLQKPQKNKPLLVDVDLSLSAYANAKKYYDHKRYAAKKTQKTVEAAEKAFKSAEKKTKQTLKEVQTVTSI

SEQ ID NO: 10571 - DNA, 2035 bp, Homo sapiens
  CDS (63)..(770)
aggaagctgcatgcatgagacccacagactcttgcaagctggatgccctctgtggatgaaagatgtatcatggaatgaacccgagcaatggagatggatttctagagcagcagcagcagcagcagcaacctcagtccccccagagactcttggccgtgatcctgtggtttcagctggcgctgtgcttcggccctgcacagctcacgggcgggttcgatgaccttcaagtgtgtgctgaccccggcattcccgagaatggcttcaggacccccagcggaggggttttctttgaaggctctgtagcccgatttcactgccaagacggattcaagctgaagggcgctacaaagagactgtgtttgaagcattttaatggaaccctaggctggatcccaagtgataattccatctgtgtgcaagaagattgccgtatccctcaaatcgaagatgctgagattcataacaagacatatagacatggagagaagctaatcatcacttgtcatgaaggattcaagatccggtaccccgacctacacaatatggtttcattatgtcgcgatgatggaacgtggaataatctgcccatctgtcaaggctgcctgagacctctagccccccagcataccccggctcaggggacacggacacaggcccaggggagtcagaaacctgtgacagcgtctcaggctcttctgagctgctccaaagtctgtattcacctcccaggtgccaagagagcacccaccctgcttcggacaaccctgacataattgccagcacggcagaggaggtggcatccaccagcccaggcatcgacattgcagatgagattcctctaatggaagaagatccctaatatgggtcaagatccagatgactctcctgctccttcggggaaaggaccttgtatcttggagtgaggtcacagaaggatagagcctgggggcaaaatgtctaacttgtctacatggggaccacagttcacattatgcatctcaggctccacagtgaggctgacaaactgcaatggcagtgcttttaaatgagatttgaggattcaccaagacccatggggaaccggggcagcagggaagccctcgcgtggtcttggatgaggggtgttaaatgtgtatcgtgctgtggaacatgggacaattccacgcacatcccaccgaatcatcacgcatcccattgactggcaagtactccccgccccctctgaaagcatgtcacatcatgtaaatttgcttctaacatctgcttcaaactgtctctggactccaaatttggatgggtcagcctctgcagaaagtttgtgttgagatgctggaagaacagcagagcctcctgcaccctcagcaagggaccagctcccaaaggaaaggtccttgtgtgacatttggagaatcttccttcatccagacaactctactcgaagcaagacgaaagcaggatgtggcagttgcagtgagaaaggaaaggaaaggtgggcagactctgctttctggaaatttcttcacaaagtagagctcatgaactctgtgctgtcttctggtaacatatcatcagtgtttgtattcatggtgtggcacatggatccatggcattgggtaaatctggtggtttttacacatggtcagaatgtgttcaaatacatctcatgatggagacagtaaccaaggtaatgttttgtttcagcattttaaaaagactccacttaacatttatctcagaatcatgagcctctctctagttgacaattgtcattgttcccccagccccaaattgaaccatacatttattttccaaaacagaaattgtttctgtaaacatatccgaccttcaaaagaagtgtgaggttggatttttcccccttttatttgtcctaagattccaggaggctggcctcccagcccagatagctcagccacctcacctgcctatcattcctgcattcctactttgagggtctcatcatgcccactgggtgttgttcctaagaaactgattgattaaaaaatttcccaaagtg

SEQ ID NO: 10572 - protein, 236 aa, Homo sapiens
MYHGMNPSNGDGFLEQQQQQQQPQSPQRLLAVILWFQLALCFGPAQLTGGFDDLQVCADPGIPENGFRTPSGGVFFEGSVARFHCQDGFKLKGATKRLCLKHFNGTLGWIPSDNSICVQEDCRIPQIEDAEIHNKTYRHGEKLIITCHEGFKIRYPDLHNMVSLCRDDGTWNNLPICQGCLRPLAPQHTPAQGTRTQAQGSQKPVTASQALLSCSKVCIHLPGAKRAPTLLRTTLT

SEQ ID NO: 10573 - DNA, 2115 bp, Homo sapiens
gaccagatgattttagcatacgctggtaggaaaatgaaatttaaagtgattttcttacatttttatcagtgtaggttttggtcattaaaaattttcactccagttctttttatgtttattttgacttctgatttatctaggaactagaacctctggttggtgaacagttgctccagttatgggaacgtcttcccttgggagaaaaaaacacaactgattgacactcaggttataccatcttgactttgagtattggcagtatttgtgatcattaggaacctttcagattatttatctttttttttcccctttcttctagaactcttagctgtggaagaacatcatgcctatttataaccactgaatgcactgactttcaaaaactgaggtggggtgtgtgttacgaatgggctttttaacacttttagagtgttgctttagaactaccatcttcatatacaggagaaaggaagcatttaaatttttatagtgattatagagaatgattatatgatgtttgtaatgaataaaatagtagtttcattatttggcacaatagcagtttattttaaacaaacaatttgaagttaaacatttcatttttaaaaacactgaattacagttcttattgatgactttttaatgcagagtaagttgtttaagaaaggcctgaatatatcagaacatctgagcaccattttagaagagtcaactcttaagattatcattagaaaacaaatacgtcaacacctatgaaaagaagcggggaaaacaacaacaaggacaacaacaaaaaaccagtgaaattctacaagtgtcccttttaaaaatagtgtgtgctaactaagggctattcattctgccatttttaacttgagacacatttaagaataaagttggatgttctttttctgtgattatgaaatgcaataaaatctgaataaagggcaaagtttcttcctgatcagattagattaagtgcttagttttattcctaattctgccccttttaacctgatgtgtaccttactctttcctccctctcttcctcccttcctcctctccccactcctttcctgcatttctccctccctccttccctcgtcacatctcttatatgagcacagtaattatgacctttttgttttggctacaacttgattgaaacaagttcaaaatttaaacaagttcatacaagtttttaaaaattctcaactggtagcttgcttgctgtgcgtcttccaaactaaagcctgcaagcgccacaattctaagtgccgccttccattttttttcagtatgttttcactggcttatgttttcagatatgattttcctttttcgcatatatggtttaataaatgggggataatttttttttttgtaaatccgtgcttgtgccaagtctcatatttctttgccatctcagaattatctttttaccaccactgtttataaaatttccttagagactttttgaagggaaaatagagcaacagggaaaaatgaaagaaatgtcttggttactgagctctaaatagacaggtttgatggcacttctcatgatacattttagttattcttataaaagcaaacaggcaaacatgagtgtaaattaaagacaaaaagaaaactctggttttatatttgagaacacgtgaaaaatcatgggtcaacataaaatcttgagaaccttctactttctctgggaaagcattatatagtggtgcattagtttagaaagtcagctatgattttgcctatagttctagttattagctttggggttttcttgtactttaagacatacctgtaaattgaacctatttgaattatattccactgtatgtgtattatggctcttttcctattagagcaacttgtgtttccctgataatgtgtacattttttaggcatgtacttaatagttcacaatgttctaaatttggaaggacttaaaaaaaaaacttgtttaaatttccatctgttttgtaatatctagctctatatgtaaatgatgggtttgttggtatttaaaatgaatacaacttgaatgtaattaaagtgctgttttttggaagcgataaactttaattattaaaatgaaattctatt

SEQ ID NO: 10574 - DNA, 1459 bp, Homo sapiens
  CDS (11)..(1252)
agaaaagaggatgttctttcttgaaaataagcgacgacattgtaggtcctatgaccgacgtgctcttcttccagctgtgcaacaagagcaggagttctatgagcagaaaatcaaagagatggcagagcatgaagactttttgcttgccctacagatgaatgaagaacagtatcaaaaggatggccagctgattgagtgtcgctgctgctatggggaatttccattcgaggagctgacgcagtgcgcagatgctcacttgttctgcaaagagtgtctcatcagatatgcccaagaggcagtctttggatctggaaagttggagctcagctgcatggaaggcagctgcacgtgttcgttcccaaccagtgagctggagaaggtgctcccccagaccatcctgtataagtactatgagcgaaaagccgaggaggaggttgcggcagcctacgccgacgagcttgtcaggtgcccgtcctgtagctttccggctctgttggacagtgatgtgaagaggttcagctgtcctaatcctcactgccgaaaggaaacctgtaggaagtgtcagggactctggaaagaacataatggcctcacctgtgaagagctggctgaaaaagacgacatcaagtaccgtacctctattgaagaaaaaatgactgctgcccgcattagaaaatgccacaagtgtgggactggcctcatcaaatctgaaggctgcaaccgcatgtcttgccgctgtggtgcccagatgtgctacctctgtcgagtttctattaatggatatgaccatttctgccaacatccccgctcaccaggagccccttgccaggagtgttcaagatgctctctctggaccgatcccactgaagatgatgagaagcttattgaggaaatccagaaggaggctgaagaggaacagaaaagaaagaatggagagaacaccttcaaacgcattggacccccgctggagaagcctgtggagaaggtgcagagggtggaggccctcccgaggcccgttccgcagaacctgccacagccacagatgccaccctatgccttcgcgcacccacccttccccctgcctcccgtgcggcctgtgttcaacaacttcccactcaacatggggcctatcccagccccgtacgtgccccctctgcccaacgtgcgggtcaactatgacttcggtcccatccacatgcccctggagcacaacctgcccatgcactttggcccccagccgcggcatcgcttctgatggccccgaatccccattgagcagcacaaagcccgtttggggtaggagtgtggatggagaaccctcccccaaggctggtgtctgtaccattgcatcctaagtcagcttgaagggtaggctggttttcttcccacccctttcctagaagggctactgctcctggaagagtggacggatccataataaagacgtcccaaatggtgg

SEQ ID NO: 10575 - protein, 414 aa, Homo sapiens
MFFLENKRRHCRSYDRRALLPAVQQEQEFYEQKIKEMAEHEDFLLALQMNEEQYQKDGQLIECRCCYGEFPFEELTQCADAHLFCKECLIRYAQEAVFGSGKLELSCMEGSCTCSFPTSELEKVLPQTILYKYYERKAEEEVAAAYADELVRCPSCSFPALLDSDVKRFSCPNPHCRKETCRKCQGLWKEHNGLTCEELAEKDDIKYRTSIEEKMTAARIRKCHKCGTGLIKSEGCNRMSCRCGAQMCYLCRVSINGYDHFCQHPRSPGAPCQECSRCSLWTDPTEDDEKLIEEIQKEAEEEQKRKNGENTFKRIGPPLEKPVEKVQRVEALPRPVPQNLPQPQMPPYAFAHPPFPLPPVRPVFNNFPLNMGPIPAPYVPPLPNVRVNYDFGPIHMPLEHNLPMHFGPQPRHRF

SEQ ID NO: 10576 - DNA, 1853 bp, Homo sapiens
  CDS (37)..(1359)
gcgggcgggctgctgaggtggctgtcgccggccccgatggacgctcccccgggcggggttgagtcggcgctcagctgcttctctttcaaccaggactgcacatccctagcaactggaactaaagccgggtataagctgttttctctgagttctgtggagcagctggatcaagtccacggaagcaatgaaatcccggacgtctacatcgtggagcgcctcttctccagcagcctggtggtggtagtcagtcacacaaaaccacggcagatgaacgtgtatcacttcaagaaaggcacagagatctgtaattacagctactccagcaacatcttgtccataaggctgaaccggcaaaggctgctggtttgcctagaagagtccatttatattcacaacattaaagacatgaagctgttgaagaccctcctggatattcctgcaaacccaacaggtctatgtgctctctctatcaaccattccaattcttacctggcctatcctggaagcctgacttcaggggagattgtgctttatgatggaaactccctgaaaacagtctgcactattgctgcccatgagggaacactagctgccatcaccttcaatgcctcaggctccaaactagcaagtgcgtctgaaaaaggcacagtcatccgggtgttctctgtccctgatgggcaaaagctctatgagttccggagagggatgaaaaggtatgtgacaatcagctctctagtgttcagtatggattcacaattcctctgcgcctccagtaacaccgagacggtacacatcttcaagctggaacaggtcaccaacagtcgaccagaagagccttcgacctggagtggctacatgggaaagatgtttatggctgctaccaactacctccctacccaggtgtcagacatgatgcatcaggacagggcttttgccactgcacgcttgaacttctccggacagaggaacatctgtaccctctcaacgatccagaagttgccacggctgctagttgcgtcatccagtggacacctttatatgtacaatttggatcctcaggatggaggagagtgtgtcttaatcaaaacccaccgcttgcttggctcaggaacaacagaagagaataaagaaaatgacctcagaccttccttacctcagtcttatgcagcgaccgtagccagaccaagtgcatcttcagcctccacggtgccaggttattctgaggacggcggggcgctgcgaggagaagttattcctgaacatgagtttgcgacgggaccagtgtgtcttgatgatgagaatgagtttcctcctataatcttgtgccgtggaaatcagaagggcaaaacgaagcagtcatgatgagaagcacacctcagaaatcaggacatcccccctatcaggtggttttggagaaaacaaggaaggcggaagaatggagtgcaattgtgtgagcagaaaggggggcaggaatcccgggtgctccactgcttaaaccacaggacctggttaactcctcaccaagcttcccacgaccctggttgccaatgggcgcgggagacattgtatacacatcatgctatttaaaatacgttcaaactatagtgtaaatgctaattaaccatattggtatataaccggaattttatattaaaaggggcctcctttttaaatatatgccgtgtaaaaaatgtacttataggaacatctctttgaattgtatttcttgtatattacatacttagagagagactcttttagccaggcaaagtcttttttggctgtggctggaataaatcatttattacttgggagtcccattttggacactaataataaaatcatggcaatgc

SEQ ID NO: 10577 - protein, 441 aa, Homo sapiens
MDAPPGGVESALSCFSFNQDCTSLATGTKAGYKLFSLSSVEQLDQVHGSNEIPDVYIVERLFSSSLVVVVSHTKPRQMNVYHFKKGTEICNYSYSSNILSIRLNRQRLLVCLEESIYIHNIKDMKLLKTLLDIPANPTGLCALSINHSNSYLAYPGSLTSGEIVLYDGNSLKTVCTIAAHEGTLAAITFNASGSKLASASEKGTVIRVFSVPDGQKLYEFRRGMKRYVTISSLVFSMDSQFLCASSNTETVHIFKLEQVTNSRPEEPSTWSGYMGKMFMAATNYLPTQVSDMMHQDRAFATARLNFSGQRNICTLSTIQKLPRLLVASSSGHLYMYNLDPQDGGECVLIKTHRLLGSGTTEENKENDLRPSLPQSYAATVARPSASSASTVPGYSEDGGALRGEVIPEHEFATGPVCLDDENEFPPIILCRGNQKGKTKQS

SEQ ID NO: 10578 - DNA, 1579 bp, Homo sapiens
  CDS (452)..(964)
tttcatgcccttgttttaaaaaaactactttttttggcctcaaaaaaatcaagggtgtaatttttaataaattgttaatcctatgttttgtaattttcattttaggagcttgacttatttttttctctctcataaaaacacatttgttttaattgtaggagaaattttctcagcattttgcatgttctttctaatctttgttggtctgaatatattggtagtaattactgtaattattcaacaaaaagcatatccgttcaaaaatttttccactatgtcttttttctagtggctactgttttagttttctagttgaatatctctgacaagctttcgtatggttttgttatattaagtgtgtttcaaagtgaagactacagcacctcgccggtactgtgtgaggcccaacagtggaattattgacccagggtcaactgtgactgtttcagtaatgctacagccctttgactatgacccgaatgaaaagagtaaacacaagtttatggtacagacaatttttgctccaccaaacacttcagatatggaagctgtgtggaaagaggcaaaacctgatgaattaatggattccaaattgagatgcgtatttgaaatgcccaatgaaaatgataaattgaatgatatggaacctagcaaagctgttccactgaatgcatctaagcaagatggacctatgccaaaaccacacagtgtttcacttaatgataccgaaacaaggaaactaatggaagagtgtaaaagacttcagggagaaatgatgaagctatcagaagaaaatcggcacctgagagatgaaggtttaaggctcagaaaggtagcacattcggataaacctggatcaacctcaactgcatccttcagagataatgtcaccagtcctcttccttcacttcttgttgtaattgcagccattttcattggattctttctagggaaattcatcttgtagagtgaagcatgcagagtgctgtttcttttttttttttttctcttgaccagaaaaagatttgtttacctaccatttcattggtagtatggcccacggtgaccatttttttgtgtgtacagcgtcatataggctttgcctttaatgatctcttacggttagaaaacacaataaaaacaaactgttcggctactggacaggttgtatattaccagatcatcactagcagatgtcagttgcacattgagtcctttatgaaattcataaataaagaattgttctttctttgtggttttaataagagttcaagaattgttcagagtcttgtaaatgttattttgataatccctttaaattttatctgttgctgttacctcttgaaatatgatttatttagattgctaatcccactcattcaggaaatgccaagaggtattccttggggaaatggtgcctcttacagtgtaaatttttcctcctttacctttgctaatatcatggcagaatttttcttatcccttgtgaggcagttgttgactgagtttttcatccttacaatcctgtcccatggtatttaacataaaaaaaataaaactgttaacagattcttgctcg

SEQ ID NO: 10579 - protein, 171 aa, Homo sapiens [sequence omitted]

SEQ ID NO: 10580 - DNA, 1671 bp, Homo sapiens
  CDS (429)..(923)
cattaaaaagcccagctttcctccatgttagatgtgacttggaaaatgagaaagatttagcaaaattccaccgtatcttttgccaggctagagacagggagagcagggtaaaaccctcaggctgctgaaatttctaggctgttaggaagcccctcgaattctgtgaaaatgagggtttcttaactcacactgagagcggaaaggggcagacccttttcataactccctcaagtgtgtgttacctttctttaccagcatggtaagcaacaggacatatcccagcctcggacatgtctgtatgatccaaggtacccaaagtcagacagagtaaactcaagcctggcactggctttctgccgcttcatgtgctttggaaaaagcaggagaagcaatagcagcaggagtccccagcagctggagccgcaagaatgaaccgcaaagagggaactgacagcagctgcggctgcaggggcaacgacgagaagaagatgttgaagtgtgtggtggtgggggacggtgccgtggggaaaacctgcctgctgatgagctacgccaacgacgccttcccagaggaatacgtgcccactgtgtttgaccactatgcagttactgtgactgtgggaggcaagcaacacttgctcggactgtatgacaccgcgggacaggaggactacaaccagctgaggccactctcctaccccaacacggatgtgtttttgatctgcttctctgtcgtaaaccctgcctcttaccacaatgtccagattgatctccgtgatgacccaaaaaaccttggcccgtttgctgtatatgaaagagaaacctctcacttacgagcatggtgtgaagctcgcaaaagcgatcggagcacagtgctacttggaatgttcagctctgactcagaaaggtctcaaagcggtttttgatgaagcaatcctcaccattttccaccccaagaaaaagaagaaacgctgttctgagggtcacagctgctgttcaattatctgaggttgtctgggacctgcctccaccccatccagggatgagaatggcagccaatctctgtggccaagctccagccaaaaaggagggcacgaccagaaagaacctgtcaaaaaaaaaaaaaaaacaacctacatttcaagtactatttcccttctctcccatctaattgctaaagattttctttcatacgcacacactccagtgactggaaaaacgggagttttcagtcaaagcttgacatttagagaaaacaaggactttctgcctttataaatggaaatcaactgtgtatgaactataactctgcagaggttatgaattcatcctttacaaacaataatgaacttttagtcctgtaataaatgaaatgttattaggcagctttgttgcatgattgcatagttatatcttgctaacgggccactcatttctcactgatgtggatgaaaaaatgagagcagtatgtttccaggtgtgtgcactcaacaggcaaatagctcccgaggtcaccacttccctaatgggccacaggaagtaagttgatcatgatggggagatcacgtcacccagaaccagcaactggatagagactgttgttagcgtctgggtagagcacaggcttccaggggtcttaagagctaattactgaataaaacaatctagaac

SEQ ID NO: 10581 - protein, 165 aa, Homo sapiens [sequence omitted]

SEQ ID NO: 10582 - DNA, 1638 bp, Homo sapiens
  CDS (125)..(1333)
agatatgacaggtaggctctttcaggctacagggagaagacactttagagaaaatgttagggagtaatagagtggctttttcgtttttttgcttctctgcttatagtattttgttttgggagggatgggatctggccttgattttgcagagacttcttgtgcccagcccgtagtatctacccaatcagacaaggagccaggaattactgcttctgctactgatactgataatgctaatggagaggaggtaccacatactcaagagatttcagtgtcttgggaaggtgaagctgcccctgagataaggacatctaagttaggccagccagatcctgcaccctctaagaagaaatccaatagactcaccttaagcaaaagaaagaaggaagctcaagatgagaaggtggagaaaactcaaggtggacatgagcacagacaggaagaccgactaaagaaaacagttcaggatcattctcagatcagggaccagcaaaaaggagagataagtggttttggtcaatgtctggtctgggtccagtgttccttcccaaactgtgggaaatggaggcggctgtgtgggaacattgacccctcagttctcccagataattggtcctgtgatcagaacacagatgtgcagtataatcgctgtgatattcctgaggagacctggacagggcttgagagtgatgtggcctatgcctcctacatcccaggatccatcatctgggccaagcaatacggttacccctggtggccaggcatgatagaatctgatcctgacttaggggaatattttctttttacttcccatcttgattccctgccgtctaagtaccatgtgacgttttttggagaaacagtttctcgtgcatggatcccagtcaacatgctaaagaacttccaggagctgtccctggagctatcagtcatgaaaaagcgcagaaatgactgcagccagaaactgggggtggccctgatgatggctcaagaggcagaacagatcagcattcaggaacgggttaacttgtttggtttctggagccgattcaacggatctaacagtaatggggaaagaaaagacttacagctctctggtttgaacagcccaggatcctgcttagagaaaaaggagaaagaggaagagttggaaaaggaggaaggagagaaaacagccctaagaaaaaatttaaagctccccagagcaaggccttggcagccagcttttcagagggaaaagaagttagaacagtgccaaagaacctgggcctatcagcgtgtaagggggcctgcccctcatctgcgaaagaagagcccagacaccgggaacccctgacccaggaggctggaagtgtcccccttgaggacgaagcctccagtgacctggacctggagcaactcatggaagatgttgggagagagctggggcagagcggggagctgcagcacagcaacagtgatggcgaggacttccccgtggcgctgtttgggaagtagctggtgctcctctgctccctctttttctcccttctctggggcgcaggagggagaagttgctaagtgctgggtctgttcattggctatgaggttcaaatgtgtgtggtgcagtttctgtgttaataaagcaggttacagtcg

SEQ ID NO: 10583 - protein, 403 aa, Homo sapiens
MGSGLDFAETSCAQPVVSTQSDKEPGITASATDTDNANGEEVPHTQEISVSWEGEAAPEIRTSKLGQPDPAPSKKKSNRLTLSKRKKEAQDEKVEKTQGGHEHRQEDRLKKTVQDHSQIRDQQKGEISGFGQCLVWVQCSFPNCGKWRRLCGNIDPSVLPDNWSCDQNTDVQYNRCDIPEETWTGLESDVAYASYIPGSIIWAKQYGYPWWPGMIESDPDLGEYFLFTSHLDSLPSKYHVTFFGETVSRAWIPVNMLKNFQELSLELSVMKKRRNDCSQKLGVALMMAQEAEQISIQERVNLFGFWSRFNGSNSNGERKDLQLSGLNSPGSCLEKKEKEEELEKEEGEKTALRKNLKLPRARPWQPAFQREKKLEQCQRTWAYQRVRGPAPHLRKKSPDTGNP

SEQ ID NO: 10584 - DNA, 2437 bp, Homo sapiens
  CDS (81)..(650)
gaagactgcgcgtttgagtgtccctggcaacgccacgcttccgccttctggaagcctgcactccagcttcgagtggaacgatgcctctggaggtggtggtggagctgcagatccgggcgatttcttgcccaggagtgttcctgcctggcaaacaagatgtgtacctcggggtctacctcatgaatcagtacctggagaccaacagctttccctctgcgttccccattatgattcaggagagcatgagatttgaaaaggtatttgaaagtgcagtagatcctggagctgtagtagaccttttggaaatgtgggatgagttggcctactacgaagaaaacacacgagattttcttttcccagagcccaagctgacaccttcgcaccctaggaggtgtagggaggtgctcatgaagacggctctgggttttccaggcattgctcccaaaatagagttttctacaaggacagccatcagagaatgtgtgtttctgcatagaaacagatttcttggctggggaaacaaagggaagatgttggttcagcaagaacacagaagcttaaagaagaaactgaacagaaatgggacccagacctctggagaagggctgctttcctggatgcttcttcaggaattcgaaggaagaaagacatgagtcacggaggcctttatctacatcacatgaaccaatatttcccttaaatactataaagatgaaactaaaggagaataatctcaacagactgcccaaaggcatgcaagcccgggcgccctctcagtattctaccaggcatttcttccaggaccagccagctcagttgaaccttggaaataatttcaaaatctctggaggaagcaagcctccatttgttgttagacacgtgagcctaaaattattttttagagcattttgcaatagtgaggatatggatgagggtggaagaaaggaaggttgagttataacaacaaatgaataatattcaataaaaaggtggacagtgcaaagccctttggtgagaatatttcagagcatcatttgaggaggtctggaagaaaatctaagttttcagactttccgtttccaacgagaagaggttccatcctggttctcagtccacatggaagaatatccatgagagggtatgcagtcttctgacatcccacagagcacagctgcaccaaaacaaggaagattctacctctgaagtaaattatatcattgaaagaccaagctaccctctgaagaaatactcactgcatgaacagagatatttttaaggggaagttaatgaaagcttaaggagaatcatgaagagctcactcactgagacaattgaagcatccttaaagaaatgaacactttttgttgtctgtgttgagtcactgatgtctaatcccctttaaaccaaaccctgtactcagtcttttgtgcccaggttttaagctccatgaaggcaggagacctagctatctgcttgttcacgaatgtatactcagtgcccagcacataggagatgctcagtaaacatgctgattgaatgactaacaggtatttaagtatggctgactgccctggatccctctcccaggctctggccccttggcagcagagtgttgccagaacaaaacttgccagttccagctgctgcccttatgatctgtgtgatcttgaaaaagtggcttaatctgtcttcaacctcctgtttccttatctctaaagatggagttaaggtcccacctacttgatgacttcatagggctgctatgaggattaaataaacaggttcatgatttttaaattccaaaatgtttcttttattccccagagaaaacaaggcaggatatgatcttactttgttaatccagggcatagggaaatctctgcagccttgattagtactccctggatgttcaaagggaaaggaagaggcaaagaggagcatgcaaaatctttctgtgcatgcatcacctatgacatctacttttcttagagacatgaagaactctcttaaaataggtaatatcaccactctaggctatttggtgatgttaacaaaataaactggtccttgagcagaatcagctaaaggtccccttgaagcctctgtcagctggtccacatttgaagttcaaaacatgcatcaagaagcagtgggctctccaggtgcagtggttcatgcctgtaatcccagcactttgggaggctgaggcaagtggatcacttgaggtcaggagttcaagaccagcctggccaacatggtgtaacctcatctctactaaaaatacaaaaattagccggtggtggtggcacacacctatagtcccagctacttgggaggctgaggcaggagaatcgcttgaacccaggaggtggaggttgcaagtgagctgagatcgcaccactgcactccagcctgggcaacacagtgagactctgtc

SEQ ID NO: 10585 - protein, 190 aa, Homo sapiens
MPLEVVVELQIRAISCPGVFLPGKQDVYLGVYLMNQYLETNSFPSAFPIMIQESMRFEKVFESAVDPGAVVDLLEMWDELAYYEENTRDFLFPEPKLTPSHPRRCREVLMKTALGFPGIAPKIEFSTRTAIRECVFLHRNRFLGWGNKGKMLVQQEHRSLKKKLNRNGTQTSGEGLLSWMLLQEFEGRKT

SEQ ID NO: 10586 - DNA, 1539 bp, Homo sapiens
  CDS (137)..(1372)
caaaaagaacaacctgtttgttgttgaccgatctgacaagttggggcgtgtgcaggagttcaatagtggccttctgcactggcagctcggcgggggtgacaccaccgagcacattcagactcactttgagagcaagatggaaattcctcctcgcaggcgcccacctccccccttaagctccgcaggtagaaagaaagagcaagaaggcaaaggcgactctgaagagcagcaagagaaaagcatcatagcaaccatcgatgacgtcctctctgctcggccaggggcattgcctgaagacgcaaaccctgggccccagaccgaaagcagtaagtttccctttggtatccagcaagccaaaagtcaccggaacatcaagctgctggaggacgagcccaggagccgagacgagactcctctgtgtaccatcgcgcactggcaggactcgctggctaagcgatgcatctgtgtgcccaatattgtccgtagcttgtcattcgtgcctggcaatgatgccgaaatgtccaaacatccaggcctggtgctgatcctggggaagctgattcttcttcaccacgagcatccagagagaaagcgagcaccgcagacctatgagaaagaggaggatgaggacaagggggtggcctgcagcaaagatgagtggtggtgggactgcctcgaggtcttgagggataacacgttggtcacgttggccaacatttccgggcagctagacttgtctgcttacacggaaagcatctgcttgccaattttggatggcttgctgcactggatggtgtgcccgtctgcagaggcacaagatccctttccaactgtgggacccaactcggtcctgtcgcctcagagacttgtgctggagaccctctgtaaactcagtatccaggacaataatgtggacctgatcttggccactcctccatttagtcgtcaggagaaattctatgctacattagttaggtacgttggggatcgcaaaaacccagtctgtcgagaaatgtccatggcgcttttatcgaaccttgcccaaggggacgcactagcagcaagggccatagctgtgcagaaaggaagcattggaaacttgataagcttcctagaggatggggtcacgatggcccagtaccagcagagccagcacaacctcatgcacatgcagcccccgcccctggaaccacctagcgtagacatgatgtgcagggcggccaaggctttgctagccatggccagagtggacgaaaaccgctcggaattccttttgcacgagggccggttgctggatatctcgatatcagctgtcctgaactctctggttgcatctgtcatctgtgatgtactgtttcagattgggcagttatgacataagtgagaaggcaagcatgtgtgagtgaagattagagggtcacatataactggctgttttctgttcttgtttatccagcgtaggaagaaggaaaagaaaatctttgctcctctgccccattcactatttaccaattgggaattaaagaaataattaatttg

SEQ ID NO: 10587 - protein, 412 aa, Homo sapiens [sequence omitted]

SEQ ID NO: 10588 - DNA, 1888 bp, Homo sapiens
  CDS (273)..(1616)
agtgctgagctgttttgacaacttggaccccgggtcctctgtgggtaggaaaatcagctccctctttgctcctctggggcagctgcacctcgggccagctttctgcctgtctgcctgccggcactgctgggtcgctgtacccaaacgcacagccggtgccccgtgctagaaggtcttcagtttccagaagaaccaaagcatctttggacctacctagggaaggacctgcctgtgacctttgccctgtcctggagggtccagctttgggctgaatggcagcacccacgctgggccgtctggtgctgacccacctgctggtggccctttttggcatgggctcctgggctgctgtgaacgggatctgggtggagctgcctgtggtggtaaaagaccttccagagggttggagcctcccctcatacctctctgtggttgtggcgctgggaaacctgggtctgctggtggtgaccctgtggaggcggctggccccgggcaagggcgagcaggtccccatccaggtggtacaggtgctgagtgtagtgggcacagccctgctggcccctctgtggcaccacgtggccccagtggcagggcagctccactctgtggccttcctaactctggccttggtgttggcaatggcctgttgtacctctaatgtcactttcctgcccttcctgagccacctgccacctcctttcttacggtctttcttcctgggtcagggtctcagtgccctactcccctgtgtgctggccctagtgcaaggtgtgggccgcctcgagtgcccaccagcgcccaccaatggcacctctgggcctcccctcgacttccctgagcgttttcctgccagcaccttcttctgggcactgactgcccttctggtcacttcagctgccgccttccggggtctcctgttgctgttgccatcactaccctctgtaaccacagggggctcagggcctgaacttcaactgggatccccaggagcagaggaggaagagaaggaggaagaagaggctttgccattgcaggagccaccgagccaggcagcaggcaccatccctggcccagaccctgaggcccatcagctgttctcagcccatggtgccttcctgctgggcctgatggccttcaccagtgccgtgaccaatggcgtgctgccttctgtgcagagcttttcctgtttgccctatgggcgcctggcctaccacctggctgtggtgctgggcagtgccgccaacccccttgcctgcttcctggccatgggcgtgctgtgcaggtccctggcagggctggttggtctttctctgctgggcatgctctttggggcctacctgatggcactggcaatcctgagcccctgcccacccctggtgggcaccactgcaggggtggtccttgtggtgctgtcgtgggtgctgtgtctgtgtgtgttctcatatgtgaaggtggctgcaagctccctgctgcatggtgggggtcggccggcattgctggcagctggtgtggccatccaagtgggctccctgcttggtgccggtgccatgttccctcccaccagcatctaccacgtgtttcaaagcagaaaggactgtgtagacccctgtggcccctgagcctgggcaggtggggacccaactccaccccacctgtcttcatcgtgaggctgccacagtgcctgactacttgtggcccaggcaggcttcccccaacacaggaacgctcatggacacctgcacactccacagaagacgttggcatgtgaggccagggtgggcaccaaagaccaggcccagagccaggggacaggttggggctgtgggcttggacccagggcctgagacctttgtgggatttgtgcaataaagtgtttttatttaaaacc

SEQ ID NO: 10589 - protein, 448 aa, Homo sapiens
MAAPTLGRLVLTHLLVALFGMGSWAAVNGIWVELPVVVKDLPEGWSLPSYLSVVVALGNLGLLVVTLWRRLAPGKGEQVPIQVVQVLSVVGTALLAPLWHHVAPVAGQLHSVAFLTLALVLAMACCTSNVTFLPFLSHLPPPFLRSFFLGQGLSALLPCVLALVQGVGRLECPPAPTNGTSGPPLDFPERFPASTFFWALTALLVTSAAAFRGLLLLLPSLPSVTTGGSGPELQLGSPGAEEEEKEEEEALPLQEPPSQAAGTIPGPDPEAHQLFSAHGAFLLGLMAFTSAVTNGVLPSVQSFSCLPYGRLAYHLAVVLGSAANPLACFLAMGVLCRSLAGLVGLSLLGMLFGAYLMALAILSPCPPLVGTTAGVVLVVLSWVLCLCVFSYVKVAASSLLHGGGRPALLAAGVAIQVGSLLGAGAMFPPTSIYHVFQSRKDCVDPCGP

SEQ ID NO: 10590 - DNA, 1578 bp, Homo sapiens
  CDS (44)..(616)
gttttcatttctaaatgctaatcctttttctttcttcctgtctatgagtaggaactctctctccatccctgtagaatctcttggacatgtttatctcatgcttatggggtccccatttcttggagtgggattgacattggtggattctgcttcagtgtatccttcttgcggtcttatttgcatgcatgagtcaactgtgtgcatcccattgtgctttccccaggccagtctctcatgcccattccatttcccctgccctataggcctcctttcatgtactctgcccaacggttttgggggacaatctgggccagaaggggagcgcagcttggcaccccctgatgccagcatcctcatcagcaatgtgtgcagcatcggggaccatgtggcccaggagctttttcagggctcagatttgggcatggcagaagaggcagagaggcctggggagaaagccggccagcacagccccctgcgagaggagcatgtgacctgcgtacagagcatcttggacgaattccttcaaacgtatggcagcctcatacccctcagcactgatgaggtagtagagaagctggaggacattttccagcaggagttttccaccccttccaggtgaggcttgaaagccctccttgaaagaagggctggggccttggggatgtggagagaatactgctgccttttcttccatagggctgtagttggggaggaggaagctagagctgaaggggaggactctgcaggcaggtgccaaatccttggaagctgatgggagagtctttacctgggaccctgaaatgttctacctgagtagtcatgtttatctttctggggagtgggcctttcgcaggtcctcagaaggacccatcatgagccagaaaaaagggagtcagttagaatttgtattccagggagtagtaggtatttctgtgtgccccagctgcatcatcttttgtgtgactccacccttggcctactcaggaagggcctggtgttgcagctgatccagtcttaccagcggatgccaggcaatgccatggtgaggggcttccgagtggcttataagcggcacgtgctgaccatggatgacttggggaccttgtatggacagaactggctcagtgaccaggtgagaaagggtagagaaacaggcctgagaggggattcagggagcagggtgtctggggccctctgcatgggggagccctgtacccatgccgcaccctccatggcaagctgcctcccatcttctccccaggtgatgaacatgtatggagacctggtcatggacacagtccctgaaaaggtaggcccaaccagataggtcagtacccagaggaacttctgcagttttaagcagctttttaagctcctttcatctctttcattttacacagagagggtctctgtttcagggagagaggtggtagtggtagtgtattaatttcaaatccgtaatcttgggctctggatttatcagttgttttcctttctgccagtatttagtgtttttcgctatggccagccccaaggattgggatgggttcctattgtaactattgtaaaacaagattt

SEQ ID NO: 10591 - protein, 191 aa, Homo sapiens
MSRNSLSIPVESLGHVYLMLMGSPFLGVGLTLVDSASVYPSCGLICMHESTVCIPLCFPQASLSCPFHFPCPIGLLSCTLPNGFGGQSGPEGERSLAPPDASILISNVCSIGDHVAQELFQGSDLGMAEEAERPGEKAGQHSPLREEHVTCVQSILDEFLQTYGSLIPLSTDEVVEKLEDIFQQEFSTPSR

SEQ ID NO: 10592 - DNA, 1732 bp, Homo sapiens
  CDS (14)..(370)
ataggcgaccctaatgggttttgtgagatgtcgtattaagtctgtggtccatagagtaatgcccttcgctgtcagggaatgcaagggaagagcagggaattccagaatgggaaggtgtgtgaatgtagaccttcaggttggtcacaaacagtgtctcgagattccactggggaagcgttcacttttagaatcaggccaagctgagggttctctgtcctcaggtattttcctttgtagcagtcactggctcgaaatggagaatgagagaaaaaggagcttgtttcaggccagagacctcactaaccgaataacaacactaaggccctgcagcagggggcacaaactacccagcctgtttccgtgtggcctatgatggtttttttgtttgtttgtttacattttttaatggttggaaaaaatcaaaagaggcatatctacctatttcataacatgataattataggaaattcaaatgtgggtgactataaagctttattggaacacaggcacgcccattcgttcctgtattgtctatcactgcttttgtgctgcgatgacagaggctgcatgtggcctgcaaagccccaaatttttatcatccagccctttacagaaagagtttgctggtccctctcataaagtatccttttttttaaatgtgacagagtctagctctgttgcccaggctggagtgcagtggcgcgatctcggcttactgaaacctctgcctcccgggttcgggcgattctcccgcctcagcctcctgagtagctgggatcacaggcgcgtgccaccatgcccagctaatttttgtatgtttagtggagacagggtttcaccgtgttggtcaggctggtctcgaactcctgaccttgtaatccgcccgcctcggcttcccaaagtgctgggattacaggcgtgagccaccgtgcccggcctaaagtatcttttttatcatgatagttcacgcttattcattgatgggctgccttcttaccacatgtccttgacatgttttaattccttaagtcctcatagtaaccctagtacatgtactcctgtgattgccattttactgatagggaaacacaggcagagtctcatgtaatctgccttctgtcacccagccagaaaagggcagaactaggatgcaagcacagggagtctgaagccagggtacccattcttgagcaccctgtcacgctacctctcattatcaggttctgcaatactttatccttggagcaagcaaggtgaggtgcctacattttcccatgcaagtgccccaatctgtccctgagaattaaggcccagagagaatgatgctttctcagaccctcaggaacattccttcctgatttgccagtaagtggcagagctgggaccaagacccaggtggctctaatctcatcttcattctcctcattctccaagatggtggccctccctcttgtgccagggactcccagatgcccactcttgggcacagcaaagaacccagatgctcaggcctcatggattccaaggccccagcaagtgacatccctattagccggggagaaggccctggctattgttctgtttgctttcctttgtgatgtattgttacataggaaatttatttcttaacaatttcacttacagcccttaaaacaaaatggggctctggagaactgcatcattagcattgataaacattttacaataccatcatgagcaaatggaagtgtct

SEQ ID NO: 10593 - protein, 119 aa, Homo sapiens
MGFVRCRIKSVVHRVMPFAVRECKGRAGNSRMGRCVNVDLQVGHKQCLEIPLGKRSLLESGQAEGSLSSGIFLCSSHWLEMENERKRSLFQARDLTNRITTLRPCSRGHKLPSLFPCGL

SEQ ID NO: 10594 - DNA, 1599 bp, Homo sapiens
  CDS (89)..(784)
agatgcggtggtggccgccgagcgcctggaaggagctgctggacaggccgagggagcctccgcccgagaccgcgcagccgccgccgccatggctacaaaagaccccacagctgtagagagagcaaacttgttaaacatggctaaactgagtatcaaaggactcattgaatctgctctgagctttggccgcactttggattctgactatccccccttgcagcaattctttgttgttatggaacattgcctgaaacacggtcttaaagtaagaaaatcatttttgagttacaacaaaaccatctggggccctttggaactggtggagaagctgtaccccgaagcagaggaaataggagctagtgtccgggatctacctggtctgaagacccctctgggtcgagcaagagcgtggcttcgattagccctcatgcagaaaaaaatggccgattacttacgttgcttaattattcagagggatctcttgagtgagttttatgagtatcacgcactaatgatggaagaagaaggagcagtaattgttgggctgctggttggcctgaatgtgatcgatgctaatctgtgtgtgaagggagaggatttagactcacgagttggagtgattgatttttctatgtatttaaagaatgaagaagatattggaaataaagaaaggtatgattttcataagttatttcacatattgggttttttatatagctctttacaaatcattataagatccatctatttacagtgtggttttattttgttgttttcccccctgtgacttcttcatttcattttcacttccattacaagctttacaaagcagattatggaaaatcacttaggagaaggaggttttattaatagtatgaagtgggacctttggttatacctgtagttactgagacccattttaatagtggttttttggaataaaagagatgaaagcttattattcacaagtttgcaaatactggggaggctgaggcaggagaatcgcttgaacccgggaagcagaggttgcagtgagccgagatcgcaccactgcactccaacctgggtgacagagcaagactccatctcaaaaacaaagaaacactgaacagttatcctatctgatctttttatatgcaggatagtgattaaatcactctacaaccactttcctctaatttctcctcataagcctaatcaaatgtatttgccttacttcctaccattctgttgaagattctccgaaaattggagaaagcactaaatatggtaggaagattctcttgaagttcctgtgatcttttgaaactgcattcctgagttctatccttacttccttaaagcagcatgcacttttggtttgttgttaatcaggggtctcctgtgcttggtgtgtggggtaggaaggcaggtgatcacctgcaacaattcttcacagattggaagttaaacatgaaaagcccccggagaccccacgaactagatgccagaaagttctgcagtcattgactgttaactgcaattccaactatacggtcagccctccatatccatgggttccatatccgtggattcaaccaacatggattgaaatattcc

SEQ ID NO: 10595 - protein, 232 aa, Homo sapiens
MATKDPTAVERANLLNMAKLSIKGLIESALSFGRTLDSDYPPLQQFFVVMEHCLKHGLKVRKSFLSYNKTIWGPLELVEKLYPEAEEIGASVRDLPGLKTPLGRARAWLRLALMQKKMADYLRCLIIQRDLLSEFYEYHALMMEEEGAVIVGLLVGLNVIDANLCVKGEDLDSRVGVIDFSMYLKNEEDIGNKERYDFHKLFHILGFLYSSLQIIIRSIYLQCGFILLFSPL

SEQ ID NO: 10596 - DNA, 1680 bp, Homo sapiens
caaagaagcggagaaagagctaccggagcttcttacctgagaagagtggctaccctgacatcggcttccccctcttcccactttccaagggtttcatcaagagcatccggggtgtcctgacgcagttccgggctgccctgctagaggcaggcatgccggaatgcacagaggacaagtagctgccaggcacagaggaaagagcatcaccgtgggagaggccagccgccgcctgctcactcccccccggaatcacccctcttcccatgcccctctgtccccactgcaaacccactgccctcttctccccaaggtgagttcgatgctgaagtgcaagaagtgtgttgagatgctgccgtttctattttgaagcgagctttcaacaggcgggtcccctgtggcaaagaaaatcggaaccctgttgccgattttccatttgtcaccccagcagaatgtccggcacttgctcccttgctgccccttctcaggtcagaggcgggtgttccagggcctgccgcggggctctctgggccggttccctgcagacccgcaggagagcacatgtgccttgcatgaagtgtgggttgcgccaacaattcccctggtccctttcaacctgtttagttcaactcaagcctccctgtgtcccagaccctcctgctgccaccaccacccaggtcctccctagtcctccagcgtcaacactatcccttgggagttgtagctgctgtcactgactcccggctatacatggcctgtcgaccacgttatagccctcaggcctgttgaacttgctctctaagagaggttgggaccaggctaggttccgggtgacgcccaggagaggtggtggccttcacacatgcacatggagttgaggaccagggagctgcagggaaagcaacagctataggtgccttgctcttctgtcggaggctgctgggggcaagagcagctgcacaaggccagggcaagtgctagggcccctcccccatcacatggtcacactgggacaggcgtgcagctcactgaactccaagcgagccagccctctcttggactagaaggcctactgtcagcccttcgcttacaaactgcaggctcaatccgaaggggacggccggcgggggctctcctagtgcccagagacaggcccagaggtttacaagttttctaagcttttgataatgtgaagctccaggccgagaggatgctgttgagcacattgcagctatgtaatttttggtgtatgtatgtaatatttaaggttgaaaaaaaaactcaaaagcaaagatattaactcttattagaaaaaaagacaaaaaaagccaaagcatgatgcgtcttgtcagccttaagtgggctccacacctgtgctgtgctgtgaccgcccagccagcagagctgcgggaggatggagccggaccacacaccgtggcatttggaaccgagtcggtatcttgtttgagaaacacccggagtgactggtggggctgtgcttcccagtgcattgtacatgtggagatgtgaatgcctactgcttacgatatctgtataaagtgctgtgtgattaaacttttttttacttgcattttttttttttttttttttttgttggctcattagcaagacaaggtgacaccattaaacctccctctgccattcaaaaaaaaaaaaaaaaag

SEQ ID NO: 10597 - DNA, 2035 bp, Homo sapiens
  CDS (89)..(1909)
ttttaaatatgtggggagatacataaagaacattgcttatttgttcttgaaaataacagtgattcaaatatttcattcagatttacctatgcctaatgaaaaaaatgatgcagaacttgattctccaccttcaaagaaaaaaagattaggttttttccagacttatgatacagaatatttaaaagttggttttattatctgtcctggatcaaaagaaagttcaccaaggccacagtgtgtcatttgtggagagatcttatccagtgaaaacatgaagccagcaaatctttctcatcatttgaagacaaaacattcagaattagaaaacaaaccagtagatttttttgaacaaaaatctttagaaatggaatgtcaaaatagttctttaaaaaagtgtttactagttgaaaagtcacttgtgaaagcttcttatttaattgctttccaaactgctgcaagcaagaagccattctccattgctgaagaattaattaaaccatatttagtagaaatgtgttcagaagttttgggttcaagtgctggagacaaaatgaaaactattccactttctaatgttacaattcaacacaggattgatgaactatctgcagacattgaagaccagctgattcaaaaggtcagagagtcaaagtggtttgcccttcagatagatgagtcatcagaaatctcaaatatcacacttcttttgtgctatattcgtttcattgattatgattgtcgtgatgtaaaagaagaattattattttgcattgaaatgcctactcaaataactggctttgaaatatttgaactaataaataaatatattgatagtaaatctctgaattggaaacattgtgttggtctctgtaccgatggggctgcaagcatgactggcaggtattctggtttaaaagcaaaaattcaagaagttgccatgaatacagcggcatttacacattgttttattcaccgtgaacgtttagtggcagaaaagttgtctccatgtttacataaaattcttttgcagtcagcacaaattttaagttttataaagagcaatgcattaaattcacgtatgttaacaattttgtgtgaagagatgggatctgagcatgtgagtttaccgcttcatgctgaagtacgttggatatcaagagggagaatgttaaaaagattatttgaattacgacatgagattgaaatatttttaagtcaaaagcattcagatttggccaagtattttcatgatgaggaatgggttggaaagctggcctacttatcagatatattttcacttataaatgaattaaatttaagtctccaaggaactttgactactttcttcaatttgtgtaataaaattgatgtatttaagagaaagttaaaaatgtggttgaagcgcacacaagagaatgattatgacatgttcccttcattttctgaattctcaaattcatcaggcttaaatatgacagacatcacaaggattatttttgagcacctggaaggactttctcaagtgttcagtgactgttttccaccagaacaagacttgcgttcaggaaatttgtggataattcacccttttatgaatcaccaaaataataatctcaccgacttcgaagaagaaaagctaacagagctatcttcagatttaggattacaagcactatttaaatcagtgtctgtaactcagttttggataaatgcaaagacaagttacccagaactccatgaaagggcaatgaaatttttattacccttttcaactgtttatttatgtgatgctgccttttcagctttgactgagtcaaaacaaaaaaatctgttgggttctggccctgccctaagacttgcagtcacatctttaattccaaggatagaaaaattagtgaaggagaaagagtagcaatatgcacattgcttaacagtgaagtcaataatcctgtgttaagttttgtataagtatcctaaaagataatttcctaatgtggatttgtgttttcagtgattaaatgttttaataattttt

SEQ ID NO: 10598 - protein, 607 aa, Homo sapiens
MPNEKNDAELDSPPSKKKRLGFFQTYDTEYLKVGFIICPGSKESSPRPQCVICGEILSSENMKPANLSHHLKTKHSELENKPVDFFEQKSLEMECQNSSLKKCLLVEKSLVKASYLIAFQTAASKKPFSIAEELIKPYLVEMCSEVLGSSAGDKMKTIPLSNVTIQHRIDELSADIEDQLIQKVRESKWFALQIDESSEISNITLLLCYIRFIDYDCRDVKEELLFCIEMPTQITGFEIFELINKYIDSKSLNWKHCVGLCTDGAASMTGRYSGLKAKIQEVAMNTAAFTHCFIHRERLVAEKLSPCLHKILLQSAQILSFIKSNALNSRMLTILCEEMGSEHVSLPLHAEVRWISRGRMLKRLFELRHEIEIFLSQKHSDLAKYFHDEEWVGKLAYLSDIFSLINELNLSLQGTLTTFFNLCNKIDVFKRKLKMWLKRTQENDYDMFPSFSEFSNSSGLNMTDITRIIFEHLEGLSQVFSDCFPPEQDLRSGNLWIIHPFMNHQNNNLTDFEEEKLTELSSDLGLQALFKSVSVTQFWINAKTSYPELHERAMKFLLPFSTVYLCDAAFSALTESKQKNLLGSGPALRLAVTSLIPRIEKLVKEKE

SEQ ID NO: 10599 - DNA, 2012 bp, Homo sapiens
  CDS (564)..(1832)
taattaattaattaaaaaaaaaggccaggcacagtggctcacgcctgtaatcccagcactttggcaggccaaggcaggcggatcacaaggtcaggagatcgagaccatcctgactaacacagtgaaaccccgtctctactaaaaatacaaaaaaattagccaggcgtggtggcgtgcgtctgtagttccagctgctggggaggctgaggcaggagaatggcgtgaacccgggaggcggagcttgcagtgagccgagatcgcaccactgcactccagcctggtcgacagagcaagactgcatctcaaaaaagaaaaaaaggagaaaaggaggcgggctgcattgaccctgtcagagagcttgcagccattgaggctgcccaatccttgggtgctcttgtgtgggtgtggacacaaggaccccacccagcgcacagccctctgacctctgctcacttgccccagtgtccccagttgtcctcatccagggtgctattcgagtccagcctgaagggccggctccctctctaccacggcctgagaggaagagcatcgttcccgctcctatgcctggaaactcctgcccgcctgaagtggatgcaaagctgctgaagcggcagcagcgaatgatcaagaaccgggagtcagcctgccagtcccggagaaagaagaaagagtatctgcagggactggaggctcggctgcaagcagtactggctgacaaccagcagctccgccgagagaatgctgccctccggcggcggctggaggccctgctggctgaaaacagcgagctcaagttagggtctggaaacaggaaggtggtctgcatcatggtcttccttctcttcattgccttcaactttggacctgtcagcatcagtgagcctccttcagctcccatctctcctcggatgaacaagggggagcctcaaccccggagacacttgctggggttctcagagcaagagccagttcagggagttgaacctctccaggggtcctcccagggccttaaggagccccagcccagccccacagaccagcccagtttcagcaacctgacagccttccctgggggcgccaaggagctactactaagagacctagaccagctcttcctctcctctgattgccggcacttcaaccgcactgagtccctgaggcttgctgacgagttgagtggctgggtccagcgccaccagagaggccggaggaagatccctcagagggcccaggagagacagaagtctcagccacggaagaagtcacccccactgtgtctcctgggagatgacccaacatcctcatttgaaaccgtccagatcaacgttatccccacctctgatgactcctcagatgtccagaccaagatagaacctgtctctccatgttcttccgtcaactctgaggcctccctgctctcagccgactcctccagccaggcttttataggagaggaggtcctggaagtgaagacagagtccctgtcgccttcaggatgcctcctgtgggatgtcccagccccctcacttggagctgtccagatcagcatgggcccatcccttgatggctcctcaggcaaagccctgcccacccggaagccgccactgcagcccaaacctgtagtgctaaccactgtcccaatgccatccagagctgtgcctcccagcaccacagtccttctgcagtccctcgtccagccacccccaggtactgaagaaggagaaaagggccgggcatggtggctcacgccggtaatcccagcactttgggaggctgaggcgggcgaatcacctgaggtcagaagtttaagaccagcctggccaacgtggtgaaaccttgtctctactaaaaatacaaaaattagcgtggagtggtggcaggcgcctgtaatcccagctcctcgggaggctgaggcaggagaatcacttgaacccaggaggcggaggttgcagtgagccgagatcatgccactgcactccagcctgggcgacaaagcgagactttgtctc

SEQ ID NO: 10600 - protein, 423 aa, Homo sapiens [sequence omitted]

SEQ ID NO: 10601 - DNA, 1562 bp, Homo sapiens
  CDS (94)..(1461)
aacaaagggccgcgggcggcgggcagtggtgtcccagtctcccggtgcttccctgaggctgaggcgcccggcctcccgcccgccgcgctccagatgaagtgtgagcactgcacgcgcaaggaatgtagtaagaaaacaaaaactgatgaccaagagaatgtgtcagccgatgcaccgagtccagcccaggaaaatggagagaagggagaattccacaagttggctgatgccaagatatttttgagcgactgcctggcatgtgacagctgtatgactgcagaggaaggagtccaactttcccagcaaaatgccaaggacttcttccgcgttctgaaccttaacaagaaatgtgatacctcaaagcacaaagtgctggtagtgtctgtgtgtcctcaatctttgccttattttgctgctaaattcaacctcagtgtaactgatgcatccagaagactctgtggtttcctcaaaagtcttggggtgcactatgtatttgatacgacgatagctgcggattttagtatcctggagagtcaaaaagaattcgtgcgtcgctatcgccagcacagtgaggaggaacgcaccctgcccatgctgacctctgcctgtcctggctgggtccgatacgccgagcgggtgctgggtcgccccatcactgcccacctctgcaccgccaagtccccccagcaggtcatgggctctttggtgaaggattatttcgccagacagcagaacctgtctccagagaagattttccacgtcattgtggccccttgttatgacaagaagctggaggctcttcaggaaagccttccccctgctttgcatggctcccggggcgctgactgcgtgttaacatcaggtgaaattgctcaaataatggagcaaggtgacctctcagtgagagatgctgccgtcgacactctgtttggagacttgaaggaggacaaagtgacgcgtcatgatggagccagctcagacgggcacctggcacacatcttcagacatgcggccaaggagctgttcaacgaggatgtggaggaggtcacttaccgagccctgagaaacaaagacttccaagaggtcacccttgagaagaacggagaggtggtgttacgctttgctgcagcctatggctttcgaaacatccagaacatgatcctgaagcttaagaagggcaagttcccattccactttgtggaggtcctcgcctgtgctggaggatgcttaaatggcagaggccaagcccagactccagacggacatgcggataaggccctgctgcggcagatggaaggcatttacgctgacatccctgtgcggcgtccggagtccagtgcacacgtgcaggagctgtaccaggagtggctggaggggatcaactcccccaaggcccgagaggtgctgcataccacgtaccagagccaggagcgtggcacacacagcctggacatcaagtggtgaagtcaggccagggccttccagctgctcttggggccagagccaagagcctctcagtagagggaggggctgccctgagtggagtattaaagacacttaag

SEQ ID NO: 10602 - protein, 456 aa, Homo sapiens
MKCEHCTRKECSKKTKTDDQENVSADAPSPAQENGEKGEFHKLADAKIFLSDCLACDSCMTAEEGVQLSQQNAKDFFRVLNLNKKCDTSKHKVLVVSVCPQSLPYFAAKFNLSVTDASRRLCGFLKSLGVHYVFDTTIAADFSILESQKEFVRRYRQHSEEERTLPMLTSACPGWVRYAERVLGRPITAHLCTAKSPQQVMGSLVKDYFARQQNLSPEKIFHVIVAPCYDKKLEALQESLPPALHGSRGADCVLTSGEIAQIMEQGDLSVRDAAVDTLFGDLKEDKVTRHDGASSDGHLAHIFRHAAKELFNEDVEEVTYRALRNKDFQEVTLEKNGEVVLRFAAAYGFRNIQNMILKLKKGKFPFHFVEVLACAGGCLNGRGQAQTPDGHADKALLRQMEGIYADIPVRRPESSAHVQELYQEWLEGINSPKAREVLHTTYQSQERGTHSLDIKW

SEQ ID NO: 10603 - DNA, 1962 bp, Homo sapiens
tgtttagtatgaaaagtatgttttcattttgcagatccttttctctctgctccataaaatgttatataaaacattctctttatttctgttaattttgatagtatgctactgtactaaagctgaacaatataagtattgtcccttctgtttatagacatgtataggacaccttcagcaggcaaggccttatcctagggccaggaatgtgaagatgaatgagctaaccaagccccacctcgctgcccacaatggggccaccgctcactactaagtctaagccctcagagatttgccttggtattaagaaatgcatcagaggcatgcctaacttgaaccaaagcaagcatctgttcttatttaaacctagtaattgtttctttacaaattgtggagaaacttaggacaaatgaacctcaaactagatggtttggagcaaatagcatggaagtaatttgaagaccatattctcttcattgtcacattgacattcaccctgtaaaatcatgatactcttttctgccatagaaccatttcttaaattcgcatttcatgattgtaaggtggtggtctcactgacacttgtcatggtgggttggtggagaggaccgggggtgggaatcacggcagacccagtctgtctgcaacagcggagcctttggagggtgctcaaggaaacactggtagaaatggagggaccaactgaaggaaaattttgaattcaaaattgaagagtttggttctgtgtttcccataatatgcttgataggagaagcaacctttgtaactggctgtgaaatcagaatacatcttggagttctcttacacccccaggggccctttcaaatccatacgatttagaagtttcactgagtgatgggtttggtttattacggctttgtcaaaccaagctaaacaaatttggcatgggatctgtacagtctgttgtgcagtgattgtgtaacaccagcttcttgtccagttctactgtacaagtactgatagaccaaggtttaagtatgtttacgttttgacattacatgatattttgtagtaataataatgccaaaatattcttaaacgccttctgtatagaaactttggtaaagcaaggccaggtgcggtggctcacacctgtaatcccagcactttgggaggccaaagcaggtggatcacttgagatcaggagttcaagaccagcctgaccaacatggtgaaaccctctctctactaaaaatacaaaattagagccaggcgcagtggctcacgcctgtaatcccagcactttgggaagccgaagtaagtggatcacttgaggtcaggagttggagaccagcctggccaacatagggaaaccctgtctctactaaaaatacaaaaattagctgggtgtggcagcgggcatctgtaatcccagctactcaggaggctgaggcacaagaatcgcttgaacccaggaggcggaggttgcagtgagccgagatcgcgccattgcactccagcctgggtgacagagggagactctgtctccgaaaaacaaacacaaccatactcttaggaagttttaccaaagattttgtaaatatcctgtatttatttcccatgaagtgtattatttcttcaatattaccaatgcaagtgaacacgggctttccttatagtggtcatatctctgcttttgaactagcaaaatcagcatgagtgtgatttttgaatagatagatttctgtgaaatgcagcaaatcccatataagaaatcttagcagtagaatatgaaatcaaaattgcaaaaaagcagttatgtctaaatatgcagcccaaagtttttcttaatatctgtagatacaggccaggcacagtggctcacgcctgtagtcccagcactttgggaagctgagaagggtggatcacttgagcccaggagtttgagaccagtggggcaacatggtgaaaccccatctctac

SEQ ID NO: 10604 - DNA, 2344 bp, Homo sapiens
  CDS (315)..(698)
tactagatggacaggctgaggtgtttggcagtgatgatgaccacattcagtttgtgcagaaaaagccaccacgtgagaatggccataagcagataagtagcagttcaactggatgtctctcttctccaaatgctacagtacaaagccctaagcatgagtggaaaatcgttgcttcagaaaagacttcaaataacacttacttgtgcctggctgtgctggatggtatattctgtgtcatttttcttcatgggagaaacagcccacagagctcaccaacaagtactccaaaactaagtaagagtttaagctttgagatgcaacaagatgagctaatcgaaaagcccatgtctcctatgcagtacgcacgatctggtctgggaacagcagagatgaatggcaaactcatagctgcaggtggctataacagagaggaatgtcttcgaacagtcgaatgctataatccacatacagatcactggtcctttcttgctcccatgagaacaccaagagcccgatttcaaatggctgtactcatgggccagctctatgtggtaggtggatcaaatggccactcagatgacctgagttgtggagagatgtatgattcaaacatagatgactggattcctgttccagaattgagaactaaccgttgtaatgcaggagtgtgtgctctgatccatatggtcaaaaaggactgaaaaattgtgatgtatttgatcctgtaacaaagttgtggacaagctgtgcccctcttaacattcggagacaccagtctgcagtctgtgagcttggcggttatttgtacataatcggaggtgcagaatcttggaattgtctgaacacagtagaacgatacaatcctgaaaataatacctggactttaattgcacccatgaatgtggctaggcgaggagctggagtggctgttcttaatggaaaactgtttgtatgtggtggctttgatggttctcatgccatcagttgtgtggaaatgtatgatccaactagaaatgaatggaagatgatgggaaatatgacttcaccaaggagcaatgctgggattgcaactgtagggaacaccatttatgcagtgggaggattcgatggcaatgaatttctgaatacggtggaagtctataaccttgagtcaaatgaatggagcccctatacaaagattttccagttttaacaaatttaagaccctctcaaactaacaggcttagtgatgtaattatggttagcagaggtacacttgtgaataaagagggtgggtgggtatagatgttgctaacagcaacacaaagcttttgcatattgcatattattaaacatgctgtacatactttttgggtttatttggaaaggaatgcaaagatgaaggtctgttttgtgtacttttaagactttggttattttactttttggaaaagaataaaccaagaattgattgggcacatcatttcaagaagtcccctctcctccacatttgttttgccaatttgcacattaaatgactcttccctcaaatgtgtactatggggtaaaaggggtagggtttaaagatgtagacagttgggtttttttaagggcccttcttcaataactggaacactctataacaaaggatacttatttaaatagatgacattgactatttttgtttttattaaaaggaagcttacatgcctaccaatatttaatcttttatgattgcctttttataactttttatattctcagcagagtgctttaccaattgaagtaaaatgtggcaggctggagttattgaagcagagtggcagtcttcagtttgcagagtaggggtctgtcttttaaactctgagtgcaaacttcagagttcttgccttggctgcagtttttttccttcaagaatgcagtactaacatttatttgagtggagttactgaacagtaacatagctgtgatttttggtatttgaaacactggttttaaatattttgacttgttgagggtatgttttatatagcaagacattatatagcagtaaaaaatggtgttttatcttctatataattcctgtttttattattaacaaaacagtcctaaatagcagccctcaattgtgaaaaaatttactttaaactacattaggttgtgaatgcaggttttatcagaactatgtttttgttcagtttatctgttcatatggataaatattggttgggatgacttggtgtctaatgtgtagtgctacacacctaacttatggggccaaaatagcatgtcctaatgcttgctgctgatttaaacacattaaaggtactttgcaggaaatccttgcaccatgggattaatatcc

SEQ ID NO: 10605 - protein, 128 aa, Homo sapiens
MQQDELIEKPMSPMQYARSGLGTAEMNGKLIAAGGYNREECLRTVECYNPHTDHWSFLAPMRTPRARFQMAVLMGQLYVVGGSNGHSDDLSCGEMYDSNIDDWIPVPELRTNRCNAGVCALIHMVKKD

SEQ ID NO: 10606 - DNA, 1534 bp, Homo sapiens
aggaagtcatgccatacaggaagccatcagaagttgcctggtaaggatttaagaaaaaaggaattaagtggttatttgggtcataaattttagggcatcaggttatgggtatctgatgtatttatattaataattacagcttaccatgggccagtcactcttttaaatgccacagcaaatttatgaagtaggatatattattatcctcatttgcacatgaggaaactgtgcacaaagacgttaaatggactgccaaaaatcctaaagctagtaagtgccagtaccagtattcaaacctaggcagtctagctcttaaccgctatactatatcttccattgaaatggacagctggttattttgactaaatatcctaagatatgtttggaagggaattaccatcactgacctcttaaatctcctttttctgtacttccaagctgatcaactctttttttgtgaaagactcaaattgttgtgttgtattacatgaatcgatatatgggataattgctaaacattatagacctgagagtcattctatctcttttagaaatctttttctttattccataatggataatgacaaattcaaaagctttaggaagtaggcagataacataagtgagggagatggcttggtataagtcaatttgaaatggcgagaactgtggcaaaccactactcactcgtcacttggctccagctgctctgtgcaaatgtggatccaatgttatcagatattttaaggccaggaatggtggcttatgcctataatcccagcactttgggaggccaaggtgggaggattgcttgagcctaggagtttgagacctgcctgggcaacacagtgagaccttgtctctaccaaaaaaaaaaaaacattagcgacatgtggtggcatgtgcctgtagttccagctacttgggagggtgaagtgggaagattgcttgagttcaggaggtcaaggctgcagtgagctatggttgtgccacagcactccagcctgggtgacaaagcaagactctgtctcaaaaaaaaaaaaaaaaaagatatttgaaattttaccttaagggtaagttattacctctgcaaatagctcatttcttcatcgtctgttttactctattcagtttcagagagagaccacagtcttgactttattttcaagttctgtgaatccattatttttagagcttttacctctttacagtctccatgtatatattcaataatgtaaaatatgttaacagttcattgtttggactgtgtcctttttacagacaattgactatataaaaggctgaagggcttttccagtatatccctagtactacaaagtacgttttggagtcagacaaatctgagtttgaattctgtttctgagacattaacttgtaatttcagcaagatgttttttcttcatctgtacaatagggttacttatacctcctaattagatgaggattaaatatatataaatacactgatcatagcagctgtcatatgcaaattctgcagcaaacaaaaaaaaag

SEQ ID NO: 10607 - DNA, 1456 bp, Homo sapiens
  CDS (272)..(1054)
tcggttaaaagccagaagttatgagcttcaggaaagcaatgtacggctgaagttaaccattgttgacaccgtgggatttggagaccagataaataaagatgacagctataagccgatagtagaatatattgatgcccagttcgaggcctacctgcaagaggaattgaagattaaacgttctctcttcaactaccatgacacgaggatccatgcctgcctctactttattgcccctactggacattcactaaagtccctggatctggtcaccatgaaaaagctggacagtaaggtgaacatcattccaataattgcaaaagctgacaccattgccaagaatgaactgcacaaattcgagagtaagatcatgagtgaactggtcagcaatggggtccagatatatcagtttcccactgatgaagaaacggtggcagagattaacgcaacaatgagtgtccatctcccatttgcagtggttggcagcaccgaagaggtgaagattggcaacaagatggcaaaggccaggcagtacccctggggtgtggtgcaggttgagaatgaaaatcattgcgattttgtgaaacttcgagagatgctgatccgcgtgaacatggaggacttgcgagagcagactcacacccgccactatgaattgtaccgacgctgtaagcttgaagagatggggttcaaggacactgaccctgacagcaaacccttcagtcttcaggagacatatgaagcaaaaaggaatgaattcctgggagaactgcagaagaaagaagaagaaatgagacaaatgtttgttatgagagtgaaggagaaagaagctgaacttaaggaggcagaggaagagcttcacgagaagtttgaccttctaaagcggacacaccaagaagaaaagaagaaagtggaagacaagaagaaggagcttgaggaggaggtgaacaacttccagaagaagaaagcagcggctcagttactacagtcccaggcccagcaatctggggcccagcaaaccaagaaagacaaggataagaaaaatgcaagcttcacataaagcctggcaagccaaggatgttcccgcattcacctgcttttgcagtaatatcgtatctctgccatgtgtgttctttagttttattttattttattttatttttttacccttcctcaaacaccagtaactattattaactcgttttgctgaatgttgttgggtggtagaaaatgatagaacaagggaataaccgcgaatgctctgtgcagctggactctgtttccggaaagtaaatgatttgctttttatgcctgttctgaatggcagcacgaagcaggcctgttacttgtatgtcgctttggacagaggaaagtggggtaaaatgctacctgtacgtctgacatgaaaacttctcaccgcctcagcagctgaactaaaaacctgaatagccatgacaag

SEQ ID NO: 10608 - protein, 261 aa, Homo sapiens [sequence omitted]

SEQ ID NO: 10609 - DNA, 1464 bp, Homo sapiens
  CDS (185)..(1462)
ttgcggggagggcccgaggtcgctgtgtccggggcagagcggccggttcgtcccgagtctgcgctctttcgggtccgctgctgtgtcccggtccgctctcctcagcatgagcggccggtaggagtgaggtttcatcggttccctcgcactggaggaggcagcggccgcttcggcagcgacagctatggcggtagagacgcgggcagagctggtgggtaagcggttcctgtgtgtggcggtcggcgacgaggcacgttcggagcgctgggagagcggacgcggctggcgaagctggcgagcgggggtcatccgagccgtgtcacacagggacagccgcaatccggacctggcggtgtatgtggaatttgatgatcttgaatgggataaacgagagtgggttaaagtttatgaagatttttcaactttcttggtggaataccacttaatctgggccaaaaggaatgaccctagccagactcagggatcaaagagcaaacagattcagtggcctgcattgactttcaaacctctggttgaaagaaatatacccagttcagtcactgcagtagaattccttgtagataagcaactggattttttaactgaagatagtgcctttcagccctaccaggacgacatagacagcctaaacccagttctcagggacaacccgcagcttcatgaggaagtgaaagtctgggtaaaggaacaaaaggttcaggagatttttatgcaaggtccttattccttaaatggatacagagtgagagtatatagacaagactctgccacccagtggtttactggcataattactcatcatgatctcttcacccgcaccatgatcgttatgaatgatcaggtactagaaccacagaatgtcgatccttctatggttcaaatgacctttctagatgatgttgttcactctttgttaaaaggtgaaaatattggcattacatcacgacgcaggtctcgtgccaatcaaaacgtcaacgctgttcacagccattatacacgtgcccaagcaaatagtcccagaccagcaatgaactcccaagctgctgtaccaaaacagaatacacaccagcaacagcaacaaagaagtatccgtccgaataagaggaagggctcagatagcagtataccagatgaagagaagatgaaggaggaaaaatatgattatatatcacgaggagaaaatcctaaaggtaaaaacaaacacttgatgaataaaagaaggaaacctgaggaggatgaaaagaaactaaatatgaaaagacttcgaactgacaatgtttcagacttttctgagagcagtgactcagaaaattcaaataagagaataatagataattcctcagaacagaagccagagaatgaattgaaaaataaaaatacttcaaaaataaatggagaagaaggaaaaccccataataatgagaaggcaggagaagagaccct

SEQ ID NO: 10610 - protein, 426 aa, Homo sapiens
MAVETRAELVGKRFLCVAVGDEARSERWESGRGWRSWRAGVIRAVSHRDSRNPDLAVYVEFDDLEWDKREWVKVYEDFSTFLVEYHLIWAKRNDPSQTQGSKSKQIQWPALTFKPLVERNIPSSVTAVEFLVDKQLDFLTEDSAFQPYQDDIDSLNPVLRDNPQLHEEVKVWVKEQKVQEIFMQGPYSLNGYRVRVYRQDSATQWFTGIITHHDLFTRTMIVMNDQVLEPQNVDPSMVQMTFLDDVVHSLLKGENIGITSRRRSRANQNVNAVHSHYTRAQANSPRPAMNSQAAVPKQNTHQQQQQRSIRPNKRKGSDSSIPDEEKMKEEKYDYISRGENPKGKNKHLMNKRRKPEEDEKKLNMKRLRTDNVSDFSESSDSENSNKRIIDNSSEQKPENELKNKNTSKINGEEGKPHNNEKAGEET

SEQ ID NO: 10611 - DNA, 1547 bp, Homo sapiens
  CDS (303)..(1472)
aagacctcttagaccagctcttgtccatcatttgctgaagtggaccaactagttccccagtagggggtctcccctggcaattcttgatcggcgtttggacatctcagatcgcttccaatgaagatggccttgccttggggtcctgcttgtttcataatcatctaactatgggacaaggttgtgccggcagctctgggggaaggagcacggggctgatcaagccatccaggaaacactggaggacttgtccagccttgaaagaactctagtggtttctgaatctagcccacttggcggtaagcatgatgcaacttctgcaacttctgctggggcttttggggccaggtggctacttatttcttttaggggattgtcaggaggtgaccactctcacggtgaaataccaagtgtcagaggaagtgccatctggtacagtgatcgggaagctgtcccaggaactgggccgggaggagaggcggaggcaagctggggccgccttccaggtgttgcagctgcctcaggcgctccccattcaggtggactctgaggaaggcttgctcagcacaggcaggcggctggatcgagagcagctatgccgacagtgggatccctgcctggtttcctttgatgtgcttgccacaggggatttggctctgatccatgtggagatccaagtgctggacatcaatgaccaccagccacggtttcccaaaggcgagcaggagctggaaatctctgagagcgcctctctgcgaacccggatccccctggacagagctcttgacccagacacaggccctaacaccctgcacacctacactctgtctcccagtgagcactttgccttggatgtcattgtgggccctgatgagaccaaacatgcagaactcatagtggtgaaggagctggacagggaaatccattcattttttgatctggtgttaactgcctatgacaatgggaacccccccaagtcaggtaccagcttggtcaaggtcaacgtcttggactccaatgacaatagccctgcgtttgctgagagttcactggcactggaaatccaagaagatgctgcacctggtacgcttctcataaaactgaccgccacagaccctgaccaaggccccaatggggaggtggagttcttcctcagtaagcacatgcctccagaggtgctggacaccttcagtattgatgccaagacaggccaggtcattctgcgtcgacctctagactatgaaaagaaccctgcctacgaggtggatgttcaggcaagggacctgggtcccaatcctatcccagcccattgcaaagttctcatcaaggttctggatgtcaatgacaacatcccaagcatccacgtcacatgggcctcccagccatcactggtgtcagaagctcttcccaaggacagttttattgctcttgtcatggcagatgacttggattcaggaaaggatggccttcttgggtagcaggagtcagggggctgtaccctgggggtgccaggaaatgctctctgacctatcaataaaggaaaagcagtg

SEQ ID NO: 10612 - protein, 390 aa, Homo sapiens [sequence omitted]

SEQ ID NO: 10613 - DNA, 2570 bp, Homo sapiens
attaaaatgagaaatacataagatgataaataaaatgaaggtgaaggtattccagatctaccgaaaagattttcagtatcacagattattcataagaaattgagaaaaggaacaatcagaagttgcaaaagatggtatagccgaatataatggaaataggaaaaattagtcgaaaataaaggttgatttagaaatgaagaaaatgaatatatttcttaatacaaaataagtgggaaatgagaagttataccaataaaaagcatttacaaatttaggggatattgtaacccagtataattttctgacaggttggactttgaccctaatggacttactggtgaactttttcaaatgtttaaataatgtctatccatgtatcatgaaggacagtatgcttcaaattgtcttttgaggcagacatgttctcagtactaaaagacatttttagaaggattttattctcaacagatgcaaaatgcaaaataaaatattgacaaacaatacagcaacaaataatttactatcactcaggattataaggctggtgttaagcagaacagccattaaatcagcatcaaaagaacaaatagtaaaatccaaagtattaattacagataacttttcaaaaattcatcattcacccttgatttaattatttctctggcaattatttaatagacttctcggagtctgttaagtacttaaaccaagaactaccattattcctactgggaaaacataaacatttctcaagtggaaagtaaacagtgttggcactatttttatatatggttaaagagacctgtcattgcaataaaagccagcattcacaaaatgaggaagataaggaaagtagcataaatattttctattaacatggctttacaactgctaaaacttatagtataaaaatgtactaacaaagactaattcaagaagttgcaggatacacaatttttaaaaatctcatttctacatcttagcagtgacaaactgcaatttaaaaagtgtgtttggttattaatatatatgagacttttaaagaaagttatataactacatagagataaattaagaaagatgcctaaatagaagcaagtttaaagagctatatttttaaacatgaacaaactcccatgggagccatgccagtgtagtggaaaagtagtacatggggagatggggagtttttttgaaaaccagaattacagttctcatttcactacttaccagttgtatactcttgggaaagtcactcctagtatctatttcaccatctacagaagagaaatacttcacagaattattgtggggattaagttagataatgtgttttaaaatataaagctacatccaaagaaatgccaatatgtgacattagtatgaaatttactacagttccatttaacattccaactggttgctgtgtggaatatggcataattgtaataaattatttaggaaagcaagcaaagatgtaagtttttttaatttagggggaaaaaatgggagccttgctctccaaatccttaaaacatgctattaagcaacctttctgaatattctgtggtgccaagtagaaagtttaactgaaattaataagccaatggaaagaaagaaatattaataactgctggtggaaagactagctagatgtcagtgtggaaagattagatccactttacatgtgatattccaaatgaattaaaatgttaagtataaaaagaaaaatactacaagtctcacaccaatagtggtataaaggaacttcatggcaattggcaaggtagatcaactaagagaaaaagttttaaatgtgtagtaaataggaaaaagacaaaacaagatggaatttaaaagaagctatttgcattacacatggatgcactcagtttttgtaaaactatatgcatatccataggggtttgtactcttaggcaaatttataaagcgatcgtgtataaatgatataaaaaatcaatttgaatggtattcaaatttcctaatattaaaaatgcaactttgacttagttcatgctattgtattagcaaaactgttttaattgcatgtgtccttatagcagcagcattgtgtattagtagccttttaagagaactgtgtagaagactataaaaagggctttataactgatcttttgacatactcactttgagtggcatatgcccaggaaaatatttaaaagaaagaaaagctatttgtacaaagttttctagcagttccactcagataactttaagggggaaaaaagcccaacgattggaaatggttaagtaaattttggtgtattgctagtgctatcacagaatgttatatagccattcaataatattgatatatgtcaaattgtatgcaaaaaagtgagattcaaaaatgttaataagaacataaattgtgtttactgatacatgtgaaaatttaggtctacattgaaaagaatcagaagataacatgtaattcagtttaacattaggggttctttatttttcttctgttaaatattgatgtatgcaataaaaaataaaagattaattggtaaagtggtttactg

SEQ ID NO: 10614 - DNA, 1855 bp, Homo sapiens
agagacgccagaggtgcagctccagcagcaatggcagtgacggcgttggcggcgcggacgtggcttggcgtgtggggcgtgaggaccatgcaagcccgaggcttcggctcggatcagtccgagaatgtcgaccggggcgcgggctccatccgggaagccggtggggccttcggaaagagagagcaggctgaagaggaacgatatttccggtgaggctcaccgggtcccaagtccagccctggatctcccaatggccttccaatccttaaactgccaatcgccccacccgttcctacctggtgccttgggcgccccatcccccaacagaactcccgggccccaatccagtataccctaacccttgatgtcccgaccgttgccacgtatagggcactcccagttacctgcacaacagtttcaggcccccaaaccgtttccaccggcgggtctccaaaacaacccacggctcaactcctcctttatcattaccatctcccgcgtggagttctcctcaggtcgtgcgaaacacccccagattcttcgcacagtgtctagatccgaccgcccaacgtttgcctcccagcctgactccctcggcccttacccacctgtcaccccctctacgctctccttcctcgccagcacgccttagctttgcaagcctgcatgcattcaggcttctcaggtgtttctagacccccgactccgcaagagtgaggatgatgggagctggtcatgggagctacttatggttggacaccatcttctaaaggcttttgccctactcagcccaacctagacctgtagatttccctctcctgcttaggagtatggagtgggctgggcctccctttgccagccttgagttatctttaactgacttctgtccactctgaagagcagtgaggaattaatcttgcttttgcttgtcctttggcctttcacttctgccttctgttgagaattatcaccatgacacctgccataccgtatagagagccaaggtacagccgttagagactatctaattgagcccctacattttgtagttaaggaaaactgaggcctaaatgtgaccaaaccaacattgtaatccagtcccttcttggaacctaaattgaactgccaagtactgcgcatgcaagagaccctttattggccttacagtgggccattcatttctataggcaaagaaagctctagacagattggaataggaaatggatatttgccttttagctacacccctttgtctgtcttcctcattttgttcctttttttttccctaaaggggagtcaagttccctgggttgttcccctcataaggtattagggacttgtgtcacatctctctggagttttctattttaaagaggaatctgaaagcaataagctctttggtcttcttaagatggctacacctcaatttaagatggggtattctttcactagttgaggagtagaagaggatgaccagctagactcccatggaattggaactcctattccttgcttagacattacaggttatgctttgagatctctttggggtgaaggattgaaattaaaccctgagccaccgtgtccttgtagagcacagagtagagaacaactggcagctttgaaaaaacaccatgaagaagaaatcgttcatcataagaaggagattgagcgtctgcagaaagaaattgagcgccataagcagaagatcaaaatgctaaaacatgatgattaagtgcacaccgtgtgccatagaatggcacatgtcattgcccacttctgtgtagacatggttctggtttaactaatatttgtctgtgtgctactaacagattataataaattgtcatcagtg

SEQ ID NO: 10615 - DNA, 1705 bp, Homo sapiens
tttatatataaggaatgcaattacctctcaaaatttatgagaacaaactcaagtccatagaaacctctggagctgagcatcctcagttcaaatgctggctctgccacttaccagctgcatgatcttgggcaagttaatctgcctcaaggctttggcaagatcaaagggttgctatgacctgatgcacacatggtacctgacttcaggtaggtactgagtgcatgtcactggtggcagattgcattgcccaaaggcgtctgaacaattaaagatgtcccagacctcctgctctaacaacatgactgacattgctctcactgagaggtggcgtctatgttcctcccgtttaatctgggaagagaggagttcccaggctaggtcatagaaggtgatgcaggttccactcagctcacctgtgctcactccctcttcttttttttcctctctctctctctctccctccaactccccatacctctgtctctctctgctcacccttgaatgcagctaccatgctgtgaggaaacctggactaggccagctggaaagaggacatggacaggcctatttggggaggagctgagtgaggccccagtgacagcaaacatcagttgtcagatgtgcaatggatgagccttcagcaggctctgctgtgcccttttcaaatgcatatttattatgcagccagagttggcagcaagcactaagctgtgacagtgcaagtaatttaattggtgaggcccattcttgcaactacctctgtgactagtggagacaactcagatcccagataaaggatggggtgctgggtcagcatgccaaacccaagctaccccagggggctcagaggaagaataatgtgctggaaagtgctctgtggcatgtaaaaatgggtgtcttctcaggatctagcagtgggactagatttgggtagaagtgccaaatgagagaaagcaaagaccctaaggatgagatttaatgaggttgctgccctgtgtctggcctgtcctccgctggtgctcctcttccaagggcattcctgcccatggggaacagaggctttgggtaaggaacacagccatcatattgtatgaacagccacacagggaggctggcatgaagctaatacaggctagaagtctctcctgggaggaggctgccacgtgggggtcacagagtgctgagggccacttggaaagttgtggatccaacaaggatcctgggccctggaagctccacagcatccctcagtagcaggctgtgaagtatctgacctgtgttatcagtagacggtcttggtcttgactgcaagttgtccaggttcttggtgttttgaacaaagaattagataaaatgcacagcaaagcaaggaaagaatgaagcaatgaaagagcaaaaacagatatttattgaaaatgaaagtacactccacagtgtgggaatgggtggagcagcagctcaaggtccaggatatagaatctacagagtccaaatgccccttagaggtttcccattggccacttggtgttcacccggtgtaaatgaagtggcggcctgctttctgcaaccaatcagaggctgaagtgaagttacaaagttacgctcctatgcaacatctgattggttgcacaaagcaaccaatcagaggtattttcagtttcgcatctgctgcactccagcctgggcgacagtgacactctatctc

SEQ ID NO: 10616 - DNA, 1609 bp, Homo sapiens
  CDS (563)..(1558)
agtctttttccccctcccttactcttcgtccccggtccctcccctccccacccctttccttctagctccgacgtttgcggccgcgggggcggcggaggatatggagtaaagccagagtcagtggccaggcacgaaggcagagcaggaacagccaggaggcgtttattaggggggcggggggaaagagccccagcaccgcccctcctggaagaaggaagaggaagtggcagtttttgtctttgataaaaaactgattgacaagtatcaaaaatttgaaaaggatcaaatcattgattctctaaaacgaggagtccaacagttaactcggcttcgacaccctcgacttcttactgtccagcatcctttagaagaatccagggattgcttggcattttgtacagaaccagtttttgccagtttagccaatgttcttggtaactgggaaaatctaccttcccctatatctccagacattaaggattataaactttatgatgtagaaaccaaatatggtttgcttcaggtttctgaaggattgtcattcttgcatagcagtgtgaaaatggtgcatggaaatatcactcctgaaaatataattttgaataaaagtggagcctggaaaataatgggttttgatttttgtgtatcatcaaccaatccttctgaacaagagcctaaatttccttgtaaagaatgggacccaaatttaccttcattgtgtcttccaaatcctgaatatttggctcctgaatacatactttctgtgagctgtgaaacagccagtgatatgtattctttaggaactgttatgtatgctgtatttaataaagggaaacctatatttgaagtcaacaagcaagatatttacaagagtttcagtaggcagttggatcagttgagtcgtttaggatctagttcacttacaaatatacctgaggaagttcgtgaacatgtaaagctactgttaaatgtaactccgactgtaagaccagatgcagatcaaatgacaaagattcccttctttgatgatgttggtgcagtaacactgcaatattttgataccttattccaaagagataatcttcagaaatcacagtttttcaaaggactgccaaaggttctaccaaaactgcccaagcgtgtcattgtgcagagaattttgccttgtttgacttcagaatttgtaaaccctgacatggtaccttttgttttgcccaatgttctacttattgctgaggaatgcaccaaagaagaatatgtcaaattaattcttcctgaacttggccctgtgtttaagcagcaggagccaatccagattttgttaattttcctacaaaaaatggatttgctactaaccaaaacccctcctgatgagataaagaacagtgttctacccatggtttacagagcactagaagctccttccattcagatccaggagctctgtctaaacatcattccaacctttgcaaatcttatagactacccatccatgaaaaacgctttgataccaagaattaaaaatgcttgctacaaacatcttcccttgcggttcgtgtaaattcattaaacaacattggagcagaccttctgactggcagtgagtccg

SEQ ID NO: 10617 - protein, 332 aa, Homo sapiens
MVHGNITPENIILNKSGAWKIMGFDFCVSSTNPSEQEPKFPCKEWDPNLPSLCLPNPEYLAPEYILSVSCETASDMYSLGTVMYAVFNKGKPIFEVNKQDIYKSFSRQLDQLSRLGSSSLTNIPEEVREHVKLLLNVTPTVRPDADQMTKIPFFDDVGAVTLQYFDTLFQRDNLQKSQFFKGLPKVLPKLPKRVIVQRILPCLTSEFVNPDMVPFVLPNVLLIAEECTKEEYVKLILPELGPVFKQQEPIQILLIFLQKMDLLLTKTPPDEIKNSVLPMVYRALEAPSIQIQELCLNIIPTFANLIDYPSMKNALIPRIKNACYKHLPLRFV

SEQ ID NO: 10618 - DNA, 1371 bp, Homo sapiens
aacaggcaccgctgcggggactggagtcggcggagaaaaccggggtccccagcgctggggcccgcggcgccatggctcacgtcggctcccgcaagcgctcgaggagtcgcagccggtcccggggacgggggtcggaaaagagaaagaagaagagcaggaaagacacctcgaggaactgctcggcctccacatcccaaggtcgcaaggccagcacggcccctggggcggagggtgaggaccacaggcatcggggagaggaggcgcagttactacccggggaagtcgggcgagcagtggtcggggacgctcagtcatgcctctgtgcagccgggcctgagatgtgagggccaggcgccgcaggagccaggaaggggctcctctgggaagctccatctctgttctggaaagcccctcaggaagcgctcaccctgtagccggcctgtgcctgccccaggccagagcaggggacgaaggtttacctcttcccctcctggctttccagcctcaccttctccctgcatcacagagagaagcaagcagaaggcccggaggagaacaagatccagctcctcctcctcttcttccagttcttctagctcctcttcttcctcctcgtcctcctcctcttcctccagtgatggccggaagaagcgggggaagtacaaggacaagaggaggaagaagaagaagaagaggaagaagctgaagaagaagggcaaggagaaggcggaagcacagcaggtggaggctctgccgggcccctcgctggaccagtggcaccgatcagctggggaggaagaggatggcccagtccagacggatgagcagaagtcccgaatccaggccatgaagcccatgaccaaggaggagtgggatgcccggcagagcatcatccgcaaggtggtggaccctgagacggggcgcaccaggcttattaagggagatggcgaggtcctagaggaaatcgtaaccaaagaacgacacagagagatcaacaaggtgggtgtggcccctctgcctgccatccgcccccagctctgtttgtgatgtacccctcctcctgtgtgctttcttccgcagcaagccacccgaggggactgcctggccttccagatgcgagctgggttgcttccctgagggcccccgctggccaaggcctgtggacgacgctggcggcccagcctgggcaggttttcagggtgccagtgggaagcctgatgggtgctggtggcctttcccccgtggattggtctctggcccagcccagtctcttctcaggggcagggggtggaggttggggtcaccggcctgcttggcacccccatctgaaagagcagcacttctcagctattaaaggccccctggatagac

SEQ ID NO: 10619 - DNA, 1629 bp, Homo sapiens
agctggcgtcagggacttcctcgggctccctaaggacctgctctcccagttctctactcttccctctgaggcagaggctgggcaggacccacaggcagcccttagtgacccgcactccacaccctgtctgccttaggagaaatggggtctgtgaatctgggctctccctccatgctgccgtgtctgcggagccaggtgccggcgtggcctctgctagccagcagagtgagcatgcacagctggtccagggcacggtgttttgtttgcactgttccagacatcgtcatctccatctgatgatgatcactcggcagctttgagccctggcacagcttcgggtcgaagcacgttcccttttcaggagagttgagccgagctttccttcacgcagacttaatttcctggacttagtgctaacgtcaagaccaaacctgtaggaaaagagctttaactacacaaacacatactgacagattcagccaaactccgagagtcccagaccggagcctgtgtccctagcgcaggtgtgtctgtcgggcagccgacggtgcctgtgcaggcagtggctggacaccactactcccttctcttccctccctgcttgatcgcgctgtgggattcctgatgctgtgtgggtctctggctccccctgctgtagaaggggagtactgcccctgggacacagaactgcaaggccagtggcgccaggtacctcccacaggaagaagatttgaggacatttaaaggtacccactttaccccgtgcccaccttctaccccagctccctggcagccatccaaaatttgcctccaagagcatgtctcacagacaaaggtctgtgttttatggaactgtgctgacgggctctgcacacatctcactgggctactctccctggtcccagcctgcccagacagtcaggcgcaaagtaacatgtgagtcagaagaggttctggaggaagttggagaaggctccagaagtggcctcatggaatgcggccccatctatgccgcatatgttttactgcaagctcatctccagccaagacttggctccttctctgatgcaggaaacctatcgccagtgcaggtgcctttaatgtttctctgagaaaggaggaaatgctggcttgtgctgtcgataagtccccaaggctgcatgtattagcaggaagcacagcaggactctgagagaagaatgtgtctcttctctttgttgctgagaaggtagagaaaggccctgcactctttgacttaccttcctcagtcctgtgcatccaggctgttaggtgactctgctgtgacttagtcccacccagcaccataaagaaaggcaaattgacggccgggtgcagtggctcatgcctgtaatcccagcactttgggaggccgaggcgtgtggatcacctgagatcgggagtttgagaccagtctgaccaacatggagaaaccctgtctctactaaaaaatataaaaaattagtcgggcatggtggcacatgcctgtaatcccagctacttgggaggctgaggcaggagaattgcttgaacctgggaggcggaggttgcggtgagctgagatcgtgccattgcactctagcctgggcaacaagagcgacacttcgtctc

SEQ ID NO: 10620 - DNA, 1483 bp, Homo sapiens
  CDS (1051)..(1305)
tacgaatgtggccggtgtgggcgagcctttactcacagctcaaatcttgttctgcaccatcacattcacactggaaataaaccatttaaatgtgatgaatgtgggaaaacttttggactcaattctcacctccgtcttcatcggagaattcacactggagaaaaaccctttggctgtggtgagtgtgggaaggctttcagtcgaagctcaactcttattcaacatcggatcattcacacaggagagaaaccctacaagtgtaatgaatgtggaagaggctttagccagagcccccagttaactcagcatcagagaattcacactggagagaagccgcatgaatgcagtcactgtgggaaggccttcagtcgaagctccagccttattcagcatgagagaattcacactggagagaagccccataaatgcaatcagtgtgggaaggccttcagtcagagctcaagccttttcctccatcatcgggttcatactggagagaaaccctatgtatgtaatgaatgcggcagagcctttggttttaactctcatcttactgaacatgtaaggattcacacaggagaaaaaccctatgtttgtaatgagtgcggcaaagcctttcgtcggagttccactcttgttcagcatcgaagagttcacactggggagaagccctaccagtgcgttgaatgtgggaaagctttcagccagagctcccagctcaccctacatcagcgagttcacactggagagaagccctatgactgtggtgactgtgggaaggccttcagccggaggtcaaccctcattcagcatcagaaagttcacagcggagagactcgtaagtgcagaaaacatggtccagcctttgttcatggctccagcctcacagcagatggacagattcccactggagagaagcacggcagagcctttaaccatggtgcaaatctcattctgcgctggacagttcacactggtgagaaatcctttggatgtaatgaatatggaaaagctttcagtcccacctcacgacccactgaagatcagataatgcatgctggggaaaagccctataaatgtcaagaatgtggaaacgccttcagtggaaagtcaacccttattcaacatcaggtaactcacactggtcagaaaccatgtcattgcagtgtgtatgggaaagccttcagccagagttcacagctcacaccacctcagcagactcgtgttggagagaaacctgctttaaatgatggctctaaaagatactttattcatatcaagaagattttccaagaaagacatttttaatgtgataaatgcagaagacagtttagcaactgttcacttgacattagaagataagatggcataatgaaagatatataaggtctaaatattactggcaaagtaaaataaatagttcagatgactactaaagtcaaagtcattaaatctggaagtaaacacgagaattcattctggg

SEQ ID NO: 10621 - protein, 85 aa, Homo sapiens [sequence omitted]

SEQ ID NO: 10622 - DNA, 1565 bp, Homo sapiens
  CDS (105)..(1040)
ttttttccagaaatacttgcagacttgaaggaattatcagtctttcattttctatcatcagtgtcctatgatagtttgtgcttccctccctcatccctttgttcatgtcactctgttcaccaacccactctgctgaaatgtcgttatttcttcaaggcccggaggaaatgctaccactctcatcagagggttcagagatgggcagtgagaaggagcagagtccagaaccacacctgcctgaggaaggggaagggggtaagccttggagagtggatgactcagagggttcttggatcccacctggggagaaggagcatgggcaagagagcctgtcggatgaactgcaagaaactcatccaaaaaagccatggcagaaagtcactgcccgggctcgagagctaggggaccccattgctcatccaaggcatgaggcagatgagaagccctttatatgtgcccagtgtggcaaaaccttcaataatacctccaacctgagaacacaccagcggatccacactggtgagaagccttacaagtgttctgaatgtggcaagagcttctcgagaagctccaaccgcatccggcacgagcggatccacctggaagagaaacactacaaatgccccaagtgccaggagagctttcggcggcgctcagacctcaccacgcaccagcaagatcacctaggcaagcggccataccgctgtgacatctgtggcaagagcttcagccagagtgccacgctagctgtgcatcaccggacccacctggagccagcaccctacatctgctgtgagtgtgggaagagcttcagcaacagctccagctttggcgtgcatcaccgcacccacacaggtgagagaccttatgagtgcactgagtgtgggcggaccttcagcgatatctccaactttggagcacaccagcggacccacagaggggagaagccctaccggtgcactgtgtgtgggaaacacttctcccggagctcgaacctcaagcccttcatcccactttggagaatggttttgtatagcctctgaagtcaggatctcaggaagtcctgaggagggactctggaataaaaacccttgcctctttccaggccaatttctcgtgttggaaagtcagaagacccagtcttggctttactttcttggggtgaaagagaaatagggtaggctcagaacatgctcatgttattaaggcagcagtccccctggcctttgaggaagtacttatgagatgggtgtcactgtctgaaggttctccaaattgtctgtgaactgcttaggtaggagtgcactgcagtttcctgctagttcccacctgttgtgccccaactttgcttctagatctctggggtgggaggagtgaccttctcaatggaaggggcctccttggtctggagaagagatctgaggtcccaccttagaaatgaaagggaaaccctcagggagccatgacccagggaccttcacactcccccatgtttgttacttgttatccctcccccaacctgcctctgttttccccagagtgattagcagtaaaacccttcaatg

SEQ ID NO: 10623 - protein, 312 aa, Homo sapiens
MSLCSPTHSAEMSLFLQGPEEMLPLSSEGSEMGSEKEQSPEPHLPEEGEGGKPWRVDDSEGSWIPPGEKEHGQESLSDELQETHPKKPWQKVTARARELGDPIAHPRHEADEKPFICAQCGKTFNNTSNLRTHQRIHTGEKPYKCSECGKSFSRSSNRIRHERIHLEEKHYKCPKCQESFRRRSDLTTHQQDHLGKRPYRCDICGKSFSQSATLAVHHRTHLEPAPYICCECGKSFSNSSSFGVHHRTHTGERPYECTECGRTFSDISNFGAHQRTHRGEKPYRCTVCGKHFSRSSNLKPFIPLWRMVLYSL

SEQ ID NO: 10624 - DNA, 1628 bp, Homo sapiens
gttacttaagaactctttgtgtccgtccttctaatggcaccaatgcctcccatcaagccttaaacctcacctaaattatgtcattgggctttttcatccataaatgagcataccaggtgccaagggaatcaatatgccatttcacatgccttagaccagtgtccaaagaaagataaaatgttattctataaaagctttctcccagcatttctattcctttacattttgtgccatatacaactatggttttttaatgatcttatttctgacagctgtttttcttcagaacatcaacagcttctttcctaaattagttttagtatgagttccatttctaattagctcaaattaaagtcctagagagcagcgaggtaatatttaaaccctcaggctaaaatttcggagtaggtgcagaatgttgactctaaatgagtttttcctgtgacataacacgcatgaaagcaggatttctttcatgtgtgaaatgtcttaaatcagacttaccctttgtgattctcttttagctttaaatgtcatttaagaagaaaaaagaaaagaaaattaagcatgacattccccaatatcctctgctcactgtgttataatccctatcactccacaagtgaattggagagagtgaagacacaatgaacagaaacttccctgatgcttcacagaggaagtgttctccgggaccacacagcctccaccatgtccatctacgaagggctgtggcaagccatatacacaaagatgcctgtttcctgtcttctcggttaaaaacaaaaacaaaacaccggaaaaagccaagctgccatgggttgcagagtgccagcccttaagtagtgttgttcatgggtaaacaggagacggataagggcaatttcaagaaataacaaactcaaggcatgaatgtggttatccaaacatcaagggactccttcatttgcatttggataattgtgcagttatatgatttgttacatggagaccagatggaagtaagagagctcatcctcaacttcctgtacctctggaagtctttacacacatgctggagagatagaggagagttcattagcatcaaaccaccatggatttcataatcaattcctaatatctgaatagatgcagaaaagtcacaggcatctagaagtgtggcccaagttctgttcttcaatcagcccacccattatccctatgtatctcgattttgttatctaaaagatcacatgatggaggatgtaagcaagtaacacagccaagacccagtttacagtgtctagtacctaacagactcttgacacgtttcacttgcccttgagtcagtctttccatgtcactgaatattcttccacaacacgattttaatggatatagtcgtccattgtttaaatgtaccattattgaccaatgtaaaaatgttcttttacctcaaatttttatatgtaaaacaaaaacatgtttgaggactaaacccacagtgtagtataaattaaactggatgtaggccaggcatggtgagtcacacctatagtcccagcactttgggaaaccaagacaggaggatggcttgaagccaggagctcaagagcagcctgggcaatacagcaagacctcatctctac

SEQ ID NO: 10625 - DNA, 1983 bp, Homo sapiens
  CDS (202)..(1983)
aagaggctgcgcgctgctgtttggggagggggtgtgtggagccgggtcctgtgtccgcagtggctgctgtcggggggtcgcctgttcgcggaggtgcggagagactccttgggggtcgagcactgtggctggcatgccccagtgttttggataccaatgcataggactccatagtaatcgaatttaccagaggcgaacgtcatgagcatagtgatcccattgggggttgatacagcagagacgtcatacttggaaatggctgcaggttcagaaccagaatccgtagaagctagccctgtggtagttgagaaatccaacagttatccccaccagttatataccagcagctcacatcattcacacagttacattggtttgccctatgcggaccataattatggtgctcgtcctcctccgacacctccggcttcccctcctccatcagtccttattagcaaaaatgaagtaggcatatttaccactcctaattttgatgaaacttccagtgctactacaatcagcacatctgaggatggaagttatggtactgatgtaaccaggtgcatatgtggttttacacatgatgatggatacatgatctgttgtgacaaatgcagcgtttggcaacatattgactgcatggggattgataggcagcatattcctgatacatatctatgtgaacgttgtcagcctaggaatttggataaagagagggcagtgctactacaacgccggaaaagggaaaatatgtcagatggtgataccagtgcaactgagagtggtgatgaggttcctgtggaattatatactgcatttcagcatactccaacatcaattactttaactgcttcaagagtttccaaagttaatgataaaagaaggaaaaaaagcggggagaaagaacaacacatttcaaaatgtaaaaaggcatttcgtgaaggatctaggaagtcatcaagagttaagggttcagctccagagattgatccttcatctgatggttcaaattttggatgggagacaaagatcaaagcatggatggatcgatatgaagaagcaaataacaaccagtatagtgagggtgttcagagggaggcacaaagaatagctctgagattaggcaatggaaatgacaaaaaagagatgaataaatccgatttgaataccaacaatttgctcttcaaacctcctgtagagagccatatacaaaagaataagaaaattcttaaatctgcaaaagatttgcctcctgatgcacttatcattgaatacagagggaagtttatgctgagagaacagtttgaagcaaatgggtatttctttaaaagaccatacccttttgtgttattctactctaaatttcatgggctagaaatgtgtgttgatgcaaggacttttgggaatgaggctcgattcatcaggcggtcttgtacacccaatgcagaggtgaggcatgaaattcaagatggaaccatacatctttatatttattctatacacagtattccaaagggaactgaaattactattgcctttgattttgactatggaaattgtaagtacaaggtggactgtgcatgcctcaaagaaaacccagagtgccctgttctaaaacgtagttctgaatccatggaaaatatcaatagtggttatgagaccagacggaaaaaaggaaaaaaagacgaagatatttcaaaagaaaaagatacacaaaatcagaatattactttggattgtgaaggagcgaccaacaaaatgaagagcccagaaactaaacaaagaaagctttctccactgagactatcagtatcaaataatcaggaaccagattttattgatgatatagaagaaaaaactcctattagtaatgaagtagaaatggaatcagaggagcagattgcagaaaggaaaaggaagatgacaagagaagaaagaaaaatggaagcaattttgcaagcttttgccagacttgaaaaaaag

SEQ ID NO: 10626 - protein, 594 aa, Homo sapiens
MSIVIPLGVDTAETSYLEMAAGSEPESVEASPVVVEKSNSYPHQLYTSSSHHSHSYIGLPYADHNYGARPPPTPPASPPPSVLISKNEVGIFTTPNFDETSSATTISTSEDGSYGTDVTRCICGFTHDDGYMICCDKCSVWQHIDCMGIDRQHIPDTYLCERCQPRNLDKERAVLLQRRKRENMSDGDTSATESGDEVPVELYTAFQHTPTSITLTASRVSKVNDKRRKKSGEKEQHISKCKKAFREGSRKSSRVKGSAPEIDPSSDGSNFGWETKIKAWMDRYEEANNNQYSEGVQREAQRIALRLGNGNDKKEMNKSDLNTNNLLFKPPVESHIQKNKKILKSAKDLPPDALIIEYRGKFMLREQFEANGYFFKRPYPFVLFYSKFHGLEMCVDARTFGNEARFIRRSCTPNAEVRHEIQDGTIHLYIYSIHSIPKGTEITIAFDFDYGNCKYKVDCACLKENPECPVLKRSSESMENINSGYETRRKKGKKDEDISKEKDTQNQNITLDCEGATNKMKSPETKQRKLSPLRLSVSNNQEPDFIDDIEEKTPISNEVEMESEEQIAERKRKMTREERKMEAILQAFARLEKK

SEQ ID NO: 10627 - DNA, 2174 bp, Homo sapiens
  CDS (23)..(1357)
acagtctccactgaaaggctaaatgggaggatcttcccccgtgacctcaaaagctattgtggatgctgatggaagaatttatattcggaactggcagggtggcatcctgtctgggggctttgagaagaacccgaaaccaattttcactgagggcaagaaccagctggagattcagaatctacaggaagactgggatcactttgagcctctgttgagttcccttctgaggaggatgccagaattagagactctggagatcatgaagttggtgaactgcccagagaccttcacaccagacatgaggtgcatcatgggcgagtctcctgcagtgcagggctactttgtcctggcaggaatgaactctgctggcctttcatttggtggaggagccggaaagtaccttgccgaatggatggtacatggttatccctcagaaaacgtttgggaattggacctgaaacgttttggagccctccagagcagccgcacctttctgcgccaccgggccatagaagtcatgcctttgatgtatgatctgaaggttccccgctgggacttccagaccggtaggcagttacgcacctctcctctctacgaccggctggatgcacagggagccaggtggatggagaaacatggatttgagaggccaaagtactttgttccccccgacaaggacctcctggcattggagcagagcaagactttctataagccagattggtttgacatcgtggagtctgaagtcaagtgctgtaaggaagctgtgtgtgtcattgacatgtcctctttcacaaagtttgagataacatccactggggatcaggcattagaagttctacagtacctcttctccagtgacctggatgtgcctgtgggccacattgtgcatactggcatgctcaacgagggtggagggtatgaaaatgactgcagcatagcacgactgaacaagcgcagtttcttcatgatctctccaaccgaccagcaggtccactgttgggcctggcttaagaaacacatgccgaaagacagcaacctgctcctggaggacgtcacctggaagtacacagccctcaatctgattggccctcgagctgtggatgtgctgtctgagttgtcctatgcccctatgactccagaccacttcccaagcctcttttgcaaggagatgagcgtgggctatgcaaaggggatccgggtgatgagcatgacgcacacaggagagccaggattcatgctctacatccccatagagggcatgatttcattggtcgcgatgccctcctgcagcagaagcagaatggagtgtataaacgcctcaccatgttcatcctggacgaccatgattcagacctagacctttggccttggtggggagagcccatttaccggaatgggcagtatgttggcaagaccaccagcagtgcctacagctacagcctggagcgccacgtttgcctgggctttgtgcacaatttttctgaggacacgggggaagagcaagtggtgacagcagatttcatcaaccggggagagtatgagattgacatcgcgggataccgcttccaggccaaggccaagctctaccctgtcgcctccctcttcacccagaagcgccgaaaggatgacatggagctgagtgacttccttgcccttccacctcctcctcctaatattcactctgggctcttcttcccttcccacccctcactcagctgctcgtggtggcaggaggtatgtctgacaggacagaagcaagctccccatcatcttgtcctagagtgggcgtcaccttggagcttctcttccttccgcctctgttcctcttctggagcctttgcctcccatctcttatctccttgatataattttgaacttgacctactttaaacttttttgctctgctgtgctgtgggctggcactcgatacctctggcaagaggatgatcatctacctcactgataagaggcatcgcatggacgttctctggtctgtagtggagacaagcagttaacctagcaccatcctcatcctccctgcagaagccattagcagacctttgggccagggcagcctccctataattttcttcatctcttgctaatctctataataaggttgctttttctttcttagttgagtaaacaagtaagccacagtgtttgaaagg

SEQ ID NO: 10628 - protein, 445 aa, Homo sapiens
MGGSSPVTSKAIVDADGRIYIRNWQGGILSGGFEKNPKPIFTEGKNQLEIQNLQEDWDHFEPLLSSLLRRMPELETLEIMKLVNCPETFTPDMRCIMGESPAVQGYFVLAGMNSAGLSFGGGAGKYLAEWMVHGYPSENVWELDLKRFGALQSSRTFLRHRAIEVMPLMYDLKVPRWDFQTGRQLRTSPLYDRLDAQGARWMEKHGFERPKYFVPPDKDLLALEQSKTFYKPDWFDIVESEVKCCKEAVCVIDMSSFTKFEITSTGDQALEVLQYLFSSDLDVPVGHIVHTGMLNEGGGYENDCSIARLNKRSFFMISPTDQQVHCWAWLKKHMPKDSNLLLEDVTWKYTALNLIGPRAVDVLSELSYAPMTPDHFPSLFCKEMSVGYAKGIRVMSMTHTGEPGFMLYIPIEGMISLVAMPSCSRSRMECINASPCSSWTTMIQT

SEQ ID NO: 10629 - DNA, 1505 bp, Homo sapiens
gtaaaggaatgtctttttaattcagcttttcttttctccatgctagtgttatcaggttttggtatttatttacttacagcatatgttatgaagctggtttgaaaattggttttagatatatctgcaagtttactactttgactgtaaaaaaaaaaaatgaaaaagtagttgacatctgtcctcagaagaagtttgcaggttgcatatttgtgtgtaaatacacaggctaaaaggtaatttatgttccttgggaattgaaatggtcagtggcccgttacagaaacttatcagtcatatatcagcaccagttcattcttttgcaccttagggaccatctgtcccctgaggtgacctgagaaacaaccagttgcccacagactgttatttcttcaagtgagccaggatttgatttcactgccttatattctatttttagtgtacagtgctttgattttttggaaaaactaaattttaaacatatttgaaaaatgttataagacttggacattaagtctgttgatagccaaagtcagtttaccaaagtaaaacaaataaattctatgcttcttcattgtcaaagagcagtctgccatcatgtggatataaatggactatgtaaagtgacatggtgcttactctctacctaataatagcctccctcctgttccaacaagataaccaacaggtatatttaatttaccagttaatatgttttggataattggctgccttgaaatgctatatgttttatagtacatcatagctttagttttcttcataaggaaattacagttacatcctggctaacatggtgaaactccatctctactaaaaatacaaaaaattagccgggcgtggtggcgggcacttgtagtcccagctactcgggaggctgaggcaggagaatggcgtgaacccaggaggcggaggttgcagtgagccgagatcgtgccactgtactctggcctgggagacagagcgagactccatctcaaaaaaaaaaaaaaaaaaaaaaaaagagagagagagacctggagtagagattctgtcaaagaactttttctttcttgagaagcatctgaaatggaatctgttgtctcttcgaaatatgtactgctgtaacagtgaaacaaccctcagagtatgccttcgtgtgggctactcgttgtggttttgaacttgggggaactgtctgtgtttgggtcaagaatatgcaactggctgggcacattggctcacgcctgtaatcccagcaatttgggaggctgaggcaggcggatcacctgaggtcagggcttcaagaccagactggccaacatggtgaaaccccgtctctactgaaaatacaaaaattagctgggcatggtggcaggtgcctgtaatcccagctactcgggaggctgacgtgagagaatcgcttgaacccgggagttggaggttgcagtgagccgagattgcaccattgcactccagcttgggcaacaagagtgaaactcttgtctcag

SEQ ID NO: 10630 - DNA, 1994 bp, Homo sapiens
  CDS (310)..(1899)
aaatagatgtttatcattttttatatagactcattgaaaaaatgactttgtgttcttccagtacataccatcatgtctgagagggcagagatctagacaagtgtgggaaagatgactttggatcaaaattttcttgtgaatataatgtgcttatgcgtaatttaaagctgactgtattaaagatacattttttgtcaaccagatgattgttaaatacctgtgaagtatgtgtggcccggtcctatttcctcacctgtttacagtgaatcagacgtcccaatagatgtggagacggtcacatcaacgcctatgccactctatgacaatcagaaggcacgcagcgtgatgaatgagtgtgaacggcatgtcatctttgccaggactgatgcagatgcccctcctccaccagaggactgggaggagcatgtcaacaggactggctggacaatggcccagaacaagctattcaacaagatcctcaaagccctgcagtctgaccggcttgcccgcttggccaacgaaggggcttgtaatgagccagtgctgcgccgtgttgctgtggacaagtgtgcaaggagagtgcggcaggctctggcaagtgtgagctgggataccaagctgatccagtggctgcacaccacccttgtggagaccttgagtctgcccatgctggcagcctacctggatgctttgcagacgctgaaggggaagatcccaaccttgattgaccggatgcttgtgtcatccaacacaaagactggggctgcgggagctgaggccttgtctctcctactgaagaggccctgggaccctgctgtgggtgtgctttctcataacaaaccaagcaaactccctggctctccgctgattctcatcgcctcctctggtccctccagctctgtgtttcccacttcacgccgccaccgcttctggcaatctcagctgtcctgcttgggcaaggtcatccctgtagccacccatctgctgaacaatggcagtggggtaggagttctacagtgtctcgagcatatgattggggcagtgagaagcaaagtgctggagattcacagccatttcccacacaaacccattatcttgattggctggaacacaggagctttggtggcctgtcatgtgtcagtaatggagtatgtcactgcagttgtctgccttgggtttcctctgcttactgtggatggccccagaggggatgtagatgatcccctcttggatatgaagactccagtcctctttgtcattggtcagaattcccttcaatgtcaccctgaagccatggaggacttccgggagaagattcgagctgagaacagcttggtggtggttgggggagctgatgacaatctcagaataagcaaagcaaagaagaaatcagaagggttgactcagagcatggtggacagatgtattcaggatgagattgtggactttctgactggagtgctcactcgtgctgagggtcacatgggctctgaacctcgggatcaggatgctgagaagaagaagaagccccgcgatgtggcccgcagagacttggcctttgaagtccctgagcggggcagtcgacctgcctccccagctgccaagctgcccgcctcaccctcaggctcagagggtctctccagtgtgtccagcagccccacctccagtcccaagaccaaagtgaccacagtgacctctgcccagaagtccagtcagattggaagttctcagctgctgaagagacatgtgcagcggacagaagctgtgctgacccacaaacaagctcaagttcccatttcatcagaaccaccagaggaaggagagaaagaggatcttagggttcagctgaagcgacaccatccctcgagtccccttcctgtctactcttggtttcaccactagaacagtcttgggctggatgggttatagagctgagcggctgtgatggttctgtttttacattaacaaaaacaattaaaaacaccaaaaacaac

SEQ ID NO: 10631 - protein, 530 aa, Homo sapiens
MPLYDNQKARSVMNECERHVIFARTDADAPPPPEDWEEHVNRTGWTMAQNKLFNKILKALQSDRLARLANEGACNEPVLRRVAVDKCARRVRQALASVSWDTKLIQWLHTTLVETLSLPMLAAYLDALQTLKGKIPTLIDRMLVSSNTKTGAAGAEALSLLLKRPWDPAVGVLSHNKPSKLPGSPLILIASSGPSSSVFPTSRRHRFWQSQLSCLGKVIPVATHLLNNGSGVGVLQCLEHMIGAVRSKVLEIHSHFPHKPIILIGWNTGALVACHVSVMEYVTAVVCLGFPLLTVDGPRGDVDDPLLDMKTPVLFVIGQNSLQCHPEAMEDFREKIRAENSLVVVGGADDNLRISKAKKKSEGLTQSMVDRCIQDEIVDFLTGVLTRAEGHMGSEPRDQDAEKKKKPRDVARRDLAFEVPERGSRPASPAAKLPASPSGSEGLSSVSSSPTSSPKTKVTTVTSAQKSSQIGSSQLLKRHVQRTEAVLTHKQAQVPISSEPPEEGEKEDLRVQLKRHHPSSPLPVYSWFHH

SEQ ID NO: 10632 - DNA, 2266 bp, Homo sapiens
ttttgttgttgttacttgtttgtttgaaataatattagcctaaatttgacattcacactgagtatcagtaagggtcatggtttttaaaccttgtgctttcttatttttttcaaactaatttcagacttaaatagaagttacaagaatagtacagggagtttcatgtacccttcacccaaattcctcaagtgttaacattttaccacatttataggtttttttctgatacacttgagagtaagtttcaggtagatgtccctttacttctaaatatttcagtgtgtattttctaaaaaacagggatattcccttatagaatcatagttttattatcaaaatcaggaaatttaataattatatgtctcatctaactatagatcttattagtatttcactattcttctaatctctttagagcaaaatggaaaaaaatggtttttctgttctggtgcaggatccagcggaggctcacgtgctgtattggattatcacatccttaatgttctttaatctgaaatcgttcccaagtcttgttattcatgaccctgactgacatttttttaagagtaaaaacactaggggggattttttgttgttttttgtttcattttgttttttgtttcgttttgttttttgtcttttgtttttttttgagccagggtctcactctgtcacccaggctggagtgcaatggtgcgatctcagttcactggaacctccacctcccaggctcaagtgatcctcccacctcagcctcccaaggagctgggactacaggctacagccaacatgcccagctaatttttgtattttttgtagagacaggatttcgccatgttgcccaggctggtctcaaactcatccaatccgccaaccttcaccttgacctcccaaagtggtgggactacaggcgtgagccactgcacccggccaaagacccattcttttataaaatgtccctccctcaatttggatttatctgatgttttctcataattcgatttaggttctgcatttggggcaggaatagcaatgaagtaatgatgtgtcctctgtgtatcatgcaaggaggtttacaaagtctacttgtgccgttacttatgatgctaattttaatcacatggttaaggtgtctgcagccttatgctttcccagtttccctggtttactaaccattccattaatgaatttacaaagtaagcaaaatgtatatttcccaagtcagttcctgactgttttctcctaaaataaatccttgcgtgctgttgtcaacctaaactatgaaatgctctaaaataaatccttgcgtgctgttgtcaacctaaactatgaaatgctctgggattctgtcctgtgctgttggggtgcatcaagatgccaaacccacgaaccaagtattttgtcaaatgaactgagtcttcagggacattgaggcatgtctgcatttagctcaaaaggtagaagtctcacaaaactgatactagcgaatatcatgttactgaaaattcttggttattcaggcgttcctagctatgtataagtgcttcctacctacatacaacgtctttcttctatgcacatcatctcaggtaccaaatagacagtattatttaaaatccccctttgacattttatgctcagtttttcagaccatggaaatctacacctatgatgctcttccaagatcactgggcatttttttgtagtttagtaagtgacttatttaatttgcaattctcaattatttcatttatatgtaaacttttttacgagacacaaggttccactctgtcacccaggcaaatggtacaatccaatggtacgatcatatctcactgcagttgtgaactcctgggctcaagagatcatcctcctgtctcagcctcccaagtagccaggattacagacacacaccaccatgcccagctattttttttttttttttttaaatacacagggtctcactatgttccccaggctgatctcaaactcctagcctcaagcaaccctcccactttgggaggtcaaggcatacgtatcacctgaggttgggagttcgagaccaacctgacgaacatggagaaaccctgtctctactaaaaatataaaattagccaggtgtggtggcgcatgcctgtaatcccagctactcgggaggctaaggcaggagaattgcttgaacccaggaggcagagattgcagtgagccgagatcacgccattgcactccagcctgggcaacaagcaaaactccatctcaaaaaaat

SEQ ID NO: 10633 - DNA, 1262 bp, Homo sapiens
  CDS (152)..(517)
tattagcagactggaatgaagatatagaagcatttgaaatgatggagaaggatgagctatgacttgctaaacaatctgttggtaggtatttaaaaagaaaaggtaaactgtgtgtggttaatagacatcctaatactaagcaggctttctaatgggaggctttaagtatggtgatgaacaaccacgttctgactggcgtagttatcgtaggaatctggagcatgctgtgttagaattgaccttgtttaaaactgtcccatcaaaaatggaaatccacagttcccccttcaaatgcagcactgcaccaccctgcaacacctcaggccagggaaagattactgagcattcctgcgaaccagatttctgttgtctctggatagacaagaaacaaaattcatttagtagtggagtggggaataggagtttggatagccttctaattaaaggaagctcgcctttcttggttttgggggttagaggctcttttgggaagatgcatccgagtattgtggcattctgattatgctgccttcacaaaacactctaagtgacctaagtggttatgaagcaaatgcatttatggtgaaaacagtctttgctcattgctttctcttgtttcatttagtgacaaatgatcaagatgacttgattttttttccttcttaacaatgtcttttttatttaaaccaaaggtgaagccagtgtactttctcagtgagttctctgcataaagactaatcagtgggaccaggtaaaaaggtcatataatacattgtggagattgcttacttaatacttctgaaaaatggagtaagggagaaactgtaatgttgcaatatgaacctcccattgggccttccatagggaaagctgtgactactctgaaatggaacctagcattatatccttgtagggtagattataaatcatttccagttcatttctcttagaggtgattacctctagccatcagccttactccatcccatgtttggtatgcaatttgagccacaaggctcgtatcgccaacagctatatacattttgttccatttttctgtcttacagagccatgataaaactgtggttagtgagttaaaattcctggagtaactactgtttttctcctttgaaacttaggtttctaaagttgcacctaaggaatctgtcacattttctgttgaatcatggtttttgtttttgtttttaacagatattccttctgatacggacttgaaaattagtgtatggtgacctgtgttt

SEQ ID NO: 10634 - protein, 122 aa, Homo sapiens
MGGFKYGDEQPRSDWRSYRRNLEHAVLELTLFKTVPSKMEIHSSPFKCSTAPPCNTSGQGKITEHSCEPDFCCLWIDKKQNSFSSGVGNRSLDSLLIKGSSPFLVLGVRGSFGKMHPSIVAF

SEQ ID NO: 10635 - DNA, 1505 bp, Homo sapiens
  CDS (120)..(1169)
gtgttccggccgatcccacctcttctcgaccctggacgtctaccttccggaggcccacatcttgcccactccgcgcgcggggctagcgcgggtttcagcgacgggagccctcaagggacatggcaactacagcggcgccggcgggcggcgcccgaaatggagctggcccggaatggggagggttcgaagaaaacatccagggcggaggctcagctgtgattgacatggagaacatggatgatacctcaggctctagcttcgaggatatgggtgagctgcatcagcgcctgcgcgaggaagaagtagacgctgatgcagctgatgcagctgctgctgaagaggaggatggagagttcctgggcatgaagggctttaagggacagctgagccggcaggtggcagatcagatgtggcaggctgggaaaagacaagcctccagggccttcagcttgtacgccaacatcgacatcctcagaccctactttgatgtggagcctgctcaggtgcgaagcaggctcctggagtccatgatccctatcaaggtggtcaacttcccccagaaaattgcaggtgaactctatggacctctcatgctggtcttcactctggttgctatcctactccatgggatgaagacgtctgacactattatccgggagggcaccctgatgggcacagccattggcacctgcttcggctactggctgggagtctcatccttcatttacttccttgcctacctgtgcaacgcccagatcaccatgctgcagatgttggcactgctgggctatggcctctttgggcattgcattgtcctgttcatcacctataatatccacctccacgccctcttctacctcttctggctgttggtgggtggactgtccacactgcgcatggtagcagtgttggtgtctcggaccgtgggccccacacagcggctgctcctctgtggcaccctggctgccctacacatgctcttcctgctctatctgcattttgcctaccacaaagtggtagaggggatcctggacacactggagggccccaacatcccgcccatccagagggtccccagagacatccctgccatgctccctgctgctcggcttcccaccaccgtcctcaacgccacagccaaagctgttgcggtgaccctgcagtcacactgaccccacctgaaattcttggccagtcctctttcccgcagctgcagagaggaggaagactattaaaggacagtcctgatgacatgtttcgtagatggggtttgcagctgccactgagctgtagctgcgtgagtacctccttgatgcctgtcggcacttctgaaaggcacaaggccaagaactcctggccaggactgcaaggctctgcagccaatgcagaaaatgggtcagctcctttgagaacccctccccacctaccccttccttcctctttatctctcccacattgtcttgctaaatatagacttggtaattaaaatgttgattgaagtctgg

SEQ ID NO: 10636 - protein, 350 aa, Homo sapiens
MATTAAPAGGARNGAGPEWGGFEENIQGGGSAVIDMENMDDTSGSSFEDMGELHQRLREEEVDADAADAAAAEEEDGEFLGMKGFKGQLSRQVADQMWQAGKRQASRAFSLYANIDILRPYFDVEPAQVRSRLLESMIPIKVVNFPQKIAGELYGPLMLVFTLVAILLHGMKTSDTIIREGTLMGTAIGTCFGYWLGVSSFIYFLAYLCNAQITMLQMLALLGYGLFGHCIVLFITYNIHLHALFYLFWLLVGGLSTLRMVAVLVSRTVGPTQRLLLCGTLAALHMLFLLYLHFAYHKVVEGILDTLEGPNIPPIQRVPRDIPAMLPAARLPTTVLNATAKAVAVTLQSH

SEQ ID NO: 10637 - DNA, 1581 bp, Homo sapiens
  CDS (87)..(614)
accgtggtgccgagtgcctgctgccttgggccgccttgaacctccagggtttccagctcctcctccttcaccccagtgccactgccatgatggatgtgagtgaacttggggagtctgcccgctacctccgccagggctaccaggagatgacgaaggtgcacactatcccatgggacgggaagaagcgagtctgggtgcctgatgaacaggacgcctacgtggaggccgaggtcaagtcggaggctaccgggggcagagtcaccgtggagaccaaagaccagaaggtgctgatggtgcgtgaagccgagctgcagcccatgaacccgcctcgcttcgacttactggaggacatggccatgatgacgcacctgaacgaggcctctgtgctgcacaacctgcgccagcgctatgcccgctggatgatctatacctactcaggcctcttctgtgtcaccatcaacccctacaaatggctcccagtctatacggcctccgtagtggctgcttacaagggaaagcgccgctcagattccccgccccatatatatgcggtggcggacaacgcctacaacgacatgctgcgcaaccgagacaaccagtccatgctgatcacgtgagtgtggggctctgggggtggggtggaaaatgctggccatctggcagaaagagggcggtaccacagtcatttcccaggattgaatccaaagtgcttaggccaggacttttaccacctggagctagtgtcccagctgaagctaaaattggcctgagcactttccctgcccccattctgaacagatgtgttcttgatgggggatagggaggggacacccacaaacggagtgaccaccagccccacacctcctctccccggggcctggaatctcccaccttgatcctctggggttctaattctggctcaggggcagcggaaagattcctctgcttttcctcctttttaccatctacttatgtctgaatcttacctctgatctttccattgcctctgtgggaaaatggtagaataattcttacatgccaggctcatgtccagtcaggccaatatggacaatgtttagtgtgagtgtgcatgcgcgtatgcagttaagagcaagtgccttggccgggcacagtggctcatgcccgtaatttctgcactttgggagactgaggtgggtggatcacttgacgtcaggagttcgagaccagcctggccaacatggtgaaaccccatctctactaaaaatacaaaaaattagccgggcgtggtggcaggtgcctgtaatcccagctactcaggaggctgaggcaggagaattgcttgaacccaggaggcggaggttgccgtgagccaagatcacgccactgcactccagcctgggccacagaatgagactccatctcacgaaaaaaaaaaaaaaaaaaaaaaaaaaagcaagtacctttaacccagacgggcccggctgagtgtggtggctcacacctgtaatcccagcacttggggaggctgaggcaggaggattgcctgaggccaggggtttgagaccagcctgagcaacatagcgagaccccatctttacc

SEQ ID NO: 10638 - protein, 176 aa, Homo sapiens
MMDVSELGESARYLRQGYQEMTKVHTIPWDGKKRVWVPDEQDAYVEAEVKSEATGGRVTVETKDQKVLMVREAELQPMNPPRFDLLEDMAMMTHLNEASVLHNLRQRYARWMIYTYSGLFCVTINPYKWLPVYTASVVAAYKGKRRSDSPPHIYAVADNAYNDMLRNRDNQSMLIT

SEQ ID NO: 10639 - DNA, 2596 bp, Homo sapiens
  CDS (111)..(2465)
aatgaagaacagctggaagatatgagacaggaacttgtacgacaataccaagaacatcaacaggcaacggaattgttaaggcaagcacatatgcggcagaaggagagacaatgaccaagacagacaagagctcgagtggggctaaaaagaaggacttctccagcaagggagccgaggataatatggtaacgagctataattgtcagttctgtgacttccgatattccaaaagccatggccctgatgtaattgtagtggggccacttctccgtcattatcaacagctccataacattcacaagtgtaccattaaacactgtccattctgtcccagaggactttgcagcccagaaaagcaccttggagaaattacttatccgtttgcttgtagaaaaagtaattgttcccactgtgcactcttgcttctgcacttgtctcctggggcggctggaagctcgcgagtcaaacatcagtgccatcagtgttcattcaccacccctgacgtagatgtactcctctttcactatgaaagtgtgcatgagtcccaagcatcggatgtcaaacaagaagcaaatcacctgcaaggatcggatgggcagcagtctgtcaaggaaagcaaagaacactcatgtaccaaatgtgattttattacccaagtggaagaagagatttcccgacactacaggagagcacacagctgctacaaatgccgtcagtgcagttttacagctgccgatactcagtcactactggagcacttcaacactgttcactgccaggaacaggacatcactacagccaacggcgaagaggacggtcatgccatatccaccatcaaagaggagcccaaaattgacttcagggtctacaatctgctaactccagactctaaaatgggagagccagtttctgagagtgtggtgaagagagagaagctggaagagaaggacgggctcaaagagaaagtttggaccgagagttccagtgatgaccttcgcaatgtgacttggagaggggcagacatcctgcgggggagtccgtcatacacccaagcaagcctggggctgctgacgcctgtgtctggcacccaagagcagacaaagactctaagggatagtcccaatgtggaggccgcccatctggcgcgacctatttatggcttggctgtggaaaccaagggattcctgcagggggcgccagctggcggagagaagtctggggccctcccccagcagtatcctgcatcgggagaaaacaagtccaaggatgaatcccagtccctgttacggaggcgtagaggctccggtgttttttgtgccaattgcctgaccacaaagacctctctctggcgaaagaatgcaaatggcggatatgtatgcaacgcgtgtggcctctaccagaagcttcactcgactcccaggcctttaaacatcattaaacaaaacaacggtgagcagattattaggaggagaacaagaaagcgccttaacccagaggcacttcaggctgagcagctcaacaaacagcagaggggcagcaatgaggagcaagtcaatggaagcccgttagagaggaggtcagaagatcatctaactgaaagtcaccagagagaaattccactccccagcctaagtaaatacgaagcccagggttcattgactaaaagccattctgctcagcagccagtcctggtcagccaaactctggatattcacaaaaggatgcaacctttgcacattcagataaaaagtcctcaggaaagtactggagatccaggaaatagttcatccgtatctgaagggaaaggaagttccgagagaggcagtcctatagaaaagtacatgagacctgcgaaacacccaaattattcaccaccaggcagccctattgaaaagtaccagtacccactttttggacttccctttgtacataatgacttccagagtgaagctgattggctgcggttctggagtaaatataagctctccgttcctgggaatccgcactacttgagtcacgtgcctggcctaccaaatccttgccaaaactatgtgccttatcccaccttcaatctgcctcctcatttttcagctgttggatcagacaatgacattcctctagatttggcgatcaagcattccagacctgggccaactgcaaacggtgcctccaaggagaaaacgaaggcaccaccaaatgtaaaaaatgaaggtcccttgaatgtagtaaaaacagagaaagttgatagaagtactcaagatgaactttcaacaaaatgtgtgcactgtggcattgtctttctggatgaagtgatgtatgctttgcatatgagttgccatggtgacagtggacctttccagtgcagcatatgccagcatctttgcacggacaaatatgacttcacaacacatatccagaggggcctgcataggaacaatgcacaagtggaaaaaaaatggaaaacctaaagagtaaaaccttagcacttagcacaattaaatagaaataggttttcttgatgggaattcaatagcttgtaatgtcttatgaagacctattaaaaaaatacttcatagagcctgccttatccaacatg

SEQ ID NO: 10640 - protein, 785 aa, Homo sapiens [sequence omitted]

SEQ ID NO: 10641 - DNA, 1688 bp, Homo sapiens
aaaaaaaaatggctcctcccagccttgtgctgtcctcccctggccaaggcccggcttcaccatggagctggtgccgtgctcacgggccttcccagttcccacacctctcttctcatagctagtggctccagtgcccctgcaggccaacccgtaacaactcagctcccaagctgacccttacctgtctgtaaaagccttcccttccaatcagcatccggtgtttataaccacatcctgagccaggtgtggtttccccagaaatgctacccccttgacatgctctatccaccttgatcacacccctcaccggctctttgacctcctcaaaacctccctgcagaactcctccttgtcttctcactctggcagccacccctgtcttcacttccttctttacctggctccactgagagacctgagccctggggaatgcaggtgttgtgcccccctctgccctcccactggcccagcccttggatgcatcattagagatgggtgccagctcacatgaggacccactaccttggctcggccctcttcctgcattcatccttctaggggccccagtgagcacacaggttcttcaggaaaaatgcagctccttacccctcctcttcagcacctgcttttcatagagaaccctccttctatcttgcatgcatgacaggggtcccgtggggccatgcacccagcttccctcctctctccctggccatgttccagcctgggggtggaagaacctgcccatttcccatctcttccagagtctccttcccccaggaacccccttccctccctagtgcatggtttctgctgtcccttttgctccttcccttcagtctacaagttgcccaaatccctgaatttctttcttcctttttctttttttttttttttaaaacaacagaaggagccctccccagaacactgagagggatgcattattattcctttctatggatggggacacagtggcttagtggggaaatagctacccaagctcacaactatctgatgaaagttggaggcaggttgggagctcagccgcctgactccctgcacatgcctccaactttgagtcaaaggcggggaaaagatgcagcccttcctgggtgtcccatctttggtgcagggttaaggaaggagccttgggaccaaatgaagtgactgccagtgcaagtcatctgaggctttaagctgcttaactctcaactcctcggtattttaggtaccatctgtcttcccatctcaattatgaattctccagggactgtcacttcattttttttttttgtctcttaggatgctttgtgcatagctgatgcttagtaatgggctcttattcatctagaaattttttttgcctttaacttcaacctggaaggcttttaaaaaacatgattagccaggcgcggtggctcagcctgtaattccagtgctttgggaggctgaggtgagaggatcacatgtggccaggagtttaagaccagcccaagcaacatagctagaccccgcctcttcaaaaataaggatgaaaaatttagccaggcatggtggtacatgcttgtagctccaggtactcaggagactaaggtgggaggagtgtttgagcccaggtgtttgtggttacagtgagctatatcgcgccactgaactccagcctgggcaacaggatgagaccctgtctc

SEQ ID NO: 10642 - DNA, 1690 bp, Homo sapiens
  CDS (914)..(1585)
atacgactatgactatttctgcagtaattattattgagacttactataataatgataaggctgtatataaattataccttactaaaaatttaaaatctaggaatttactgagagagcataaagtatggttgtaatagagaaaacaaatgattgaaatggcttaaatgcaagcctttaatattaattttgagtattttaacgcaaataaaaccaattatgacagtgtgctcaaattggtaaacaaccaatctgtgactttatgaaaatatatttatgacagtcatacttgccttactcttaagtgtagtatttgtccttaagttgggagcaccataaattaattttaaagcaaaacatatgaccctcatccaatgttttaaatgaattgcttcctactaggaaaacaaaacatctcaggacatcaaatacttctagtaatcaagatgttttgtttaaatttgctaatgtaagcttcaactctatttggttgcactttaaaaaagcatactagaaaatggggaatatttgaaacatgcatttttaaaagctaggtgttatcttactcagaagatgttaaaagcttctttatacattttatttgaaagtaatttccaaaaaagggatgcttggtgggtatatgaaaaggtgttcagtatcactaatcatcagggaaatacatatcaaaaccataatggaatattacctcacagctgttaggatggcttttatcaaaaagacaaaaaataacaagtattagtgagactgtggaagagaaggaaccctcacacaccactgataggaatgtatatcagtataggcattattaaaaacactatggagattcttcaaaaatgtaaaactaagaatactatataatcaaacaatcccacttctgggtatatatccaaaggaaatgagaaccatgtataaaagagatatgtactctcccatatccattgcagatttactcacaacagtgaagatactgaaacaatataaatgttcattgatggaaaagaatacagctggaggcatcatgctacctgacttcaaactacactacaaggctacagtaaccaaaacagcatggtactggtaccaaaacagacatatcgaccaatggagcagaacagagacctcagaaataaaacaacatgtctacaaccatttgatctttgacaaacctgacaaaaacaagaaatggggaaaggatctcctattcagtaaatggtgctgggaaaactggctagccatatgcagaaaactgaaactggaccccttccttacaccttatatgaaaattaactcaagatggattaaagacttaaatgtaaaactgaaaaccataaaaatcctggaagaaaacctaggcaataccattcaggacatagggatgggcaaagacttcatgatgaaaacaccaaaagcaattgcaacaaaagccaaaattgacaagtgggatttaattaaattaaagagcttcttcacagcaaaagaaataatcatcagagtgaacaggcaacctacagagtggaagaaaatttttgcaatctacccatctgacaaaggtctaatatccagaatttaaaaggaacttaaacatatttacaagaaaaaaaaaaacaaccttatcaaaacataggcaaaggatatgaatggacacttctctaaagaagacatttacatggcc

SEQ ID NO: 10643 - protein, 224 aa, Homo sapiens
MRTMYKRDMYSPISIADLLTTVKILKQYKCSLMEKNTAGGIMLPDFKLHYKATVTKTAWYWYQNRHIDQWSRTETSEIKQHVYNHLIFDKPDKNKKWGKDLLFSKWCWENWLAICRKLKLDPFLTPYMKINSRWIKDLNVKLKTIKILEENLGNTIQDIGMGKDFMMKTPKAIATKAKIDKWDLIKLKSFFTAKEIIIRVNRQPTEWKKIFAIYPSDKGLISRI

SEQ ID NO: 10644 - DNA, 1818 bp, Homo sapiens
  CDS (170)..(1135)
gaattgcaacggcagctgccgggcgtatgtgttggtgctagaggcagctgcagggtctcgctgggggccaatcgggaccaattttgaggaggtacttggccacgacttattttcacctccgacctttccttccaggcggtgagactctggactgagagtggctttcacaatggaagggatcagtaatttcaagacaccaagcaaattatcagaaaaaaagaaatctgtattatgttcaactccaactataaatatcccggcctctccgtttatgcagaagcttggctttggtactggggtaaatgtgtacctaatgaaaagatctccaagaggtttgtctcattctccttgggctgtaaaaaagattaatcctatatgtaatgatcattatcgaagtgtgtatcaaaagagactaatggatgaagctaagattttgaaaagccttcatcatccaaacattgttggttatcgtgcttttactgaagccagtgatggcagtctgtgtcttgctatggaatatggaggtgaaaagtctctaaatgacttaatagaagaacgatataaagccagccaagatccttttccagcagccataattttaaaagttgctttgaatatggcaagagggttaaagtatctgcaccaagaaaagaaactgcttcatggagacatagagtcttcaaatgttgtaattaaaggcgattttgaaacaattaaaatctgtgatgtaggagtctctctaccactggatgaaaatatgactgtgactgaccctgaggcttgttacattggcacagagccatggaaacccaaagaagctgtggaggagaatggtgttattactgacaaggcagacatatttgcctttggccttactttgtgggaaatgatgactttatcgattccacacattaatctttcaaatgataatgatgatgaagataaaacttttgatgaaagtgattttgatgatgaagcatactatgcagccttgggaactaggccacctattaatatggaagaactggatgaatcataccagaaagtaattgaactcttctctgtatgcactaatgaagaccctaaagatcgtccttctgctgcacacattgttgaagctctggaaacagatgtctagtgatcatctcagctgaagtgtggcttgcgtaaataactgtttattccaaaatatttacatagttactatcagtagttattagactctaaaattggcatatttcaggaccatagtttcttgttaacatatggataactatttctaatatgaaatatgcttatattggctataagcacttggaattgtactgggttttctgtaaagttttagaaactagctacataagtactttgatactgctcatgctgacttaaaacactagcagtaaaacgctgtaaactgtaacattaaattgaatgaccattacttttattaatgatctttcttaaatattctatattttaatggatctactgacattagcactttgtacagtacaaaataaagtctacatttgtttaaaacactgaaccttttgctgatgtgtttatcaaatgataactggaagctgaggagaatatgcctcaaaaagagtagctccttggatacttcagactctggttacagattgtcttgatctcttggatctcctcagatcttctttggtttttgctttaatttattaaatgtattttccatactgagtttaaaatttattaatttgtaccttaagcatttcccagctgtgtaaaaacaataaaactcaaataggatgataaagaataaaggacactttgggt

SEQ ID NO: 10645 - protein, 322 aa, Homo sapiens [sequence omitted]

SEQ ID NO: 10646 - DNA, 2077 bp, Homo sapiens
ataatatgtgcaaaatccttaacatcgcattgaaagattctttggatctgatcttaccatatatttctagcctaattaatcttctacatttaccctgccagttctctgttcctactcattgattccctaacaatgtaagcagagttcctttgttaagtcattcacagaaagttttccctattcttctctatctgaaaaaaaatgtcctctatccttggagatctaacccaaagtccatgaagcattttactgatactttcattttctgttgcagcacttgctatttcttttatgccatggagtgggcacattttgtatttgtgtcttgtattattgtgacttgatccttggattggatcttattttacttttgatgtatgtggtagtcagaggcctaccaacagatagaacccacacagtaatttggagaaagttttacataaagaataagtagatataatacagtatttatgtaatggaagattagctagtaataactaaagaggagtctaaagaatatagtaataataattataaggagaaaccattgcctctgaagctgagaggtacccaaaaagaacctcttcatcccctgcaaggctgatatccaaactttatttgtgaggacatgcccgtggctcactggctggtggacaaattgctgaggtgctggaacagcaggacttgttggaaatgttttcctctgggattccaaataagtcacccatagggaggatcctaaccagcagcactcctcttcaaagccatctaaggggtgccatcttcgtagaggtgcctcattggcaacacttcactgctatgctatctgagagggtaatggaaaatgctatccacaaggagactgcacattgaaagttaatgcaaagcaacttaagggggtgtggaagatgccatccacaggaagtgctgggcttcggaactcactgaaaagccatcagacacagtgtctgggtgcttctagccaccatgttctataggagccaggtattaaagaagctgcatgctgagaggagcacactaggaccagaaagagaaacctttctccctctagtgtccccccaatgtcatgtactgacagagctcaaaatgtgcaagttcacaagggagaaatatttatcaaacccatctccattattgtagagcaggcagtggggggtggatttggatgtgataatcaatgtattcataattggcacaatatacttgtttattgactctttgaacaaatcagaatttcttacaagatagaaatacattcttaactttccttttgtgcccaggatttttaaaaaatctcaaataaatattactatatttctccatcatattcttattaatatgatataaactttgacattttatgtgcacaagatatatcctaagcattaaagataactgtgttacataagtgcacattattgtgcttagtaagtgtatgagcatgtgtgggcatatatgggtgtatataaagtcaatatttgatttatgattgaccaatttgaaaattaataaaatgggcttgctgaaagctagaaggtagctactttaaacatcagaaagacaaatgacaagtcttggtatcagctagttaaaaacataagtttctacctttgaaaggattatgccacacattgattttcctattaatttaaataaaggtaggtgtaggaaatttactttagtttccatctttgaatgttataaaatattgtactaacacatgttgatttctgaaatgttataatcttattatacttaaaggataacattggggctgggtgtagtggctcatacctgtaatctcaatactttgggaggctgaggcagggggattgcttgagcaaaggagttcaataccagcctgggcaacatgatgatacttcatctctacaaaataaataaataaataaaaactaactgggcattgtggtgtgtacctgtagtcccagctacttgggaggctgaggtggaaagatcacctgagtccaggaggctgcagtgagccgtgaccgtatcactgtactccagccaaggtgacagtgcatgaccctgtctc

SEQ ID NO: 10647 - DNA, 2338 bp, Homo sapiens
gttggcctactggtgaaggaaaatctcaagggaaaccttaaggaatggctacctacagtccaccttttaactgagacccacacggttgcatgaccttcatgagttggccatggctcttttccacgttcctttcatcccaggactccggctgaaggacctgccattctctgggagactgctatccttgtagcagaaggaaagggcgatggtggaatccataatggcttctaaagctgctgttttgaagtgcatgtttcacttcctgctcgcgtttcattagtgaaaataagtcacatggccaagcctgatagcagcggagtgggggtgattaattctctcacagggaggggtagaaatcagttaggtgcaagcaacaccctctaactgcgagccattggaggcttttgagtgggtaatgacataatctagtttgcatttgcggaagatcccatgcagaaacaaatgtcacactgcagctgcaaggacagtgaggagggagatggccatggtgccttggtccccagagtgacggcatgcggaggcgtcaatgcatctacctccagcacaccaggcatgatgtcaggtgcagcaggaggtacctggccctttgctacacagaccacatggtcttgctggggacaagacctagggaacagctcattttggtacagtgtggttggttcctggagagggagagggaatagcccacgggctaagcagcccactgcaggtacctaatgcaaccaggaaggtcagggaaggagatggccagccacgcggtggagtttgaacattatgtagcagttagccaggtgaagaggagatgctggggagacagggagaggccactcctggctgagggacctgtacctgcaaagactctcaggggaggaggacggctttctgtcactgtttctgtgtgtgagggaaatcagagggtaggcccggctgtcccctgcctttcctgtggggcctgactgcacgtaccccctctccccaaaccctccaggagttctgagtctctacctggatcttgattccactggcatgaaatctgtgaatctcacctcgagaatcctccctctgctgcagcaggatgggaccaacagttccctgcagtggcaagggagctgttcacacactgagcgagcagtcacagctgccctgagctccacattctcctcctcgggggactcccctggaattacctttgtcattttactttctcaacccctgtgtttcctctgatatcttacttatctctggtctttttgtccagacagctcttaagccttgggaggaaccttttcctctgatccctttttaggccattatcaagttcagggtgggagggtagagtcactgtctttccaggccttgctgcatcccttagagaccttcggagggggcactttgtgaccagtggggatgggggaaggatggcttggtgtgtctgtcctcacccactaccctctgcccacttctgcctgcccttcctctgtgtggcatatacagtactgcacccctgagcaggacattccccagtgagagccccaggcccgacacttccaggctgtgtggccttgatcaagttagtttccctttcgtgattcagattcctctcaggctgcttgtgcaaactcaacataagaaagtctgcgaagctcttaacccagggcctgggccatgctagggggatcagtaagcagtttctgccacctctgttactgccgctttcacctttccttgtggaaaagagaagcagccagaaaagctgggttttagccccagctctgcctcttaactagctaagtaaatgtgggcagaatgcttgacttctctgaatctcattttttttttttttttttttttgtcaaacaagatgaatgaacaagatcggtcttttttgatggggacttgaatggtgtgtggggggacagttctttgtgtgggacggtccacactaaatgccagttatccccacccattgttacaacccaaatgtcaccccccaccaagtatttctccatgtccctatgggttggtggtggaactgtccctgactgaggaccactgaactagcttaccctaaacttcactcctgctctggtgtcctgtgtgggtggaaaagtgaggacccagtggagcaggtagacaaagatcagttcaacagggccctctgctcctttgatattgggacagcttcacttcctctgaattagaagcttcttgacctccatatattgaggaaggaaggggtttctaacaaatgaagaaacaggctgggcacagtggctcatgcctgtaattcccctttgggaagcccagttccatctct

SEQ ID NO: 10648 - DNA, 2159 bp, Homo sapiens
ttagattatgacataaatcttgtaaaaacctgtcagttattttcatctatgagagaagaggagcccaaactctcgcccacctgttcttaaccagaaaacccactgactttgaaaatctcacctctgccacccatctacttgcattcgtctttggcagacctcaagataaatatgggttaatgcctgcatgatgcctctgaattcaggaattgcagggaaaactcggggctttgtgccagtctctaagttggcaactttggctgaacaaatgagtagtggcttcagtgtccttgcgtacacattctgtggattgatttaatggagttgtcagcatgatcatcatcttctagccaggggcatagttgccaaggccatttacctctttctaagaagaaacagaattatgtgtatatatgagagaaagaaacaagaatgcgtgaatgaggatgaagaaacatttaccccatgtactcaagacatttcagttttaaaagtcactttcctattagacttcttgaaaaagattctcacatagcctctatgtaatcagacaaatgacatttgatttcaagagcagaggggtaaacatcctctgctaatcgacaggtagcaggtgtcagaggaggcataatattaatagcgccaccttctgttgggtcagtggagatgggtgaggagcagcacagagcagcagggatcatcacatgcagccaaacttggcctctgaagggggaaggtagtgggaataggtggtgagagaactcacatttttctcttgtcctggttttatatttcggagggaaaggattatttggccccattaagaattaagaggctgggtgcggtggctcacgtctgtaatcccagcaccttgggaggcccaggcaggcagatcacctgaggtcgggagttcgagaccagcgtgaccaacgtggagaaacccccgtctctactaaaaatacaaaaaattagctgggcatggtggtgcatgcctgtgattccagtttgcctccagctatgtgttttattggcgggattactttgaggaccagccccttctgtatcccccaggctttgacggaagagtcgtggtgtatcccagcaaccagactttaaaggactacctcagctggcgacaagcagattgtcacatcaataatctttataatacagttttctgggcacttatacaacaatctggactaacaccagtacaagcccaagggagattacagggaactcttgcagcagacaagaatgagattttgttttctgaattcaacatcaactataataatgagccgccgatgtataggaaagggactgtgttgatatggcagaaggtggatgaagtgatgacaaaagaaattaagctgccaacagaaatggaaggaaaaaagatggcagtgacccggaccaggacaaagccagtgcccttgcactgcgatatcatcggggatgctttctggaaggaacatccagagattctagatgaagacagctgacccttttgcgcttcagttctggtgtgcttaaccatgcaagccctcccacctcccagggctccttgccttaggtggctgtagcatccctaccacccaggacactggtgtgaatgacacaactcaagttgggaggggaacagggaaggaagggatggatgggggtggtgtatcttattctgtttaagcagaacaccttgtttgcggtgttggaacatggttcctttggcagaagtgctttttttttaatcgcagtactatttttataaagcaagaactattccatgccttggagaatgaatcatttaactgtgctatggagtagaagcaggaggttttcaacctagtcacagagcagcacctaccccctcctcctttccacacctgcaaactcttttacttgggctgaatatttagtgtaattacatctcagctttgagggctcctgtggcaaattcccggattaaaaggttccctggttgtgaaaatacatgagataaatcatgaaggccactatcatcctccttctgcttgcacaagtttcctgggctggaccgtttcaacaggagaatcatttgaactcaggaggcggaagttgcggtgagccaagattgtgccattgcactccagcctgggcaacgagcgaaactacatctc

SEQ ID NO: 10649 - DNA, 1584 bp, Homo sapiens
tttaaaacaaaaatttcctgcgtgaaattctggcttagttaactttttggtctttctctcggggcttttcttgttcttataaaatactgtaaattacaaatggaaatttaatgcagaattaaatttctagtgtacaatatttgtaagacaagaagaaaatttccttttcccagatctcaggaactaccttgttcctgttaacttcttgaactggctagttgctcaaaggtatgtatacaggcctttagggaagagcagtttttaaaattttcctttctgatcattatatacctgtcagatgacaatagataatcttccaaagttgctacctaaaaatcctaggaaagaaactttggtgaacatgactgccattcccattaattgctaatgaaaaacatcagacttgcttagtagaaaaacacctaatttggtataactttcttgcagtttatccatattatgtgcttgttacttaatgtaattaaaagcattttaaaattctacttttttcgtatccactttttatacttgctacttcctaaatcctccctcactgtttatttcatccatctactcatttcccatcatccaaagttagcctctccttgtataccaggcactgtctgatttccatgtattccttttatttttactgtgggcctttgtgcttagtatacttttacttcatataatgtgattaacaaatgaagtgattatcatatggagtttaaggaaattagatgtatcttgcaattactttgaaatctttgggaaaccttaagaagattgtatctgttttcatttttatttacaacatcttggaatttgttcatgatttcctaaaatttctttgcctacccacatctctgtgaaaattttccatatcagttaagtagttttcgcaatgaaaattttagaccatagatatgttgtatgctgtgatcttttgcagcctaatgtttgaagggagcatgatgcagagaggttttgttaaaatcattttagcccaaagctttgtgtaattttcctgcaactttgattttgatttctttctcaaatagacttttttaatgtttagaaaagttggaggtcaatttatgatgtgattcaagttttagatttatttgctattttcaaagttttttttaatagtcttctctttttccagcagagagagatcatcattgcctgaatttagctttgtgactgcaagagcaagaccagttcctgtctggagacgactgttacaataatatcatcctattattttatgttcactctttatcaatttgaacagatgtttacatgtactataattagcattttatctctacagttctctaagagtacatctgagtccaaagtgtatctgaatgtgtgctctgaccttattcttaaatgttttctccccatactttatagccatttattttttaaacaccttaagaaggaacgaaaaagttctcttggatgacgtatattcaagtctgagccaaattgaggattgtgtctaggaaatctgtaaagccatactactgtgttcattagcatgagcaatttaaaatgaaaatgaattaaaaagtt

SEQ ID NO: 10650 - DNA, 1847 bp, Homo sapiens
  CDS (379)..(1845)
gaaacatatgaagctctattagccagatttcccaatcttcgatttgcatacaaggatccagagaagaactggaatagaaattgtgtgaaaggacttgtggcttctctgattagtgtgaaagacacttctgcaaccacagctttagaattagtggctggagaacgactctacaatgttgtagtagacacagaagttactggtaaaaagctactagaaaggggggaactgaaacgtcgatacactataattccactcaataaaatttcagccagatgtattgcaccagaaactctgagagttgctcagaatcttgttggccctgacaacgttcatgtggctctttccttggttgaatataaaccagaacttcagaaagcaatggagtttgtctttggaacaacatttgtttgtgacaatatggataatgccaaaaaagtggcctttgataagaggataatgactagaactgtaactctcggaggtgatgtgtttgatcctcatgggacattgagtggaggtgctcgatcccaggcagcttccattttaaccaagtttcaagaactcaaagatgttcaggatgaactgagaatcaaagagaatgagctgcgggctctagaagaggaattagcaggtcttaaaaacactgctgaaaagtatcgccaactaaaacagcagtgggagatgaaaactgaagaggcagatttattacaaaccaagctccagcaaagctcatatcacaagcaacaagaagaattagatgcccttaaaaaaaccattgaggaaagtgaggagactttgaaaaacactaaagaaatccaaagaaaagcagaagaaaaatatgaagtattggaaaataaaatgaaaaatgcagaagctgaaagagagcgagaactgaaagatgctcagaaaaaactggattgtgccaaaacaaaggcagatgcatctagcaagaagatgaaagaaaaacaacaggaagttgaagctatcactctggaactggaagagctcaagagagagcatacatcttacaaacaacagcttgaagctgtaaatgaagctatcaaatcctatgaaagtcagattgaagtaatggcagctgaggtggctaaaaataaggagtcagtaaataaagctcaagaagaggtgaccaagcaaaaagaggtgataacagcccaagacactgtaattaaagctaaatatgcagaagtggcaaaacacaaggagcaaaacaatgattctcagcttaaaattaaggaattagaccacaacatcagcaaacataaacgggaggctgaagatggtgctgcaaaggtatccaaaatgttgaaagattatgactggattgatgcagagagacacctctttggccaacccaatagtgcctatgatttcaaaactaacaaccctaaagaagctggtcagagacttcagaagttgcaagaaatgaaggagaaactaggaagaaatgtcaatatgagagctatgaatgtattgacagaagctgaagagcgatacaatgacttgatgaagaagaagagaattgtagaaaatgacaaatccaaaattcttacaactatagaagaccttgaccagaagaaaaaccaagccctaaatattgcatggcaaaaggtgaacaaggactttgggtctattttttctactcttttgcctggtgctaatgctatgcttgcaccaccagagggtcaaactgttttggatggtctggagttcaaggttgccttgggaaatacctggaaagaaaacctaactgaacttagtggtggtcagaggtctttagtggccttgtcattaatactgtccatgcttctcttcaaacctgctccaat

SEQ ID NO: 10651 - protein, 489 aa, Homo sapiens
MEFVFGTTFVCDNMDNAKKVAFDKRIMTRTVTLGGDVFDPHGTLSGGARSQAASILTKFQELKDVQDELRIKENELRALEEELAGLKNTAEKYRQLKQQWEMKTEEADLLQTKLQQSSYHKQQEELDALKKTIEESEETLKNTKEIQRKAEEKYEVLENKMKNAEAERERELKDAQKKLDCAKTKADASSKKMKEKQQEVEAITLELEELKREHTSYKQQLEAVNEAIKSYESQIEVMAAEVAKNKESVNKAQEEVTKQKEVITAQDTVIKAKYAEVAKHKEQNNDSQLKIKELDHNISKHKREAEDGAAKVSKMLKDYDWIDAERHLFGQPNSAYDFKTNNPKEAGQRLQKLQEMKEKLGRNVNMRAMNVLTEAEERYNDLMKKKRIVENDKSKILTTIEDLDQKKNQALNIAWQKVNKDFGSIFSTLLPGANAMLAPPEGQTVLDGLEFKVALGNTWKENLTELSGGQRSLVALSLILSMLLFKPAP

SEQ ID NO: 10652 - DNA, 2624 bp, Homo sapiens
  CDS (271)..(2199)
tatttataatatgtggaggagagagagctcaccatgctcaggtaaagggatgaagcctctggtatgtcagaaccatgctgtcttccatgagacttcctttgtgaagagcatccatttaaaagacttttatgaatacatggtttcaatcaagtccccagagaacacatttgtcttctgagctgctggcagttttgagaatctgatgacctccgaggggaccctgcactcagccatcaaagtgttcctgcccctctggacactcataattcaatggtagatgcaggtggagttgagaacatcacccagcttccccaggagcttcctcagatgatggctgcagcagccgatggtttggggagtatagcgatagacacgacccagctcaacatgtccgtgacagatcccacagcctgggctacagccatgaataacctgggcatggttcccgtagggttgcctggacagcagctcgtgtctgactcaatctgtgtcccaggctttgatccaagcctcaacatgatgactggaatcacccccattaacccaatgataccaggccttggactggtacctcccccaccaccaacagaagtggctgttgtcaaagaaataatccactgcaaaagctgtactctttttcctcaaaatccaaatcttccacctccttccacaagagaacgacctcctgggtgtaagaccgtgtttgtcggaggattaccagaaaatgctactgaggaaattattcaagaagtctttgaacagtgcggtgatattacagcaattcggaaaagcaagaagaatttttgtcacattcgctttgcagaggaattcatggttgataaagccatttacctttctggttataggatgcgattagggtctagcaccgacaaaaaggattcaggccgccttcatgtggactttgcccaggccagggatgacttctatgagtgggaatgcaagcagaggatgcgtgcccgggaggagcggcaccggcgcaagctggaggaggaccggctcaggcccccatccccgcctgccataatgcactactcggagcacgaagccgctctgctggctgaaaagctgaaagatgatagcaagtcttcagaggctatcacagtgctgctttcctggattgaacgaggggaagtgaatcggcgctctgcaaaccagttctattccatggtgcagtcggccaacagccacgtccgccggctaatgaatgaaaaagccacccatgagcaagagatggaggaagccaaggagaattttaaaaatgccttaactgggattctcactcaatttgagcagattgtggccgttttcaacgcttctaccagacaaaaagcttgggaccatttctcgaaagcccagcgcaagaacatagacatttggcgaaagcattctgaggagctccggaatgctcaaagtgagcagctcatgggcatccgccgcgaagaagaaatggaaatgtctgatgatgagaactgtgacagccctacaaagaaaatgagagtcgatgaatcagccctggctgcccaggcctacgctctgaaagaggagaatgacagtctccgctggcagctggatgcctacaggaatgaggtggagctgctgaaacaagaaaaagaacagcttttccgaacagaagaaaacctcaccaaggaccagcaactgcagtttctgcagcaaaccatgcaaggcatgcagcagcaattgctaaccatccaggaggagttaaacaacaaaaagtcagaattggaacaagcaaaggaagagcagtcccatacacaagcgttactaaaagtcctgcaggaacaattaaaaggtaccaaggaattggtcgagaccaatggccacagccatgaggattcaaatgaaatcaatgtgttgacagttgcattagtcaaccaagaccgagagaacaatattgagaaaagaagccaaggcttaaaatcagagaaagaagctctgctaataggtatcatatcaacgtttcttcacgtccatccttttggagccaacatagaatatctttggtcatacatgcagcagctggactccaagatatctgcaaatgaaatagaaatgcttttgatgaggctgccacgcatgttcaaacaggaattcacgggtgtgggagccacgctggaaaaaagatggaagttgtgtgcctttgaaggaattaaaaccacctaactgcgaagagcaaagcatctctggaaatgaaaccatgtgaacctggccagggcggtgcgacggggaagcaggaggtgtggggttggtcccgcacgcaacctttgtggagccatcgaagcctgcctttagttatatctgtggcgttctcttgtaagtggaaatgtaattgtgtaccagtttcttaaaataaacaaagcttcatactgtgacagatctgtttcctatgaaaaccaaacaatgattccacagtcataatgatggcaaaatcttaaaatgtgctacatttgagaatagctcaccaagcaaaatatttaaagttaatgatggtgtagcaatgattgttgctaggctacagagttgtatatgtaatgtatagctgaaatcattaaatgacattttcctgaaagtctttctgttttagt

SEQ ID NO: 10653 - protein, 643 aa, Homo sapiens
MVDAGGVENITQLPQELPQMMAAAADGLGSIAIDTTQLNMSVTDPTAWATAMNNLGMVPVGLPGQQLVSDSICVPGFDPSLNMMTGITPINPMIPGLGLVPPPPPTEVAVVKEIIHCKSCTLFPQNPNLPPPSTRERPPGCKTVFVGGLPENATEEIIQEVFEQCGDITAIRKSKKNFCHIRFAEEFMVDKAIYLSGYRMRLGSSTDKKDSGRLHVDFAQARDDFYEWECKQRMRAREERHRRKLEEDRLRPPSPPAIMHYSEHEAALLAEKLKDDSKSSEAITVLLSWIERGEVNRRSANQFYSMVQSANSHVRRLMNEKATHEQEMEEAKENFKNALTGILTQFEQIVAVFNASTRQKAWDHFSKAQRKNIDIWRKHSEELRNAQSEQLMGIRREEEMEMSDDENCDSPTKKMRVDESALAAQAYALKEENDSLRWQLDAYRNEVELLKQEKEQLFRTEENLTKDQQLQFLQQTMQGMQQQLLTIQEELNNKKSELEQAKEEQSHTQALLKVLQEQLKGTKELVETNGHSHEDSNEINVLTVALVNQDRENNIEKRSQGLKSEKEALLIGIISTFLHVHPFGANIEYLWSYMQQLDSKISANEIEMLLMRLPRMFKQEFTGVGATLEKRWKLCAFEGIKTT

SEQ ID NO: 10654 - DNA, 1501 bp, Homo sapiens
tgttataatgcaaagcctatcaaacttaaaattagcttaatcctgaaagatgtatattgcataatcaacctgtcacttttttcaaacacgatttgggagggtattgaggtcccatgtaaattttaaaataaaagacaaacaggaactaatcttttagtaaaaattattttgttttcatataggaaaacaatgccttctgtcatttacggaaaacacatgggcaatatggttggttgttcattgtgcccctctatcctataggaagaatgtgatcttttaattgtgcttggtgctttgtttctggagatatatatatatatattatatatatgtatatataccatatgtatatatacatatgtatgtgtgtatgtgtgtatatatatctctctaggttgtatgtaattcaatatgttggaatttaaagatgcattattatttggatttgatgtgaaattagattgtgaataatggagattgctctccattttttgctgttctagcatagccaaaaatataaagatatagatgtacatatacatatgtatttgattaaacactttaaattttaaatggccgcatcaaattttaaatggtagatgatatcaacaattgcagtgcactcaaaatgttataaaatctttgtagcacaaatcctgaagtatatgcaaactaaatagcatatttatataaaatacctagataacatgtctaggttgagatatttaatccctcatagagctatatttgactaataaaaaacgacagctaaaaataatttccctccctataagtacaaatatgatttttaaagcatcattgtaacttgtcatgaagctatttattattaattaaggatttaactctgtacccatctgctcttacaaaaggggaaaaagatttatctatgagaatagggaagtatagcactgttttatgtttttctctttagtattctgtcaccatttaaagcttcaatatatgccttccactcaggttcctgacacagcctacattctcttttctggttataatcacaatatggtagagctataaacaaggtaaaaaggtgttaacaattgaactgcaatcctacctattatctactttactatagcagtgaagtagtccagacttatttgaaggtggtactatttttatcttacaaaaatctactataatattaataactttccatgtaaattttcatgtgctggcatgcttacaagttaatagtgttatagaatgctcagctctcaatatgaggggttgtttgtggtgaattgcataacatatgtcatctatttgctgaaagaatatgctgtttagcaaactacctgctgagcaacataataagatttttgtacaaggtacaaattactaattattgtattttatttttctatgatttcctaagaggcattatcagggtcttacagatggagtaagcctgtttattaaaatatctattggcaaataaaagttacagctttggtggttg

SEQ ID NO: 10655 - DNA, 2547 bp, Homo sapiens
cttcctgatggctcctggatgtcaggaagcaccacgccatttccagcttctcaggctcatggcttaaaaggaccccagccaactgttcttcccaagcaagcagacgggatttatggtggcggtttcttcaaagtgcttcttctctacccaaatccagaagcgaaacaaaacagaacactcctttaccttttcgaagccaggaaaaggaactcctcttattttttaaaaggcccaagagctgcaagcaaatgtcaacttcatcctgtggtttgatttacatgtttctttgggagaaagagacaaaatacagcattgaacttaaaaaaaaaaacttacaatgaactgttataactcagaacatgatgcacaaacccagatttaacaaacggagcaaaaaaaaaaaaagttcttctgagaggctcctcgtgtgaggctgtgcctgtctggcgaatcatcttggaaatggatgaggttaaaccaagggtcattgagtcccagcactgggattgtctgctccctgctctgaaaaaatggaaaagctacgtccataagaggcatggatgtctctagagctggccaaatatacaacgcttttttcgagtgcgattttccctaattgtaatattgtgcatgatcatgaatgaaaatttgggaaatggagaaaagtagaaagaaaacaatcccctgttcagagagaacctctggtaatctgtcgtaagtttcttgtcagccttttttccgtatattttaaaaccaaggtgctgtcatattgtagattatgctttgtattttttaaaaaatttactatggccacgatttttctttctacctccttcctcaacccgaaggtacctggattgattgacaacaccaccggtccagcttcatgaagccaggtaaccgggaagcatctgaccctgccttctccctctccccaaagcctgtgtcctcccaagccagtgtctttgcctcagtatctgtctaccagcttctctccatcccagtggccagcaccccagtctgagctgctgaaatctctcacccaggctgggaaacagcctccacctggtctccttgcctccacgctggacctgtctacccattttccatgctgccatcagaaggagccttggagatgcaaatctcatcccagcacccttgatgaacacttccatgactgtggccgttgctcctaagataaagaccagattcctcctccaggaagcctccctgtctttacacacaaaatcccctgcttcaaagccacatgccactgactaccgctgctatttgtgagactcttgtttactccttccctgactctgggaaccactctgtctccagtactcaatcctgagcattcacttgagaacctcatttgttgatagaatgaatgagaaagctctcattgcacatccgaaaacatgatgttagggcggcattgtgactcccatgatgcatctctgaacacccacacaattctggcatctgccatcctaagtgctgaggacggtaccatcacccgcattttgttatcggagaaatagagctggttcttagtctaaagagagatactggggaaacagctgagcagaaagtaggactagagacagcagtccccgaaaatcccttcaggccttgcttcctgagctgggaggggaactgcggttgccaaaggcagccccggcccccagtgttcttctgctgcgtgactcccggcctgcagtgacgcccacaccctcccactcttatgattgtcgaattgtctattgtcaccactgactggtgagcgagccacccggggcagttttgaaagacagctggcgaggtaagttgaggccacagagccagcccggagacactggcagcatctaaactccctttccttgactacgctttggggctaggtccccaagtccctggaggcagtgcagaaattccacacgaaggggtaactggggtgtcaaacgggagcgcctgctgccactccaagctgggacccatctctgtcgacacctcggggtgtccctgctgtattcggtgtccttttgtttcaaaaaaataattttcctcttagtacatggcaggtggtggggtttgttgctcttgaattggcaaagcaactagaggaaaaaccaacccacgccgtctggaagggaaggaactgtcgaaggctgagacttggattatccctccttagcatctgggaggcaggcggggagtgaagtgtctcatccgtgaagtggtcatcactctgatccacatcagtcccgttgtgatgaagtttgctgagcacagagccggtgatctggggactgcattgaattgaattgaattgattatcattttcttgagacaggatcttgctctgtcacccagtctctattaaaaatacaaaaaattagccggcgtgtcggtgggctcctgtaattcaacttgggaggctgaggcaggagaatcgcttgaacccgggaggcggagattgcagtgagttgagatcactgccatcacactccagactgaactataagagtaaaactccatctc

SEQ ID NO: 10656 - DNA, 1229 bp, Homo sapiens
  CDS (191)..(550)
gtcgtggctcgttccattctcggcggtggtacctgctcccggtggccctgaggacgtgtgggccaggggcggccccgaaattaggaagcggagggggagcagtctgcaggtctgcggggctaagtgtcgcggcggcgcacctcgcgtcaagaatccggaggaggagactgcaaggataggcccaggagtaatggagtccaaagaggaactagcggcaaacaatctcaacggggaaaatgcccaacaagaaaacgaaggaggggagcaggcccccacgcagaatgaagaagaatcccgccatttgggagggggtgaaggccagaagcctggaggaaatatcaggcgggggcgagttaggcgacttgtccctaattttcgatgggccatacctaataggcatattgagcacaatgaagcgagagatgatgtagaaaggtttgtagggcagatgatggaaatcaagagaaagactagggaacagcagatgaggcactatatgcgcttccaaactcctgaacctgacaaccattatgacttttgcctcataccttgaatcctaaaagttttcgctgaggttaatgtgaacactgctttacaagcttgtatttttgtgatttactttttctgtaagccttttggtgtttacacttaccagtttctaatggaaattagaattctaattgaatattgttttgtctcagcctaaaagttacggtcagcatggcaattcacctattttaggaaaaatactcttttcataatatgaaatgcataaagcagttcaaaaagcagtctgtattccatcatcttcctttttcattccagtccttatttttgtaagtattacttttcctcctccggctacctggactcaaaatctcagttgtctttgacagtttttttcttgtccctgaccaaaaaagaatgatcatacccagaattcaatgtttgatattttaagaatgtatgttctagtgtttttcagagtgagtctaccatctgtataaaaacaccttgggggcaggcaggggcatttaaaaatgtaggacctatcgtccagactcacagagtggggctccagaatctccatttttaacaaactctcttaagtaattctgatgtgtaccaaaatcagtgccattggtgtgtgtgtacgtaactatatacatatgtgtgtgtgtgtatatatataatgtgtcataaccgtaaacaataaacaatatcaagat

SEQ ID NO: 10657 - protein, 120 aa, Homo sapiens
MESKEELAANNLNGENAQQENEGGEQAPTQNEEESRHLGGGEGQKPGGNIRRGRVRRLVPNFRWAIPNRHIEHNEARDDVERFVGQMMEIKRKTREQQMRHYMRFQTPEPDNHYDFCLIP

SEQ ID NO: 10658 - DNA, 3401 bp, Homo sapiens
aatctatgccagctctctggcatctggggttcctgactgataccagcagttgaaggaagagagtgcatggcacctggtgtgtaacgacacaatcagcacaactggagagaggcattaaagaaccagggaaggtagtttgatttttcattgaattctacaagctaatattgttccacgtatgtagtcttagaccaatagctgtaactatcagctgcaataccatggtgaccagctgttacaaaagattttttcctgttttatctgaaacatactggatttatatatgtataagcgcctcaatggggaattagagccagatgttatgatttgtttgctctttttcttttatagttatagcaaaaatatggataatttctagtgaatgcataaattaggttgcgtttcttattttgctttaaatctctggtagtttttccacccctgtgacacaatcctaatagacagtgtcctgtaaatggacacaacacaataaagtcaagttattattgctgttactctggatgatatggaaaacactgccatattttaaatcaactactccacgtgtttttccatccaatcacactgctgtgattcagggatctttcttctaaaacggacacatttgaacctcaggttcatcacaaacctggtacctgttgcttcccagaggatggagaagtgtagttaatcacacctcttagtttaatctgaaatcttgacccagttatttaacaaataaatacctcattgattatatttaaaagtaatacacttcctgtaaacaaatggggacaatgcatccaaaaaatctttttaaacagattacacaaaaattatttccagaaaggctaccatttatcatcattatatttcaagcctcttatacttaataagcactttctaaaaagtcttgagatcccaccattctgaggaattcaatatgatcactttttccttctttgcctgggagaggttaagaggcggtttcgaaggtatagatgctattgttctgatggcccggctgaataaaatggaaattctagtttgttagaattatgcattctttttcaagattctcagtgtgcctaacttattggagcacatcagtttcttgggtaatggaaaacattacctagagttgccagtggcacattacaccagtacagagcacattccaaaggagacattggaccagttaattcccatacaagtcaaggtaacagaacaaaagggaatcctgatgcccttttaccattgctggttgagctcaggcactgtcatggacacccttaattttaaaaggttttaatcattcttctataaaatacatttaaaatggaaaaatacttaatatcactaaatatcagaacaatgtaacatttacaaatgacatattgaaagcaaaggctgttttatttagccaagatgattaccattaggagttactttatgtattgttgaaagcaaattttaaacatgatgttttagaagtgtttctgatttttaaacctggtttacaggtattacttctgcacttaccaaataatgccagatggaaatttattatttcttgcaattcccgtgatagctctgttctttatgcattgtctcaacactttcccttttttcccaaaatgagtagagaattaaagccacccaaaacagcttctgctactaaaatgttctcatcctttctcctccctctccttttcctgccacaaaaggtgaaaaatgagatccaatcctctcaccaaaatttcaaacctaggacactggaatgactgcagggatcagtggttctcccatatcaccatcaattaagacatataggacactgtcttccttcaagagggttacaatgtggccatcagacaggaaaccaaacggtggataaagtattaagtaactaagtgccaaataaatgctggaaatcttgacctctccttgggattatgggtgtaacaaaaatccctacatctgtttatgaaggccatattcagtacattttaaatggtaaataatctgtttatgtgaagaaaaagaattaagtctttcttccaactctctccttggatagcctagcacagtgcagcctccataaccatgacattcccgcccaagctctcagtgcctaatcctgctttgtcattcacatctcacaaaatcttgacatcttacattccaatacattatcaagcaagcacaagtatgctggtagtagcctctttaaataatatgtatagacaacaacaacgacaaaaaatagactgttttaaagtttcagggaaagttggtggctgatttaaagttgtgcaggaaacatcttctgtgtatgaagcaaatgtcgatgttttgaaaagctaggagatgactttgaatgaatgcaaggttagtgagatcctaagctctcaaaatagcatattccctagagctcaagaaagctggtccaggaggttgaaaaagctattttgttgttaaattattttctggcccttcttaatatttaaaaatgtatttccccttgtggctttcaaccacctgctcaaaaaaagagacttgttacatgaaagttttcattaaagagctgaaaacaagaatttagagagccattcctagaaaatgtcctactgccctgcatttgacaaacaagcatcctttactaacaagagcaggaattcagaggcacaagaaaaagcattggcatgagccaaagagtctgtcttaatgttacttttgaaaatctgctgagcggccaccatatgcaggctgagagctgggcacaggcgaagccattggaagcacttcaggaacaagcacacagctgtgggacttgaacatgcaagtgttcaggttgtgtcaagaagcttttctttccttctatgatggaatctgttcttttctatcctacttttttctctcttcctctcctcaccacattataccctgctcttacgcagtaaacgttttaatggcccgtttatgtctcatgcctccaaacaacactgaatttgaaaccccccattttttcttttcaccaccctgttgagcaattttcccaaaaaaagggcagcaattattaaattgaattcaagtttctagattttactaagttttattttgtcaggttttttaaattttttcagtgagcgtggtgactgcagaggttagtgctgtgaaaagctgggctaaatattctttctgtaaagtcaaacaggattccatcccctgtgaaataacacaaaatttcactctctaaaagcaacagcatgtaaactagaatgaaagaaggaaattatgtacgtatgcctaatattctttgtgaatgtctttcatttaactaaaattatattagaaaccagattgataaataaaaaattcaaagtagttttaattatcct

SEQ ID NO: 10659 - DNA, 1793 bp, Homo sapiens
  CDS (251)..(1192)
aaaaccgcggttgccggagcccgaactgaggcggcggcgggagcccggttggcgtctggtcttcgcgtcggccccgcggagccagacgctgcccccggcgcggggagaagatggtgcctagcggcctcgggcccgccacgcgccgccacgagtgagcccagcgcgaccgcgggcgtccgccgagcagctggcccggctgggcccggggcgcgcagctgcccgccggggcggggtggagctgatcagaataatgttcagcatcaaccccctggagaacctgaaggtgtacatcagcagtcggcctcccctggtggtcttcatgatcagcgtaagcgccatggccatagctttcctgaccctgggctacttcttcaaaatcaaggagattaaatccccagaaatggcagaggattggaatacttttctgctacggttcaatgatttggacttgtgtgtatcagagaatgaaaccctcaagcatctcacaaacgacaccacaactccggaaagtacaatgaccagcgggcaggcccgagcttccacccagtccccccaggccctggaggactcgggcccggtgaatatctcagtctcaatcaccctaaccctggacccactgaaacccttcggagggtattcccgcaacgtcacccatctgtactcaaccatcttagggcatcagattggactttcaggcagggaagcccacgaggagataaacatcaccttcaccctgcctacagcgtggagctcagatgactgcgccctccacggtcactgtgagcaggtggtattcacagcctgcatgaccctcacggccagccctggggtgttccccgtcactgtacagccaccgcactgtgttcctgacacgtacagcaacgccacgctctggtacaagatcttcacaactgccagagatgccaacacaaaatacgcccaagattacaatcctttctggtgttataagggggccattggaaaagtctatcatgctttaaatcccaagcttacagtgattgttccagatgatgaccgttcattaataaatttgcatctcatgcacaccagttacttcctctttgtgatggtgataacaatgttttgctatgctgttatcaagggcagacctagcaaattgcgtcagagcaatcctgaattttgtcccgagaaggtggctttggctgaagcctaattccacagctccttgttttttgagagagactgagagaaccataatccttgcctgctgaacccagcctgggcctggatgctctgtgaatacattatcttgcgatgttgggttattccagccaaagacatttcaagtgcctgtaactgatttgtacatatttataaaaatctattcagaaattggtccaataatgcacgtgctttgccctgggtacagccagagcccttcaaccccaccttggacttgaggacctacctgatgggacgtttccacgtgtctctagagaaggattcctggatctagctggtcacgacgatgttttcaccaaggtcacaggagcattgcgtcgctgatggggttgaagtttggtttggttcttgtttcagcccaatatgtagagaacatttgaaacagtctgcacctttgatacggtattgcatttccaaagccaccaatccattttgtggattttatgtgtctgtggcttaataatcatagtaacaacaataataccttttcctccattttgcttgcaggaaacataccttaagttttttttgttttgtttttgtttttttgttttttgttttcctttatg

SEQ ID NO: 10660 - protein, 314 aa, Homo sapiens
MFSINPLENLKVYISSRPPLVVFMISVSAMAIAFLTLGYFFKIKEIKSPEMAEDWNTFLLRFNDLDLCVSENETLKHLTNDTTTPESTMTSGQARASTQSPQALEDSGPVNISVSITLTLDPLKPFGGYSRNVTHLYSTILGHQIGLSGREAHEEINITFTLPTAWSSDDCALHGHCEQVVFTACMTLTASPGVFPVTVQPPHCVPDTYSNATLWYKIFTTARDANTKYAQDYNPFWCYKGAIGKVYHALNPKLTVIVPDDDRSLINLHLMHTSYFLFVMVITMFCYAVIKGRPSKLRQSNPEFCPEKVALAEA

SEQ ID NO: 10661 - DNA, 1451 bp, Homo sapiens
  CDS (369)..(884)
tcccttctcgtcgtcgccattttgagctggtgactgtggccggctgggagtaggcggcagtgagtttccctgggagggcagcgcgcttggcgcttctcccctccccccgatctgcctccagtctcggacttggttgttgcgcgctccggctccggctgagctgggagagttggaggaggtggcggcgggcagaggtgatgtctgggagcccttccttgacagcccgggccgagaagagtccctgcgggaagcatcacccaggctggcagatcatggtagcagcagcgggggtggctgggaagtgaaacggagccagcggctgaggaggggccccagcagcccccgaaggccctatcaggacatggagtatgaaagacgtggtggttgtggtgacaggactggccgctatggagccactgaccgctcgcaggatgatggtggggagaaccgcagccgagaccacgactaccgggacatggactaccgttcatatcctcgcgagtatggcagccaggagggcaagcatgactatgacgactcatctgaggagcagagtgcggaggattcctacgaggcctccccgggctccgagactcagcgtaggcggcggcggcggcacaggcttcccccgagacggcgactatcgggaccaggactatcggaccgagcaaggggaggaggaggaggaggaggaggatgaggaggaggaggagaaggccagtaacatcgtcatgctgaggatgctgccacaggcagccactgaggatgacatccgtggccagctgcagtcgcacggcgtgcaagcacgggaggttcggctgatgcggaacaaatcttcagcactccctcaacatcctgggccagaaggtgtcgatgcactacagtgaccccaagcccaagatcaatgaggactggctgtgcaataagtgtggcgtccagagcccaagaggaggaagtacggcggcatatccacagcctctgtagacttcgagcagcctactcgggacgggctgggcagtgacaacattggcagtcggatgctgcaggccatgggctggaaagagggcagcggcctgggccgcaagaagcagggcattgtaacgcctatcgaggcccaaacacgggtgcggggctccggcctgggtgcacggggcagctcctacggggtcacctcaaccgagtcctacaaggagacactgcacaagacaatggtgacccgcttcaacgaggcccagtgagcagcttcaagagcaacttctccacatgttgggtgtccatcctggggcagggcaggacagagtgttggatggctgggacggggccttgctcttgtcggccagcccactccccagccagagagggcttgaccaaatcaaattgaggtggtgacttttgttggaaaattgggctgggatcacgtcctgttttgtaataaaagctgaaaagtctgc

SEQ ID NO: 10662 - protein, 172 aa, Homo sapiens
MKDVVVVVTGLAAMEPLTARRMMVGRTAAETTTTGTWTTVHILASMAARRASMTMTTHLRSRVRRIPTRPPRAPRLSVGGGGGTGFPRDGDYRDQDYRTEQGEEEEEEEDEEEEEKASNIVMLRMLPQAATEDDIRGQLQSHGVQAREVRLMRNKSSALPQHPGPEGVDALQ

SEQ ID NO: 10663 - DNA, 1643 bp, Homo sapiens
  CDS (27)..(1643)
gcaaaaagcgaggcgacggcttaaagatggagaacgacccccaggaggcggagtctgaaatggccctggatgctgagttcctggacgtgtacaagaactgcaacggggtggtcatgatgttcgacattaccaagcagtggaccttcaattacattctccgggagcttccaaaagtgcccacccacgtgccagtgtgcgtgctgggaaactaccgggacatgggcgagcaccgagtcatcctgccggacgacgtgcgtgacttcatcgacaacctggacagacctccaggttcctcctacttccgctatgctgagtcttccatgaagaacagcttcggcctaaagtaccttcataagttcttcaatatcccatttttgcagcttcagagggagacgctgttgcggcagctggagacgaaccagctggacatggacgccacgctggaggagctgtcggtgcagcaggagacggaggaccagaactacggcatcttcctggagatgatggaggctcgcagccgtggccatgcgtccccactggcggccaacgggcagagcccatccccgggctcccagtcaccagtggtgcctgcaggcgctgtgtccacggggagctgcagccccggcacaccccagcccgccccacagctgcccctcaatgccgccccaccatcctctgtgccccctgtaccaccctcagaggccctgcccccacctgcgtgcccctcagcccccgccccacggcgcagcatcatctctaggctgtttgggacgtcacctgccaccgaggcagcccctccacctccagagccagtcccggccgcacagggcccagcaacggtccagagtgtggaggactttgttcctgacgaccgcctggaccgcagcttcctggaagacacaacccccgccagggacgagaagaaggtgggggccaaggctgcccagcaggacagcgacagtgatggggaggccctgggcggcaacccgatggtggcagggttccaggacgatgtggacctcgaagaccagccacgtgggagtcccccgctgcctgcaggccccgtccccagtcaagacatcactctttcgagtgaggaggaagcagaagtggcagctcccacaaaaggccctgccccagctccccagcagtgctcagagccagagaccaagtggtcctccataccagcttcgaagccacggagggggacagctcccacgaggaccgcagcacccccctggccaggcggtgtctctgttcgcacaggtccggagaagcgcagcagcaccaggccccctgctgagatggagccggggaagggtgagcaggcctcctcgtcggagagtgaccccgagggacccattgctgcacaaatgctgtccttcgtcatggatgaccccgactttgagggcgagggatcagacacacagcgcagggcggatgactttcccgtgcgagatgacccctccgatgtgactgacgaggatgagggccctgccgagccgcccccaccccccaagctccctctccccgccttcagactgaagaatgactcggacctcttcgggctggggctggaggaggccggacccaaggagagcagtgaggaaggtaaggagggcaaaaccccctctaaggagaag

SEQ ID NO: 10664 - protein, 539 aa, Homo sapiens
MENDPQEAESEMALDAEFLDVYKNCNGVVMMFDITKQWTFNYILRELPKVPTHVPVCVLGNYRDMGEHRVILPDDVRDFIDNLDRPPGSSYFRYAESSMKNSFGLKYLHKFFNIPFLQLQRETLLRQLETNQLDMDATLEELSVQQETEDQNYGIFLEMMEARSRGHASPLAANGQSPSPGSQSPVVPAGAVSTGSCSPGTPQPAPQLPLNAAPPSSVPPVPPSEALPPPACPSAPAPRRSIISRLFGTSPATEAAPPPPEPVPAAQGPATVQSVEDFVPDDRLDRSFLEDTTPARDEKKVGAKAAQQDSDSDGEALGGNPMVAGFQDDVDLEDQPRGSPPLPAGPVPSQDITLSSEEEAEVAAPTKGPAPAPQQCSEPETKWSSIPASKPRRGTAPTRTAAPPWPGGVSVRTGPEKRSSTRPPAEMEPGKGEQASSSESDPEGPIAAQMLSFVMDDPDFEGEGSDTQRRADDFPVRDDPSDVTDEDEGPAEPPPPPKLPLPAFRLKNDSDLFGLGLEEAGPKESSEEGKEGKTPSKEK

SEQ ID NO: 10665 - DNA, 1510 bp, Homo sapiens
  CDS (764)..(1267)
ggccttcatgtgtttgtggtggcaaagaggctggtagggatcttctgctgacttttttccctgcaatagcaattccctcccgtctccaggcagatctgatctaggtggggaagatgggaccacgagtttgagtgcctctatgctgccttcctagatttccaatcaccacaggtgcatcttcattctatcagtgcaccccactactcttccttcacactccagtcaaatcttagctgtttgtttgttgccttgatcctttttttgtgtgtgggttagacaagcaccaggtatccctactcagccatcttgctgatgttactcctttattgcttttcttttcttttcttttctttttttttttttgagatggagtcgcgccctgttgcccaggctggagtgcaatggtgtgatctcagatcactgcaacctccacctccttggttcaagcgaccaagtagcctcagcctcccaagtagctgggactacaggcacccaccaccacacccaactaatttttgtatttttggtagagacgggagctcaccatgttggccaggctggttttgaactcctgacctcaagtgatccgcctgcctcagcctcccaaagtgctgggattataggctggagccactgtgcccaactcctttattgcttttaatctctgcatagtagtgtgtgtattagtctgttttcatgctgctgatgaaggcatacctgaggctgggaagaaaaagaggtttaattggacttacaggtccacatggcttgggaggcctcagaatcatggtgggaggcaaaaacagaaacccctgagaaaaccgtcagatctcgtgagatttattcactaccacgagaacagcatgagggaaaccaccctcatgattcaaattatctcccaccagtctctcccacaacacgtgggagcacaattaaagatgagatttgggtgggaacacagagccaaaccatatcagtgtgcattcaccacattctcatcttttcccctagaaatagacttctaggatttctcacactttatgttcaacagagctatataaatgtgctcctatgtattcccttaaagcccatcttctttctactatatctttttcctcattttacttccttttttgagggagttatgtgggatagaagaaaaatggacttcttcatttataacatacctgaagttgggagtattttaatccttaaacagattaaaatgagctgggtgtggtggctcacacctgtaaccccagcactttaggaggctgagggaggcgtatggcttgagctcagtagttggaaaccagactgggcaacatgacaaaatcctgtttctactaaaaatacaaaaactagctgggcgtcgtggtgcatgcctgtagtcccagctacttgggaggcagaggtgggaggatcacctgagcccaggaggtcgagggtgcactgagctgtgattgcaccactgcactctagtctaggcaactgggcgagtctctgtctc

SEQ ID NO: 10666 - protein, 168 aa, Homo sapiens [sequence omitted]

SEQ ID NO: 10667 - DNA, 1595 bp, Homo sapiens
  CDS (321)..(1124)
acagtgaatcagtgacccccaacccacggtcccctctagaagactattccctccatatcattgaccttcacaccggccgcttatgtgatacacgcacgttcaagtgtgacaaggtggtcttgtcacacaaccaagggctgtacttgtacaaaaacatcctggccatcttgtctgtgcaacaacagaccatccatgtcttccaggtgactcctgaaggcactttcattgatgtgcggaccattggccgcttttgctatgaggatgacctgctcactgtgtcagctgttttccctgaggtacagcgggacagtcagacaggcatggccaatccctttagggatcctttcatcaattccctcaaacaccggttgctggtatatttgtggcgccgggcagaacaggatggtagtgcaatggccaagaggcgcttcttccagtattttgaccaactgcggcagctgcgaatgtggaaaatgcagcttctggatgaaaaccacctgtttatcaagtacactagtgaggatgtagtaacactgcgagtcacagatccatcacaggcatctttctttgtggtgtacaatatggtgacgacagaggtgattgctgtgtttgagaatacatcagatgagcttttggagctctttgagaacttctgtgacctttttcgtaatgctaccctgcacagtgaagttcagtttccctgctcagcttctagcaacaattttgcaaggcagatccagcgccggttcaaagacactattataaatgccaagtatggagggcacacagaggcagtacgccggctgctgggtcagctccccatcagtgctcagtcttacagcggtagcccctatctggatttgtctctcttcagttatgatgacaagtgggtatctgtcatggagcggcccaagacttgtggagatcacccaatcaggttctatgcccgggactcgggcctgctcaagtttgagatccaggcggggttattgggccgccccatcaaccacacagtgcgacgccttgttgccttcacctttcacccttttgagcctttcgctatttctgtgcagaggactaatgctgagtatgttgtcaacttccatatgcgacactgctgcacgtaggtgcctcaccagagccagattatctggtcttccaagactttgccactcacttatctcagtggactccaaagcaaaagctcccgactactagctctgttagttccagcctgctatacctcagatgggagagagccagagagaggagtgagggtggctcaacctaatggaatttttaaattgtatacaatactgctactgattgttataatatcctcttgcgttttccctgtgggaatgcccagcattaattaagtccatttcatttttgctttactttgcatttgattgctgtgaagatgaaagcattagacttttatccccttcatgtcacttcttcggcattatggtttgcatctgaaagcagttaaatcttgtttactgatgagaatgacatacatcctttccatttagctcataagcacggctatctttttaagagaaaaataaagccatggtattttcatactt

SEQ ID NO: 10668 - protein, 268 aa, Homo sapiens
MANPFRDPFINSLKHRLLVYLWRRAEQDGSAMAKRRFFQYFDQLRQLRMWKMQLLDENHLFIKYTSEDVVTLRVTDPSQASFFVVYNMVTTEVIAVFENTSDELLELFENFCDLFRNATLHSEVQFPCSASSNNFARQIQRRFKDTIINAKYGGHTEAVRRLLGQLPISAQSYSGSPYLDLSLFSYDDKWVSVMERPKTCGDHPIRFYARDSGLLKFEIQAGLLGRPINHTVRRLVAFTFHPFEPFAISVQRTNAEYVVNFHMRHCCT

SEQ ID NO: 10669 - DNA, 1527 bp, Homo sapiens
aattaaatggccacaagtgcctggtggtccctttgttggtccacacagatctgcctgccttgggagaggtatctggggctgactggtgggtgttccattgcagaaagcttctgagacacacagaagtcgccacagttgggagacgtgatacccgcagtgctgcagtcctgcttgccttgttgttgttctctcaacttctacattagagacttagttatgatgagtgtggccgcccttaggaaggcatgttatatactcacttaaatgcctcagcccccttttttaaaatactttgttcagtggttaatggcatagactagagctagactgcaagagtttgagccttaactctatcccatgttagctgtgaccttgggcaggtcgcctaatctctctgtgccttagtgtcctcaccttcaaattaagataatacaggcttgttatgaggattaaatgagttaatatttataatgcacttaacacttaaaatgttcttgttctttgtaattgtttttcaagatgaagtgtgtaactaataaagtgaggggggattaacagcgaggactggcttgccaccaacagagcaaatctttagattcatattcaactcaagcctcccagtttcaaccctgtatacaactgtccagagtctgtacatggaggcacgcagccacgtggccgagaggagccgctgggcaggacaagcacgtgggcggctgccgtatgtccctgagccctcagagctgcccctagcagtgctgttggacagcaggaatgttgagttaaagactcacatgcactttaaaatttgagcagatagaaatgtcagtggggactgcctctgtctgtgcttaggttctccactgtacgaggagcagagctgtgcgcctaggaggtcctcagtagtcctggcagtctggctgactgcgcacagcgaggggtggggactgaggaagcacaggctgctttcctgagtgcagggtcctccgtctgttaaggctccagttgtcctttgtcttcaggtgcctcaacataatttagtatttcttgactctccagtggtgtttcctgccaaaagcaaatttggtgtttctgcttcacctgtgtgttctttggctctaaataggttttcttttcctggtgaacaatatgggctagaaggagcagctgtggctgatgctctggactgaactttctcatgaaaagcagcttgaaagaaggttggttggttcagggagcactaaatcaaagctgagagcttcttctagcccgcgtgctgtgggcaccgcagccccaggcatcatgctgttggcttatgattggagatcgcagactgccgaggtataaggacagcagaggggccacatggtggtcttcattcagggacattttactcttcatcacactgttttgcctagaaacagattatttaaattggaagagaccaaaaaaattataataccagaatttaaaaactcctctggccttttggaaaaattgccgtaaaaactctgatctatatagtgc

SEQ ID NO: 10670 - DNA, 1341 bp, Homo sapiens
atgttacatgttcggaaaaactttcagttgctcaagggcaataagaaaatttgaggccgggtgtggtggctcacgcctgtaatcccagcactttgggaggctcaggtgggcgaattgcttgagcccaggagttcgagaccagccggggcaacatggcaaaaccctgtctctactaaaaatacaaaaattagctgggtgtggtggtgcatgcctgtagtcccagctactcgggaggctgaggtgggaggatcccgtgagcctgggaggtggagtttgcagtgagctaagatcgtgccactgcactccggcctgggtgatggagcaagacctcgtctcagaaaattggaaactattgactaagagaagtttctaggtttgcactgaattgtcttttgtacatacagtgaattgttttgctgttctccccactccatattaatgcaggagccaggttggtctgttaggatgaacaaaggttgaggggagggcaggattcgtgcatctgggggccaaacacatgttccgtcttgattgccttaagagttactagcgaggtcagtgttaggcttgcaatagggattttaaaatacactaactagttccttagctaccttcacatacattctataggccttcttaaattagcactaacctccacttccttctctgccccattgcctcccaaatatgctatggagctatttttgttaccacgttataacgtgaatatttatacagtagcctcttcaggctttgtaattttcattccaaaaatgcccggtgtgatgctttacactctacaaagtatggtttaaaggcacaaggtcatggcctttgtcatagcagttgaatgtgcattgacatatttttctatgattttttaaaattacaatagaaaaataagctgttgtaacgtgtaaggtcatgacaatttttgtatttatatttgaaatcagatttctataactcgtatttgtgtacagaattctcaatggatttatatattgtgaaatttttatctgagattgggatgtggattatgcttaacagtgagagctgaaatgagaccatttactttgtttaaaatgctgtactgtgcaagtttggaaatgtaaattaatttactgtatataatatcttgagtttgtttatacctccaagtttttacactgaagataaactagctttaattcaaaactttttttttctttataagggaataagctgttgagctaaacctgtatacttgtgctttttattttctggatgcacaatgaaagtttatacttgtatctcactgcatcatatctgattgcagaaattaaagcacaatttacaagc

SEQ ID NO: 10671 - DNA, 1582 bp, Homo sapiens
  CDS (41)..(1582)
tttcaaagacataaactcctgctgcccacaggaagcaacaatgcaagaacaagatatgccattcttgcgaggagggccaggcatgtacaaggtagtgaagacgggaccctcaggtcacaacatcagaagctgccctaaccttagaggtatcccaattggaatgttagttctgggaaacaaagtcaaagcagtgggagaggtaaccaattctgaagggacatgggtgcaactggatcagaacagcatggtagagttctgtgagagtgatgaaggagaggcatggtccttagctagagacaggggcggaaaccagtacctccgacatgaagatgaacaagctcttctggatcagaattctcaaactcctcctccaagccctttctcagtgcaagcttttaataaaggggcaagttgcagtgcccaaggatttgattatggactcggaaatagcaaagttttgactgttttacccactgcaggtgaccaactgagtgccatattgaattccattcagtcacgacccaatctcccagctccttccatctttgatcaagctgcaaaacctccctcttccctagtacacagcccatttgtgttcggacagcccctttccttccagcagcctcagcttcagagtgatcgaggaaacatctcaacatcttctaaaccagcctctacatcaggaaaatcagagctgtcctctaaacacagcagatcgcttaaacctgatggacgtatgagccggactactgctgatcagaagaagctaaggggcacagaaagtttatctgctagtgaatccctcatcttaaaatctgatgctgcaaagttgaggtcagattcccacagtaggtcattatcccccaaccataacaccttgcagacattgaaatctgatgggaggatgccttctagctccagagctgaatccccaggaccaggttctcggttgtcatctcctaagccaaagactctcccagccaataggtctagcccatcgggtgctagttctccacgctcctcctcaccacatgataaaaatctacctcaaaaaagtactgctcctgttaagacaaagcttgatcctcctcgggaacgttctaaatcagactcttacacacttgatccagataccctccgcaagaagaaaatgcccctcacagaacctttgagaggacggtcaacgtcaccaaaaccaaaatcagtaccaaaggattctacagattcccctggatctgaaaatagagctccctctccccatgtggtacaggaaaacctccacagtgaggtggtcgaagtctgcacctcaagtactttaaaaacaaatagtctaacagacagcacctgcgatgacagcagtgaatttaagagtgtggatgaaggttcaaataaagttcattttagcattggaaaagcaccactgaaagatgaacaggaaatgagagcatctcccaaaataagtcgaaaatgtgctaatagacacaccaggcccaaaaaaagaaaaatcgagttttcttttcaaaggagatggatccaagcctttagagccagccaagcaagccatgtctccttctgtggccga

SEQ ID NO: 10672 - protein, 514 aa, Homo sapiens
MQEQDMPFLRGGPGMYKVVKTGPSGHNIRSCPNLRGIPIGMLVLGNKVKAVGEVTNSEGTWVQLDQNSMVEFCESDEGEAWSLARDRGGNQYLRHEDEQALLDQNSQTPPPSPFSVQAFNKGASCSAQGFDYGLGNSKVLTVLPTAGDQLSAILNSIQSRPNLPAPSIFDQAAKPPSSLVHSPFVFGQPLSFQQPQLQSDRGNISTSSKPASTSGKSELSSKHSRSLKPDGRMSRTTADQKKLRGTESLSASESLILKSDAAKLRSDSHSRSLSPNHNTLQTLKSDGRMPSSSRAESPGPGSRLSSPKPKTLPANRSSPSGASSPRSSSPHDKNLPQKSTAPVKTKLDPPRERSKSDSYTLDPDTLRKKKMPLTEPLRGRSTSPKPKSVPKDSTDSPGSENRAPSPHVVQENLHSEVVEVCTSSTLKTNSLTDSTCDDSSEFKSVDEGSNKVHFSIGKAPLKDEQEMRASPKISRKCANRHTRPKKRKIEFSFQRRWIQAFRASQASHVSFCGR

SEQ ID NO: 10673 - DNA, 1875 bp, Homo sapiens
aagaagatgaagaaggaaaccaggtgaactcagcaaggcagactggctgcttacttcagcactattggaattatttcccgctgttgccaatggaaatcaaagaaaatggatgtgacgtctgtgcaggtggacggcagtccgaggggcttatttcacttgcttctcagtgcaacttgataggagaatccagcatcttaaagttgcatatgtgtagcactaatgtttctttttaaatagttgggggaaaatgacctagaaaaccaaattgcagtttggtagccaaaattaactcttggtttatttgtcctttgtgtgtgaaaagtcctactattccgtgcgtcagacttcctcacagaactgttgactggttttggttcttagtactattgagatctttcgcgtcgatcccaacggccttagcggcggcagactggaataacaccttacacctttctggcctgcatttctgtagacttcactctcaagggaggagttttcttttcttacgttttgacttttgcacaccatatgcactagggattctggaaacttctagcatgactgcaaagtggccaagagaataaagtccttgatgataaatcacagtatatcccttgagcctcaccttattgccagtgctagattttttctttttaatctctccgtttttgctaacgaaaacttgaaaagcttatttggaagcttaaatgttttatcttttctccatggactaaacctctccaggactctctcggcacctggatgtccagctctcgaagcagccagtcagatgggacatcacagttctctcatcctccttgaggcatgatgacctcagctcatagtgatcaaccgttgtgctgtgtgtcattgctaccccataaccagttacagcatagatgtcgctagtctcagagggcagctgcgtatttaatttaactctggtttatgacctgacaaaaagccaaaaatatcactctttccaggagtggggaaaactgaggatgcctcccaagtctagtggcttcacaaaagatcatcctgtcttctctgtcatgcccactgagctcctattcccctacgtgttacaatacacaattaaaaacgccattgtgggagtgaagggttgacatttaaggaaaaggttgaggtgtttctctcatgggctgtctaaaaggagagacacgtttctttctttcctttttttttggctaggcccaccatgacttgtgacctagaacccccaggattaacagaggcctcacatttactctgcaagctgactccaaaggagtctacagtccttacttgtcatgccacactcacacatccagtagtggtctctatctacccgcattcctagctagctggcactggcctcaactccaaagactgcctttaggaccatcaaatggcctatgcaagcaagcggggtggttattaggacagattgtatattttgtatattctgggaccatcccttcaagacacgtctataaaacaaaaatggcgcttggtccacacacggttgctgctccctcctaccagctggctcccctcctgtcctcctttgactgtttgactcattgactgttaaaatgccaccccatacatatttgggatgcaaaactgaagtcaaaaggaaataatataagaaacacaaacacatatatgacagcaaccttcaagatctgggttttcagctttctgcaacctttgttttcactgaaatgttgaaactactcgtctgagggcaaaggaacctcctcacaaatgctatagctgccaattggacacttggggcatttcgaggtctggccctaagaatttactttccctttccctttttctatttagaccagaaaaaacaaaaac

SEQ ID NO: 10674 - DNA, 2038 bp, Homo sapiens
  CDS (176)..(1219)
cgctttctgtcagcctctctccctctccctctcccctctccttcctctcgcttcctctctcgcacctgagcgtacgcacctgcccgggcccggctccctcctcctctcccctccctctttccccgcccggccgcgggagcctcgtggctgcgtcaccgccgcccccccagacaagatggacaccgcggaggaagacatatgtagagtgtgtcggtcagaaggaacacctgagaaaccgctttatcatccttgtgtatgtactggcagtattaagtttatccatcaagaatgcttagttcaatggctgaaacacagtcgaaaagaatactgtgaattatgcaagcacagatttgcttttacaccaatttattctccagatatgccttcacggcttccaattcaagacatatttgctggactggttacaagtattggcactgcaatacgatattggtttcattatacacttgtggcctttgcatggttgggagttgttcctcttacagcatgccgcatctacaagtgcttgtttactggctccgtgagctcactactgacgctgccattagatatgctgtcaacggaaaatttgttggcagattgtttgcagggttgttttgtggtgacgtgcacactgtgtgcattcatcagcctggtgtggttgagagagcagatagtccatgggggagcaccaatttggttggagcatgctgccccaccgttcaatgctgcggggcatcaccaaaatgaggctccagcaggaggaaatggtgcagaaaatgttgctgctgatcagcctgctaacccaccagctgagaacgcagtggtgggggaaaaccctgatgcccaggatgaccaggcggaagaggaggaggaggacaatgaggaggaagatgacgctggtgtggaggatgcggcagatgctaataacggagcccaggatgacatgaattggaatgctttagaatgggaccgagctgctgaagagcttacatgggaaagaatgctaggacttgatggatcactagtttttctggaacatgtcttctgggtggtatctttaaatacactgttcattcttgtttttgcattttgcccttaccatattggtcatttctcccttgttggtttgggatttgaagaacacgtgagtataatacttttacaaagttactttcattcattactcccaaatgtgattattaataaaatagtattctaaagagtttcatcatttcttcattggcattatgcaagggaatagttaggcaataccgtctcattcttttttaaaaaaaataacagtggctcaagagatagtggtcatgttgccaactaatgaaaatgtgctctgaaatccagtcagctgggtgggcctgaggcataccgtgggaaagtttcccacaggctgattttctgtccatctcaagaacctgtatgttctcttctttccctttccccaggtgccccctgctgaatttagaaaagtaacaatatatcaatcaatttaaaaagggtagaatattttggaatgacgggttgtagtgttttctagagtgctttagttttgacattttatcagtattttccagaggtaaataaattttggaaggattattacttctctgttggggccctagaacaatttagtcttttatggaaaagctgactatctgggatcatatgctcagtttgtatatttgagatctgagagatcacgttctgaagtcttctcatatttagtacacctctgattctcactagttgaatgcaagaacttgaaaggttcaggtaagtgttttgaaaaattttgactttccaaacttttgccacttgctatctgaaactcaggaatcaaaaaataccgacaggcactgttactttcaaaattctttctataagttgagaatgggacagatttgcagagcaagggaaacttgaacagttacttctagtggtaggaaatgaggtggctaggatattacccagctggtgggtgacttgggcagtgtgttcctgctttcagtggttagccttt

SEQ ID NO: 10675 - protein, 348 aa, Homo sapiens
MDTAEEDICRVCRSEGTPEKPLYHPCVCTGSIKFIHQECLVQWLKHSRKEYCELCKHRFAFTPIYSPDMPSRLPIQDIFAGLVTSIGTAIRYWFHYTLVAFAWLGVVPLTACRIYKCLFTGSVSSLLTLPLDMLSTENLLADCLQGCFVVTCTLCAFISLVWLREQIVHGGAPIWLEHAAPPFNAAGHHQNEAPAGGNGAENVAADQPANPPAENAVVGENPDAQDDQAEEEEEDNEEEDDAGVEDAADANNGAQDDMNWNALEWDRAAEELTWERMLGLDGSLVFLEHVFWVVSLNTLFILVFAFCPYHIGHFSLVGLGFEEHVSIILLQSYFHSLLPNVIINKIVF

SEQ ID NO: 10676 - DNA, 1794 bp, Homo sapiens
  CDS (4)..(684)
aaaatggacgtaagattttatccacctccagcccagcccgccgctgcgcccgacgctccctgtctgggaccttctccctgcctggacccctactattgcaacaagtttgacggtgagaacatgtatatgagcatgacagagccgagccaggactatgtgccagccagccagtcctaccctggtccaagcctggaaagtgaagacttcaacattccaccaattactcctccttccctcccagaccactcgctggtgcacctaactgccatgcatcctagtctccccaggaacatagcccccaagccgaataaccaaatgccagtgactgtctctatagcaaacatggctgtgtcccctcctcctcccctccagatcagcccgcctcttcaccagcatctcaacatgcagcagcaccagccgctcaccatgcagcagccccttgggaaccagctccccatgcaggtccagtctgccttacactcacccaccatgcagcaaggatttactcttcaacccgactatcagactattatcaatcctacatctacagctgcacaagttgtcacccaggcaatggagtatgtgcgttcggggtgcagaaatcctcccccacaaccggtggactggaataacgactactgcagtagtgggggcatgcagagggacaaagcactgtaccttacttgagaatctgaacacctcttctttccactgaggaattcagggaagtgttttcaccatggattgctttgtacagtcaaggcagttctccattttattagaaaatacaagttgctaagcacttaggaccatttgagcttgtgggtcacccactctggaagaaatagtcatgcttctttattatttttttaatcctttatggacattgtttttcttcttccctgaaggaaatttggaccattcagattttatgttggttttttgctgtgaagtgctgcgctctagtaactgccttagcaactgtagatgtctcggataaaagtcctggattttccattggttttcataatgggtgtttatatgaaactactaaagactttttaaatggcttgatgtagcagtcatagcaagtttgtaaatagcatctatgttacactctcctagagtataaaatgtgaatgtttttgtagctaaattgtaattggaactggctcattccagtttattgatttcacaataggggttaaattggcaaacattcatatttttacttcatttttaaaacaactgactgatagttctatattttcaaaatatttgaaaataaaaagtattcccaagtgattttaatttaaaaacaaattggctttgtctcattggtcagacaaaaagaaactagtattaagggaagcgcaaacacatttattttgtactgcagaaaaattgcttttttgtatcactttttgtgtaatggttagtaaatgtcatttaagtccttttatgtataaaactgccaaatgcttacctggtattttattagatgcagaaacagattggaaacagctaaattacaacttttacatatggctctgtcttattgtttcttcatactgtgtctgtatttaatctttttttatggaacctgttgcgcctatttatgaaataataaatataggtgtttgtaagtaaatttgttagtatttgaaagaggtttctttgatgttttaacttttgctggcaaaaaaaaattcacgcttggtgtgaatactttattatttagtttttacggtaacatgaataaagccaaacctgcttttcatttagcagcaaatt

SEQ ID NO: 10677 - protein, 227 aa, Homo sapiens
MDVRFYPPPAQPAAAPDAPCLGPSPCLDPYYCNKFDGENMYMSMTEPSQDYVPASQSYPGPSLESEDFNIPPITPPSLPDHSLVHLTAMHPSLPRNIAPKPNNQMPVTVSIANMAVSPPPPLQISPPLHQHLNMQQHQPLTMQQPLGNQLPMQVQSALHSPTMQQGFTLQPDYQTIINPTSTAAQVVTQAMEYVRSGCRNPPPQPVDWNNDYCSSGGMQRDKALYLT

SEQ ID NO: 10678 - DNA, 1946 bp, Homo sapiens
  CDS (276)..(857)
aggttcgaatctccgccgcttcgcggttgcttctcaacgtccgggccgcatctcggcggcggcgagggctgagcgcgggagctgcctccgagccggagccccagccctaggccctgcgcgagctgccccgccctaccccctccagcgtcctgtcgcctcctcgcccgacttcggcctgtccctctctcgcgcgctcagtcctcgctcttcgccccccgcagctatcggcactcggtctcccgcgcctggcgggctccgcccgagcctctgggcccatggccaagcggcgtgcggccgagccggtgacgttccacgtgccttggaagcggctcctgctttgcgacttcgctgagcagccgccgccaccgcctctctggatccggccgcccggggtcgcgcatgctgggcagctcctcggcgtcccagagcagcaccgaaagcgcaaaatcgacgcagggaccatggcagagccctcggcttcgcccagcaagcgccgtgacagcggggacaacagcgccccgagcggccaggagcgtgaggaccacggtctggagacaggcgatccgccgctgccgccgccgcccgtactgccggggccgggggaggagctcccgggcgcccggctcccggggggcggtggcgacgacggggcggggcgcgcaggacccccgcggggagactggggggtcgcatcgtgccagcacaatgaagaattttggcagtataataccttccaatactggaggaatcctttgcctcctattgatctggcagacattgaagatttaagtgaagacaccctgacagaagcaacacttcagggcaggaatgaaggggctgaggttgacatggagtcctgatgtaaggagccgaagcagtgggattggctgatttgaggagatgtctctaagtgaattctcgtattcttaagggaaaagttattttccatacttgaagttatatttccaaacctgagaaatgaagaaagattgttctgacattaaatacctacagttactactgaacctcttaataaggatttgtcaaggatagagtacagttgtaggggaagtattttatgtatgcattcttagagcaaaaagttttgtttaaattctagaattgaaggtactgatcttataaaaagaaattctagcagttttagaaataggtgggaaaaactcaaatattcctcctatctgcaccaaaaagtttatttgtggtatataaaatgaatattgttttataataacttgttaataaagtactttctaatacattctattgactctgttagttgaacaaatagctgacttgaacatctatgcaaacttaagatgggcgggattgttgtaaaagctattgttttaaaagagctttctaaatgtaaagtagtgataatttcaatttgggtagcgtgtttgcaaagcttccaatatttgatgttggttaagctctactatgggcaactgaagatggataaagaaaaatgaaaactgaatcggtgcctgcttccccctgttttcccaggattagaggaaaaaatttattgtataatcagcttcttggttttgaattgcttcgaggcatggttttattccttattactttagacctgtagttttcaacactgacagcactttaaaaatctttgcctgggcctcactcttgagagattctcatttaatagttctgaggtgggtcttggatataactatttttttaaacacctgtcctgtttccctccattcctctcatgtgcagacagggttgagaaccagtagactaatggtcgtttttcctgtttaaaggagataactaatttgagctgaagcaatgcttcttaattagctttgtttttgttttgctctgttggtggctttgttacaactgaattattgtgttattactatttcattgttaaagaaataaagtaagcaatttgt

SEQ ID NO: 10679 - protein, 194 aa, Homo sapiens
MAKRRAAEPVTFHVPWKRLLLCDFAEQPPPPPLWIRPPGVAHAGQLLGVPEQHRKRKIDAGTMAEPSASPSKRRDSGDNSAPSGQEREDHGLETGDPPLPPPPVLPGPGEELPGARLPGGGGDDGAGRAGPPRGDWGVASCQHNEEFWQYNTFQYWRNPLPPIDLADIEDLSEDTLTEATLQGRNEGAEVDMES

SEQ ID NO: 10680 - DNA, 1804 bp, Homo sapiens
  CDS (200)..(1714)
agtacttcctgttctcggctaaccctggcgctgggccgggggctggagagtgaccgtggtctgagtgacctgggacggctgcgtgggccggggtgggcctcaaagccgggcaccagacgggaggggcggcgctcgggccgcgcgctgcccgcgccgggtcctggcgggcggcgaggctggggctgactcctgcctcaggatgccgggggaggaagaggagcgggccttcctggtggcccgcgaggagctggcgagcgccctgaggagggattccgggcaggcgttttccctggagcagctccggccgctactagccagctctctgccgctagccgcccgctacctgcagctggacgccgcacgccttgtccgctgcaacgctcatggggagccccgaaactacctcaacaccctgcccaccccttcctgggatgggccagacaagcagagcctggtcaggcggcttttggcagtctacgcactccccagctggggccgggcagagctggcactgtcactgctgcaggagacacccaggaactatgagttgggggatgtggtagaagctgtgaggcacagccaggaccgggccttcctgcgccgcttgcttgcccaggagtgtgccgtgtgtggctgggccctgccccacaaccggatgcaggccctgacttcctgtgagtgcaccatctgtcctgactgcttccgccagcacttcaccatcgccttgaaggagaagcacatcacagacatggtgtgccctgcctgtggccgccccgacctcaccgatgacacacagttgctcagctacttctctacccttgacatccagcttcgcgagagcctagagccagatgcctatgcgttgttccataagaagctgaccgagggtgtgctgatgcgggaccccaagttcttgtggtgtgtccagtgctcctttggcttcatatatgagcgtgagcagctggaggcaacttgtccccagtgtcaccagaccttctgtgtgcgctgcaagcgccagtgggaggacttccagaactggaaacgcatgaacgacccagaataccaggcccagggcctagcaatgtatcttcaggaaaacggcattgactgccccaaatgcaagttctcgtacgccctggcccgaggaggctgcatgcactttcactgtacccagtgccgccaccagttctgcagcggctgctacaatgccttttacgccaagaataaatgtccagagcctaactgcagggtgaaaaagtccctgcacggccaccaccctcgagactgcctcttctacctgcgggactggactgctctccggcttcagaagctgctacaggacaataacgtcatgtttaatacagagcctccagctggggcccgggcagtccctggaggcggctgccgagtgatagagcagaaggaggttcccaatgggctcagggacgaagcttgtggcaaggaaactccagctggctatgccggcctgtgccaggcacactacaaagagtatcttgtgagcctcatcaatgcccactcgctggacccagccaccttgtatgaggtggaagagctggagacggccactgagcgctacctgcacgtacgcccccagcctttggctggagaggatccccctgcttaccaggcccgcttgttacagaagctgacagaagagatacccttgggacagagtatcccccgcaggcggaagtagctgagggcgagggtcccgatgagggtcccatggcctgctccctcaggaacagctccagcaccaataaagaggcatcttaccacccag

SEQ ID NO: 10681 - protein, 505 aa, Homo sapiens
MPGEEEERAFLVAREELASALRRDSGQAFSLEQLRPLLASSLPLAARYLQLDAARLVRCNAHGEPRNYLNTLPTPSWDGPDKQSLVRRLLAVYALPSWGRAELALSLLQETPRNYELGDVVEAVRHSQDRAFLRRLLAQECAVCGWALPHNRMQALTSCECTICPDCFRQHFTIALKEKHITDMVCPACGRPDLTDDTQLLSYFSTLDIQLRESLEPDAYALFHKKLTEGVLMRDPKFLWCVQCSFGFIYEREQLEATCPQCHQTFCVRCKRQWEDFQNWKRMNDPEYQAQGLAMYLQENGIDCPKCKFSYALARGGCMHFHCTQCRHQFCSGCYNAFYAKNKCPEPNCRVKKSLHGHHPRDCLFYLRDWTALRLQKLLQDNNVMFNTEPPAGARAVPGGGCRVIEQKEVPNGLRDEACGKETPAGYAGLCQAHYKEYLVSLINAHSLDPATLYEVEELETATERYLHVRPQPLAGEDPPAYQARLLQKLTEEIPLGQSIPRRRK

SEQ ID NO: 10682 - DNA, 2441 bp, Homo sapiens
ttgttgttgttgttttgagacagggtctcactttgtcacccaggctggagtatagtggcacaaacatggctcactgcagcctcgacctcctgggctcaagcagtcctcctgcttcagccccacaagtagctgggactacaggcacacaccaccacgcccacctctacaaaaaattgtaaaaatgagccaggcatgtggtggtgtatgcctacgatcctagctactcaggaggctgaagtgggagaattttttgagcccaggaggtggaggctgcagtgggccataatggcaacactgcgctccagcctggcagacagagggaagatatgtttgacatagtttagatatttgtccccacccaaatccatgttgaaatgtaatccccaatgttggaggtggggcctagtgggaggtgtttgtcatgggggcggatccctcatggcttggtgctgtccttgtgatagtgagttcacttcatgtgagatctggttaaagtgtgtggcaccttcgcctacccccacttgttcccaccaagtgagattcctgctcctgcttacccttctgccatgtttcttgaggcctcccagaagccaagcagatgccagctccatgctccctgtacagcctacagaagcatgagccagttaaacctctcttctttataaattacccagtcctgagtatttctttatagcaatgcgagaacggcctaacacaaggttctagtagggagaaactagcaagtaaatggatacaagacagtcactcttacatttttaattacaggtccctttgagtagacaaaactttaagaataggggaaatcatttacatataaattgcataccatgtcagggcttcatggacttaagaactaataaattcagggtggtgatgcttacctgggaggcagagggtgttatgggaggaaacagagtggtagtcaggcaaggataggatagcaggtgtccttcccatatgatccctgagcctggtccttatgctgtcaactgactgtacttgctactttaaaatctaagggattgaaaaatgaatgttgagtgattcctaaactaacacgatattaaaccgagttccagactacaccagcctaattttatttagtggcagactctagctctgttgcccaggctggagtgcagtggtgtgatctcagcttattgcagtctccacctcctgagttcaagtgattcctgtgcctcagtctcccaagtagctgggactacaggtacgtgccaccacacccagccagtttttgtacttttagtagagacagggtttcaccatgttgcccaggctggcttcaaactcctggcctcaagtgatccactggcctcagccacccaaaatgctgggattacaggcatgagccaccgtgcgggcctctactagcctaattgctgcaagtgtgctagtcgtatttatcaaactagatgtaagctgcttgaggctagggaggcttttaccacgtgcctgagaggcagttgttggttataaacttgccacatggggctcagatcacctcaaggcaaagctacctggcctggtttggaatgctttttctttttcttaaagtcagccctaaagaacatggtatattaactcttgagggctgctaaaccctggcactgtgccagaacaagtgacaatacgatagttttgagactaatttcaaaaatgttttttaaaaaggcagtgtaaattcctaacccgcttgtacaaacctgttaaattttacttttcaaaacaaattccatctgctaaggtttgagttgaattaagtagcaaatgatatttatactcaggtaaatagaccattctcactcactgtagaccctatattccttctcatagctttaaccattttctgtgtccctacttttgacatcaaacttcagattttctgatgcttgcatgattgttgaataaattagaatctgtagttgctaacatactaacaactgattttaagctcaaaaaggcaacagtggtgtccaatatacttttgtgggctttaatgctcagtatggaatacgcaatgaacggatgttttatgccactaatggctatattctacatcttgatggcttttagtaaataaaatcatgattccaagtctgaattacatgatgagatggttcactagagctgcaaatatacaagtttgtatttaaaacaaaaataccgaagccattttactgaaaactagttttattttaaaattaagtgcatagcactcatctaattccattggtgtagactttagcaccatacttgctatttgcaattaatgtcgtaacacagatacattttggtttgcagtctgtacttgagtagtgtttatttagtggactttggtaaagcccttcatacatattaatctcttcacagtacacatttaatgatggtccagtattctc

SEQ ID NO: 10683 - DNA, 1753 bp, Homo sapiens
  CDS (134)..(1744)
gacagagattgaactcagctatgcaaagcaactcaggaatctttcaaagaagtaccaacctaaaaagaactcgaaggaggaagaagaatacaagtatacgtcatgtaaagctttcatttccaacctgaacgaaatgaatgattacgcagggcagcatgaagttatctccgagaacatggcatcacagatcattgtggacttggcacgctatgttcaggaactgaaacaggagaggaaatcaaactttcacgatggccgtaaagcacagcagcacatcgagacttgctggaagcagcttgaatctagtaaaaggcgatttgaacgcgattgcaaagaggcggacagggcgcagcagtactttgagaaaatggacgctgacatcaatgtcacaaaagcggatgttgaaaaggcccgacaacaagctcaaatacgtcaccaaatggcagaggacagcaaagcagattactcatccattctccagaaattcaaccatgagcagcatgaatattaccatactcacatccccaacatcttccagaaaatacaagagatggaggaaaggaggattgtgagaatgggagagtccatgaagacatatgcagaggttgatcggcaggtgatcccaatcattgggaagtgcctggatggaatagtaaaagcagccgaatcaattgatcagaaaaatgattcacagctggtaatagaagcttataaatcagggtttgagcctcctggagacattgaatttgaggattacactcagccaatgaagcgcactgtgtcagataacagcctttcaaattccagaggagaaggcaaaccagacctcaaatttggtggcaaatccaaaggaaagttatggccgttcatcaaaaaaaataagcttatgtcccttttaacatccccccatcagcctccccctccccctcctgcctctgcctcaccctctgctgttcccaacggcccccagtctcccaagcagcaaaaggaacccctctcccaccgcttcaacgagttcatgacctccaaacccaaaatccactgcttcaggagcctagagcgtgggggtgcaacaccggaggatttcagcaacctcccacctgaacaaagaaggaaaaagctgcagcagaaagtcgatgagttaaataaagaaattcagaaggagatggatcaaagagatgccataacaaaaatgaaagatgtctacctaaagaatcctcagatgggagacccagccagtttggatcacaaattagcagaagtcagccaaaatatagagaaactgcgagtagagacccagaaatttgaggcctggctggctgaggttgaaggccggctcccagcacgcagcgagcaggcgcgccggcagagcggactgtacgacagccagaacccacccacagtcaacaactgcgcccaggaccgtgagagcccagatggcagttacacagaggagcagagtcaggagagtgagatgaaggtgctggccacggattttgacgacgagtttgatgatgaggagcccctccctgccatagggacgtgcaaagctctctacacatttgaaggtcagaatgagggaacgatttccgtagttgaaggagaaacattgtatgtcatagaggaagacaaaggcgatggctggacccgcattcggagaaatgaagatgaagagggttatgtccccacttcatatgtcgaagtctgtttggacaaaaatgccaaaggtgctaagacttatatttaataccat

SEQ ID NO: 10684 - protein, 537 aa, Homo sapiens [sequence omitted]

SEQ ID NO: 10685 - DNA, 1532 bp, Homo sapiens
  CDS (192)..(680)
taaagaactgcataggtgatttcctaaaaactttggaagacccagatttgaatgtgagaagagtagccttggtcacatttaattcagcagcacataacaagccatcattaataagggatctattggatactgttcttccacatctttacaatgaaacaaaagttagaaaggagcttataagagaggtagaaatgggtccatttaaacatacggttgatgatggtctggatattagaaaggcagcatttgagtgtatgtacacacttctagacagttgtcttgatagacttgatatctttgaatttctaaatcatgttgaagatggtttgaaggaccattatgatattaagatgctgacatttttaatgttggtgagactgtctaccctttgtccaagtgcagtactgcagaggttggaccgacttgttgagccattacgtacaacatgtacaactaaggtaaaggcaaactcagtaaagcaggagtttgacaaacaagatgaattaaagcgatctgccatgagagcagtagcagcactgctaaccattccagaagcagagaagagtccactgatgagtgaattccagtcacagatcagttctaaccctgagctggcggctatctttgaaagtatccagaaagattcatcatctactaacttggaatcaatggacactagttagatgtttgttcaccatggggaccattacatatgaccatacaatgcactgaattgacaggttaatcataagacatggaaagagaagtgtctaaaagcttcaaaatgttccacttttttttccttcatggagactgtttgtttggctttcttccattgttgtttttgtagcatttatttcagaaatgtgtatttccataatccagaggttgtaaaaccactagtgttttagtggttacagcaacatttgaaatggaaactaaaagttaggattttatggagtatggagatagggtccagtatctatttaccctgtaatgtttaggattaaaatgttaaaattttgtgaccatgaatttctttcttttataaattttctcatttaaaaatcaaaaatcttgcaaaacaaaaaccatgtttctttttcttgtataactttttgttttcagcaacataaattgatttttagctggcagacaagaatatccatataagatttgttaaccatttcagagagtttggcaatttttaaaagataataaggtatcatttttaagtatgaaaattaacaatatccctgttgcgcacactaattttgcatgagtaagtttacaaatatgtatcgtctgtaaagcagcatgtgcagattattcataatatagaagttaaaataagtattagtgcaattttcagatatttatttttgcacagaaaacacattatctggagagaaagaaaggagaatttttgagacttgggttttcttaatgccagtgtgaatttgcagatgttttcagaaaatcaagtcacagtaacaatttgccacttttttctattataaatcttcttactt

SEQ ID NO: 10686 - protein, 163 aa, Homo sapiens [sequence omitted]

SEQ ID NO: 10687 - DNA, 1543 bp, Homo sapiens
  CDS (154)..(1227)
tactggccattgctgcctggctacccggggaggaggaggcgcaggagtgagctgcccgagaccgcagggcaagtaagcggctgacggcggaaagaccctggggaaggggctttgcggccggctagaaacattttccccaagcggctccgcaaaatgaccagcctgttccgccggagcagcagcggcagcggcgggggtggcaccgccggggcacgcgggggcgggggaggcacggccgccccccaggagctcaacaacagccggcctgcccgccaggtgcgccgcctggagctcaaccaggccatggacgacttcaagaccatgttccccaacatggattacgacatcatcgaatgcgtgctgcgcgccaacagcggcgctgtggacgccaccatcgaccagctgctgcagatgaacctggagggcggtggcagcagcggcggcgtctatgaggacagctccgactcggaggacagcatccccccggagatcttggaaaggactttggaacctgatagctcggatgaagagcccccacctgtgtactccccgccagcctaccacatgcacgtgttcgaccggccctaccctctggctcccccgactccgcctccccgtatcgacgcgctgggctctggagcccctacaagccagagacgctatcggaactggaacccaccactgctgggcaaccttccggatgactttctccgcatcctgccccagcagctggacagcatacagggtaacgctgggggccccaagcctgggagtggagagggatgtccacctgccatggctgggccagggcccggagaccaggagagccgctggaagcagtacctggagagagatcgattgaaatacgaatcccagaaatctaaatccagcagcgtggctgtcggaaacgactttggcttttcctctcctgtcccaggaactggcgacgccaaccccgctgtgtctgaagatgccttattcagggacaagctgaaacacatgggaaagtccacccggaggaaactgtttgaacttgcccgagccttctcagagaagaccaaaatgaggaagtcaaagaggaaacacttgttgaagcatcagtcgctgggggctgccgcgtcaacagccaacctcctggatgatgtggagggccacgcgtgtgatgaagacttccggggcaggcgtcaggaggcacccaaggtggaggaaggcctgcgagaaggacagtaagagatgccagcagctcttccttgccagagatgatctgacccggtgggggcagctggaaagcaacactggcccccagctgaagggcccagctgcagccagacagatggtgcttgagaaccgaggcccggtgatcctccagccacagtccagcccaaccactgccactttccatgggacttagaacttcggagttgctgccttgcaattggaggaaggacctggggcccctataggcagcagccaattacagccccttttgtagccaggcgttcctatggtcaaagagtggaaatgcaggagccaacctcccttt

SEQ ID NO: 10688 - protein, 358 aa, Homo sapiens [sequence omitted]

SEQ ID NO: 10689 - DNA, 1534 bp, Homo sapiens
  CDS (267)..(938)
tttgcgctcggggaattaaaagaggggaaaaaaagcccgaagaaaactcacgccccaaacaaaacgcaaggagaggagggcgcgcggcctgcagccctcgcccgcgtccccggccgcggcgtgatgcgcgcggaccagcccgcgacgcccgggctgccgctgtccccgcacctggacgctggcgcggtggccgcgccccagcctcgatcgctcgccgcggcgactcggccccaggcttccggcgccggtgggggccctcgctctccatggggctgagggactggctgagaaccgtgtgctgctgctgccggtgcgagtgcttggaggagcgcgccctgcctgagaaggagcccctcgtcagtgataacaatccatattcctcatttggagcaactctggtgagggatgatgagaagaatttatggagtatgccccatgatgtgtcccacacagaggcagacgacgacagaaccctgtacaatttgatagtcattcgtaatcagcaggccaaagactcagaggagtggcagaagctcaactatgatatccataccctgcggcaggttcgaagggaagtaagaaacagatggaagtgcatcttagaagatttaggttttcaaaaggaagctgactctttgttgtcagtgactaaactcagcaccatcagtgattctaaaaacacaaggaaagctcgagagatgttgttaaaactggctgaagaaaccagtattttcccaacaagttgggagctctcagagagatatctctttgttgtggaccgtctcattgcacttgatgctgcagaagagttctttaagcttgctcgtcgaacttaccccaagaagcctggggttccatgcctggcagatggccagaaagaactgcacctgtggggggacctctcatgcagacttgcacatatgcagggagtattgcactgaagatctttgctggaccttcttctcttcagaagataattttcaaaagggagcaatgctgtgaatgcagcttgcttctctctacagattgagaagtccagcttcaaaagttacttgccacttaagcaaggaacttgtcaagagatcatggttcatgttactgaaaagactttaaggatttgtaaggttaatccatagattgctgagaacaatggaaatatttttatttttacagattttgcacttctgaattcaggttaaaaactaacttgtatttagtctgcttagaggactgtgacttgaaaatttttatataccaatgagctttttggtagcgtccacaatgtttaaaatatttcataggcgagatccgtgttctccatttattaatgcattgtagaccaatttaactgctgtgtttcaggaaaattcttcctagtttaataagcaagctaaaagttttattttttatatttagtgcttaatctttgcctcatgttatgtaaaattagcctgcagatattttctctcaattctgtagactctcgcaagataaacattcaaacagtgaaacaaacaataaaataaataaacct

SEQ ID NO: 10690 - protein, 224 aa, Homo sapiens
MGLRDWLRTVCCCCRCECLEERALPEKEPLVSDNNPYSSFGATLVRDDEKNLWSMPHDVSHTEADDDRTLYNLIVIRNQQAKDSEEWQKLNYDIHTLRQVRREVRNRWKCILEDLGFQKEADSLLSVTKLSTISDSKNTRKAREMLLKLAEETSIFPTSWELSERYLFVVDRLIALDAAEEFFKLARRTYPKKPGVPCLADGQKELHLWGDLSCRLAHMQGVLH

SEQ ID NO: 10691 - DNA, 1457 bp, Homo sapiens
  CDS (166)..(930)
gtagttgggaacagcggaacgctggtcccggggactgagtaaggtgtctggatcggagggaggttcgggtgggcatcgggcggctggaagagctcgactcgtcccgctgggaaagcgcgagtctgagtggaaccctggacgacttgcagagcggctggcgcagtcatggcggactactggaagtcacagccaaagaaattctgtgattactgcaagtgctggatagcagacaataggcctagtgttgaatttcatgaaagaggaaagaatcataaggaaaatgtggcaaaaaggatcagtgagattaaacagaaaagcctggataaggcaaaggaagaagaaaaggcatcaaaggagtttgctgcaatggaggcagctgccctgaaagcataccaagaggatttgaaaagacttggcttagagtcagaaattttggagccaagcataacaccagtaaccagcactatcccacctacctcgacatcaaatcaacagaaagaaaagaaagaaaagaagaaaagaaaaaaagatccttcaaagggcagatgggtagaaggcataacctctgagggttaccattactattatgatcttatctcaggagcatctcagtgggagaaacctgaaggatttcaaggagacttaaaaaagacagcagtgaagaccgtttgggtagaaggtttaagtgaagatggttttacctattactataatacagaaacaggagaatccagatgggagaaacctgatgatttcattccacacactagtgatctgccttctagtaaggtcaatgaaaattcacttggcaccctagatgaatccaaatcatcagattcgcatagtgattctgatggggaacaggaagcagaagaaggaggggtctctacagagacagaaaagccaaaaataaagtttaaggaaaaaaaataaaaatagtgatggaggaagtgacccagaaacacagaaagaaaaaagtattcagaaacagaattcattaggttcaaatgaagaaaaatcgaaaactcttaagaaatcaaacccatatggagaatggcaagaaattaaacaagaggttgagtctcatgaggaggtagatttggaacttccaagcactgaaaatgagtatgtatcaacttcagaagctgatggtggcggagaacccaaagtggtatttaaagaaaaaacagtcacttctcttggagttatggcagatggagtggccccagtcttcaaaaagagaagaactgaaaatggaaaatctagaaatttaaggcaacgaggtgatgatcaatagttgcaggagagctttttgtacatgcttttaggacagaatggagacttatacacccaaagtttatctgtgtttgtttgtaagtattatgatgctaaaaatttagatttattctaaatgtatttgatgtgaattaaaataaatattttttcatgtgaaattt

SEQ ID NO: 10692 - protein, 255 aa, Homo sapiens
MADYWKSQPKKFCDYCKCWIADNRPSVEFHERGKNHKENVAKRISEIKQKSLDKAKEEEKASKEFAAMEAAALKAYQEDLKRLGLESEILEPSITPVTSTIPPTSTSNQQKEKKEKKKRKKDPSKGRWVEGITSEGYHYYYDLISGASQWEKPEGFQGDLKKTAVKTVWVEGLSEDGFTYYYNTETGESRWEKPDDFIPHTSDLPSSKVNENSLGTLDESKSSDSHSDSDGEQEAEEGGVSTETEKPKIKFKEKK

SEQ ID NO: 10693 - DNA, 1707 bp, Homo sapiens
  CDS (97)..(1425)
gtgccgtccgcccgtccgtctgcccgcaggcattgcccaagccagccgagccgccagagccgcgggccgcgggggtgtcgcgggcccaaccccaggatgctcccctgcgcctcctgcctacccgggtctctactgctctgggcgctgctactgttgctcttgggatcagcttctcctcaggattctgaagagcccgacagctacacggaatgcacagatggctatgagtgggacccagacagccagcactgccgggatgtcaacgagtgtctgaccatccctgaggcctgcaagggggaaatgaagtgcatcaaccactacgggggctacttgtgcctgccccgctccgctgccgtcatcaacgacctacacggcgagggactcccgccaccagtgcctcccgctcaacaccccaacccctgcccaccaggctatgagcccgacgatcaggacagctgtgtggatgtggacgagtgtgcccaggccctgcacgactgtcgccccagccaggactgccataacttgcctggctcctatcagtgcacctgccctgatggttaccgcaagatcgggcccgagtgtgtggacatagacgagtgccgctaccgctactgccagcaccgctgcgtgaacctgcctggctccttccgctgccagtgcgagccgggcttccagctggggcctaacaaccgctcctgtgttgatgtgaacgagtgtgacatgggggccccatgcgagcagcgctgcttcaactcctatgggaccttcctgtgtcgctgccaccagggctatgagctgcatcgggatggcttctcctgcagtgatattgatgagtgtagctactccagctacctctgtcagtaccgctgcgtcaacgagccaggccgtttctcctgccactgcccacagggttaccagctgctggccacacgcctctgccaagacattgatgagtgtgagtctggtgcgcaccagtgctccgaggcccaaacctgtgtcaacttccatgggggctaccgctgcgtggacaccaaccgctgcgtggagccctacatccaggtctctgagaaccgctgtctctgcccggcctccaaccctctatgtcgagagcagccttcatccattgtgcaccgctacatgaccatcacctcggagcggagcgtgcccgctgacgtgttccagatccaggcgacctccgtctaccccggtgcctacaatgcctttcagatccgtgctggaaactcgcagggggacttttacattaggcaaatcaacaacgtcagcgccatgctggtcctcgcccggccggtgacgggcccccgggagtacgtgctggacctggagatggtcaccatgaattccctcatgagctaccgggccagctctgtactgaggctcaccgtctttgtaggggcctacaccttctgaggagcaggagggagccaccctccctgcagctaccctagctgaggagctctgcaccacgagcttcagtcaccccgagaggagaggaggtaacgaggagggcggactccaggccccggcccagagatttggacttggctggcttgcaggggtcctaagaaactccactctggacagcgccaggaggccctgggttccattcctaactctgcctcaaactgtacatttggataagccctagtagttccctgggcctgtttttctataaaacgaggcaactgg

SEQ ID NO: 10694 - protein, 443 aa, Homo sapiens [sequence omitted]

SEQ ID NO: 10695 - DNA, 1669 bp, Homo sapiens
ttgaacctatgatgaatgaaagaaatgaagtttcctatataggtggttatgtcataagtgttatatcataagtggtgttatagtatcattattacctactatcaggaataatttcttttcactctctcattattcttgtcactgttgaatgtctcaagagttgtgtgtgtattcagtttctatttccctctctgtctcatttactgactccagtctgactaatgctctaatatgctcttgagaagtcaccatgaactccatgttgctgagcccagtggacactttctgtcctcctacttaacctctctgcacagatagattccgtacagagagaaagttgatcacttcctctcttctcagcttctctgacaccaattctgtatttttcttctacccctttggctaatcttgatttttaagacactttgtgggctaacaaaacattctgtggaatgagttcaacatatattacaatttcccctttttaaaaatcatgttattctgtttcatttacagctcttcacattctgtattgatttttaaaaatattttaaaattgtttctctttcctccactttgaaagctttatgaaagaataatttctgtctattgcctaatactgtgtatcatcactgtgcttgacacgtagttggtaatctctaagtatttgagaagcagtgagttaattaatatttgcttttttgacttttttaggttatttaagtatttttgacatctctttttgggaatggggtaaaagaattgtagaggaactattaaatgaccagtgtaaaccattgtttgtaaatggttgtgtaatatgactttggaataatgcagttaatggttatcagtttaagtaatcactattcagttttgataagaaatgtgctttagtctttttctaaatcattctaggagatttgcccatggatttatacatagcaactatacacatatattttagatgaccagaaaaatttagtgcttcttcacagctgtcagctggaataattgcgtactcatacaacaggagttaggttagaactgctattatttagtatccttttgctattacctgatgtagtaagtttaacatctttgtaaaaatatgttttaagttctgggccattgattttgaagtgggaaataaatgaatgctgttgttttttcatgtcaagattaccaaaaagctctatggaaagttattttatagcaaacacaagggaaaggtattttccagaatgagttttttacaaatggatagtgatgttttctgtaatacttaagtttagaaacatatatcacatgacaagtccattgtttattcaaaaaacaaataggcatttgactcatttgggactgtaaaatcttcaaaaatatgccagaaaactaaaaaatgtagaaaagaggattttttttgttttgtttttagcccccagaccaccactttttatagtaacttattttctagtgtctcaaaaaataagggcttttaaggaaagagagtatttctcttaaagttaattttgatagatatttatctagatgctttcttttttcccttgccataatagctggcttgtagagagagttatgtttgaaaaggcttgccttttttccgtcgctctgagcaggattatgttagggcccaaatagtgactttgac

SEQ ID NO: 10696 - DNA, 1773 bp, Homo sapiens
  CDS (44)..(517)
cacattccagaaaaaaataccgctttcacaaaactcgctccgcatgacccacagaacacccaaggtcaaaaagagtccaaagttcagaaagaaaagttatctgagtagactgatgctcgcaaacaggcctccgttctctgcagcgaagagcctcataaattccccttcacaaggggctttttcatccttaggagacctgagtcctcaagaaaacccttttctggaagtatctgctccttcagaacattttatagaaaccactaatataaaagacacaactgcaagaaatgccttggaagaaaatgtttttatggaaaacactaacatgccagaagtcaccatctctgaaaacacaaactacaatcatcctcctgaggcagattccgctgggactgcattcaacttagggccaactgttaaacaaactgagacaaaatgggaatacaacaacgtgggcactgacctgtcccccgagcccaaaagcttcaattacccattgctcagtttgaaattcagctaacccagcagctacagtcccttatccccaacaacaatgtgagaaggctcatttctcatgttatccggaccttgaagatggactgctctggggcccatgtgcaagtgacctgtgccaagctcatctccaggacaggccacctgatgaagcttctcagtgggcagcaggaagtaaaggcatctgagatagaatgggatacggaccaatggaagactgagaactacattaatgagagcacggaagcccagagtgaacagaaagagaagtcgcttgagctcacaaaagaagttccaggatacggctatactgacaaactcatcttggcattaattgtgactgaaatactaatgattttgattatacttttctgcctcattgtggtttaggattgggtgtgtgtgtctcctctctgaatggcactcaaatgtttgctgactcctactctgcgtgactggggtgtacagctatggactgatgcatcccatcccatcatctttcacgagcaaagcagtctcttttttgacagctgaagaagaacctgtagggaatccagaaggagcattcatgaaggtgttacaagcccggaagaattacacaagcactgagctgactgttgagccggaggagccctcagacagcagtggcatcaacttgtcaggctttgggagtgagcagctagacaccaatgacgagagtgatgttatcagtgcactaagttacatttgccatatttctcagcagtaaacctagatgtggaatcaatgttactaccgttcattaaactgccaaccacaggaaacagcctggcaaagattcaaactgtaggccaaaaccggcaaaaagtgaatagagtcctcatgggcccaatgagcatccagaaaaggcacttcaaagaggtgggaaggcagagcatcaggagggaacagggtgcccaggcatctgtggagaacgctgccgaagaaaaaaggctcgggagtccagccccaagggagctggaacagcctcacacacagcaggggcctgagaagttagcgggaaacgccatctacaccaagccttcgttcagccaagagcataaggcagcagtctctgtgctgacacccttctccaagggcgcgccttctacctccagccctgcaaaagccctaccacaggtgagagacagattgaaagacaacacacactatttccattttagaaagtgcaaaggctagagttacaaatatgaaggcttctaaaccaatttcacattccag

SEQ ID NO: 10697 - protein, 158 aa, Homo sapiens
MTHRTPKVKKSPKFRKKSYLSRLMLANRPPFSAAKSLINSPSQGAFSSLGDLSPQENPFLEVSAPSEHFIETTNIKDTTARNALEENVFMENTNMPEVTISENTNYNHPPEADSAGTAFNLGPTVKQTETKWEYNNVGTDLSPEPKSFNYPLLSLKFS

SEQ ID NO: 10698 - DNA, 1697 bp, Homo sapiens
  CDS (321)..(1370)
aaagcgccattacgcagagagaaagttacgaggttcgtggccgcggtttccccaggcagctggcgctggaggcttcggcgtcacgtgctggtctggatttttctcgatgcactggggaaagcggtggactcttatcgtgggagggctcttgatctgtgatttatagataggcacagctactcccgttcgggaacccaacggcagacaggtcctagtgcccatcagatacccgcggccgggactcggagctgtggggtgtggggaggcggaggcaccaactaagagcgacctagcatcgcaaagccgccctcggggcgctcatggcgggacgcctcctgggaaaggctttagccgcggtgtctctctctctggccttggcctctgtgactatcaggtcctcgcgctgccgcggcatccaggcgttcagaaactcgttttcatcttcttggtttcatcttaataccaacgtcatgtctggttctaatggttccaaagaaaattctcacaataaggctcggacgtctccttacccaggttcaaaagttgaacgaagccaggttcctaatgagaaagtgggctggcttgttgagtggcaagactataagcctgtggaatacactgcagtctctgtcttggctggacccaggtgggcagatcctcagatcagtgaaagtaatttttctcccaagtttaacgaaaaggatgggcatgttgagagaaagagcaagaatggcctgtatgagattgaaaatggaagaccgagaaatcctgcaggacggactggactggtgggccgggggcttttggggcgatggggcccaaatcacgctgcagatcccattataaccagatggaaaagggatagcagtggaaataaaatcatgcatcctgtttctgggaagcatatcttacaatttgttgcaataaaaaggaaagactgtggagaatgggcaatcccaggggggatggtggatccaggagagaagattagtgccacactgaaaagagaatttggtgaggaagctctcaactccttacagaaaaccagtgctgagaagagagaaatagaggaaaagttgcacaaactcttcagccaagaccacctagtgatatataagggatatgttgatgatcctcgaaacactgataatgcatgtatggagacagaagctgtgaactaccatgacgaaacaggtgagataatggataatcttatgctagaagctggagatgatgctggaaaagtgaaatgggtggacatcaatgataaactgaagctttatgccagtcactctcaattcatcaaacttgtggctgagaaacgagatgcacactggagcgaggactctgaagctgactgccatgcgttgtagctgatggtctccgtgtaagccaaaggcccacagaggagcatatactgaaaagaaggcagtatcacagaatttatactataaaaagggcagggtaggccacttggcctatttactttcaaaacaatttgcatttagagtgtttcgcatcagaataacatgagtaagatgaactggaacacaaaattttcagctctttggtcaaaaggaatataagtaatcatattttgtatgtattcgatttaagcatggcttaaattaaatttaaacaactaatgctctttgaagaatcataatcagaataaagataaattcttgatcagctat

SEQ ID NO: 10699 - protein, 350 aa, Homo sapiens [sequence omitted]

SEQ ID NO: 10700 - DNA, 1990 bp, Homo sapiens
  CDS (21)..(1526)
tttcatcacttaaaagaaccatgtctattaaagaatctagctcactggagtgcattgccattccaaaaaagaagatgaatttaaaagataaaagccatgaaggtgttgcttgtgtccagaaagaaaaatcagtagttaaaacctggttctgtgaatgcaatcagcgattcccaagtgaagatgcagtagaaaagcatgttttctcagcaaacacaatgggttataaatgtgtggtctgtggaaaggtatgtgatgattcaggggtcattcgtttacacatgagccggattcacggaggggcacatttaaataactttcttttctggtgtcggacatgcaaaaaggagttaacaaggaaagatactatcatggcacatgtgactgaatttcataatggacacagatatttttatgagatggatgaggtagaaggtgaaactttgccatcatcctctacaacattggataatttgactgctaacaagccttcatcagctattactgttattgatcattccccggcaaatagttctccgaggggtaaatggcaatgccggatttgtgaagatatgtttgattcccaggaatatgtaaaacagcactgcatgtctttggcaagccacaagtttcatagatacagctgtgctcactgcagaaagccttttcataagatagaaacattgtaccgacattgccaagatgagcatgacaatgagataaagattaaatacttctgtgggctttgtgatcttatctttaatgtggaagaagcatttctgagtcattatgaggagcaccacagcatagattatgtatttgtgtcagaaaaaactgaaacttcaattaaaaccgaagatgattttccagtaatagagaccagtaaccagttaacttgtggttgccgtgagagttacatctgtaaagtcaacagaaaagaagattatagcagatgtctccaaatcatgctggataaaggaaaactgtggtttcgctgcagtttatgttcggcaacagcacagaatttaaccgacatgaacactcatatccatcaagtgcacaaagaaaagagtgatgaggaggagcagcagtatgtaatcaagtgtggcacctgcaccaaagcatttcatgatcctgagagtgcacagcagcatttccatagaaaacattgcttcttacagaaacccagtgtggctcattttggatctgaaaaatcaaacctgtacaagtttactgctagtgcctcacatacagagagaaaactgaaacaggcaataaactattcaaaaagtttagacatggagaaaggagttgagaatgacctaagctatcagaatatagaggaagaaattgttgagcttccagatttggattacctgcgaaccatgactcatatagtctttgtagattttgataactggtcaaacttttttggtcatctaccagggcatctaaaccaaggaacatttatttggggctttcaaggtacggttaataagaaaaacaaaagaaaactttttcccacctcttagaatatagtcagtttaaaaggctcctcttaaaccttcctggatagaacataggaacataattggaatattgttcttttgtattatagttactctgctagaatcgttttctttacatgcctctgtggtaaatgttagctctatctggtgactcaaagtttatggatcttttggccgggcgcggtggctcacgtctgtaatcccagaactttggaaggctgaggcggacggatcacgaggtcagaagatcgagaccatcctggctaacatggtgaaaccccgtctctactaaaaagaaaaaaaaaatacaaaaaattagctgggcgtggtggcgggcccctgtagtcccagctccttgggaggctgaggcaggagaatggtgtgaacccaggaggcgaagcttgcagtgagctgagatcgcaccactgctctccagcctgggcaacagagtgagactctgtctt

SEQ ID NO: 10701 - protein, 502 aa, Homo sapiens
MSIKESSSLECIAIPKKKMNLKDKSHEGVACVQKEKSVVKTWFCECNQRFPSEDAVEKHVFSANTMGYKCVVCGKVCDDSGVIRLHMSRIHGGAHLNNFLFWCRTCKKELTRKDTIMAHVTEFHNGHRYFYEMDEVEGETLPSSSTTLDNLTANKPSSAITVIDHSPANSSPRGKWQCRICEDMFDSQEYVKQHCMSLASHKFHRYSCAHCRKPFHKIETLYRHCQDEHDNEIKIKYFCGLCDLIFNVEEAFLSHYEEHHSIDYVFVSEKTETSIKTEDDFPVIETSNQLTCGCRESYICKVNRKEDYSRCLQIMLDKGKLWFRCSLCSATAQNLTDMNTHIHQVHKEKSDEEEQQYVIKCGTCTKAFHDPESAQQHFHRKHCFLQKPSVAHFGSEKSNLYKFTASASHTERKLKQAINYSKSLDMEKGVENDLSYQNIEEEIVELPDLDYLRTMTHIVFVDFDNWSNFFGHLPGHLNQGTFIWGFQGTVNKKNKRKLFPTS

SEQ ID NO: 10702 - DNA, 1726 bp, Homo sapiens
  CDS (884)..(1372)
gttcacttaaaattcatagagagacatgtagaaatacatactagataatgaaaggatccaaacagtgaagaagcagtccctttatatttttgaattttttttcaagagtaaagtgtgttatgatagtcatcttgatttgtttgaaatgatgtttacaaatgctattaaaattataaatcctacattttacttgtgaattttttggtctacctttctagttgtaaaatataaaaatcctaaaagatcatattgattaacttcttggtggaatcacttatcttgttttgatgataggagcagtatagcatcaagttctagaggaattgggagccattgcaaatctgagggtcaggaggaatctttcgtcccacagagctcagtgcaaccaccagaaggagacagtgaaacaaaagctcctgaagaatcatcagaggatgtgacaaaatatcaggaaggagtatctgcagaaaacccagttgagaaccatatcaatataacacaatcagataagttcacagccaagccattggattccaactcaggagaaagaaatgacctcaatcttgatcgctcttgtggggttccagaagaatctgcttcatctgaaaaagccaaggaaccagaaacttcagatcagactagcactgagagtgctaccaatgaaaataacaccaatcctgagcctcagttccaaacagaagccactgggccttcagctcatgaagaaacatccaccagggactctgctcttcaggacacagatgacagtgatgatgacccagtcctgatcccaggtgcaaggtatcgagcaggacctggtgatagacgctctgctgttgcccgtattcaggagttcttcagacggagaaaagaaaggaaagaaatggaagaattggatactttgaacattagaaggccgctagtaaaaatggtttataaaggccatcgcaactccaggacaatgataaaagaagccaatttctggggtgctaactttgtaatgagtggttctgactgtggccacattttcatctgggatcggcacactgctgagcatttgatgcttctggaagctgataatcatgtggtaaactgcctgcagccacatccgtttgacccaacctcatctggcatagattatgacataaagatctggtcaccattagaagagtcaaggatttttaaccgaaaacttgctgatgaagttataactcgaaacgaactcatgctggaagaaactagaaacaccattacagttccagcctctttcatgttgaggatgttggcttcacttaatcatatccgagctgaccggttggagggtgacagatcagaaggctccggtcaagagaatgaaaatgaggatgaggaataataaactctttttggcaagcacttaaatgttctgaaatttgtataagacatttattatatttttttctttacagagctttagtgcaattttaaggttatggtttttggagtttttccctttttttgggataacctaacattggtttggaatgattgtgtgcatgaatttgggagattgtataaaacaaaactagcagaatgtttttaaaactttttgccgtgtatgaggagtgctagaaaatgcaaagtgcaatattttccctaaccttcaaatgtgggagcttggatcaatgttgaagaataattttcatcatagtgaaaatgttggttcaaataaatttctacacttgcc

SEQ ID NO: 10703 - protein, 163 aa, Homo sapiens
MEELDTLNIRRPLVKMVYKGHRNSRTMIKEANFWGANFVMSGSDCGHIFIWDRHTAEHLMLLEADNHVVNCLQPHPFDPTSSGIDYDIKIWSPLEESRIFNRKLADEVITRNELMLEETRNTITVPASFMLRMLASLNHIRADRLEGDRSEGSGQENENEDEE

SEQ ID NO: 10704 - DNA, 1869 bp, Homo sapiens
  CDS (129)..(1682)
tttttcggacggctgcagcatcgcggtggggatcgaaagcgggggcttctgggacgcagctctggagacgcggcctcggaccagccatttcggtgtagaagtggcagcacggcagactggtcaaacaaatggattttacagaggcttacgcggacacgtgctctacagttggacttgctgccagggaaggcaatgttaaagtcttaaggaaactgctcaaaaagggccgaagtgtcgatgttgctgataacaggggatggatgccaattcatgaagcagcttatcacaactctgtagaatgtttgcaaatgttaattaatgcagattcatctgaaaactacattaagatgaagacctttgaaggtttctgtgctttgcatctcgctgcaagtcaaggacattggaaaatcgtacagattcttttagaagctggggcagatcctaatgcaactactttagaagaaacgacaccattgtttttagctgttgaaaatggacagatagatgtgttaaggctgttgcttcaacacggagcaaatgttaatggatcccattctatgtgtggatggaactccttgcaccaggcttcttttcaggaaaatgctgagatcataaaattgcttcttagaaaaggagcaaacaaggaatgccaggatgactttggaatcacacctttatttgtggctgctcagtatggcaagctagaaagcttgagcatacttatttcatcgggtgcaaatgtcaattgtcaagccttggacaaagctacacccttgttcattgctgctcaagagggacacacaaaatgtgtggagcttttgctctccagtggggcagatcctgatctttactgtaatgaggacagttggcagttacctattcatgcagctgcacaaatgggccatacaaaaatcttggacttgttaataccacttactaaccgggcctgtgacactgggctaaacaaagtaagccctgtttactcagcagtgtttgggggacatgaagattgcctagaaatattactccggaatggctacagcccagacgcccaggcgtgccttgtttttggattcagttctcctgtgtgcatggctttccaaaaggactgtgagttctttggaattgtgaacattcttttgaaatatggagcccagataaatgaacttcatttggcatactgcctgaagtacgagaagttttcgatatttcgctactttttgaggaaaggttgctcattgggaccatggaaccatatatatgaatttgtaaatcatgcaattaaagcacaagcaaaatataaggagtggttgccacatcttctggttgctggatttgacccactgattctactgtgcaattcttggattgactcagtcagcattgacacccttatcttcactttggagtttactaattggaagacacttgcaccagctgttgaaaggatgctctctgctcgtgcctcaaacgcttggattctacagcaacatattgccactgttccatccctgacccatctttgtcgtttggaaattcggtccagtctaaaatcagaacgtctacggtctgacagttatattagtcagctgccacttcccagaagcctacataattatttgctctatgaagacgttctgaggatgtatgaagttccagaactggcagctattcaagatggataaatcagtgaaactacttaacacagctaatttttttctctgaaaaatcatcgagacaaaagagccacagagtacaagtttttatgattttatagtcaaaagatgattattgattgtgagataggttaggttttggggggccagtagttcagtgagaatgtttatgtttacaactagccttcccagt

SEQ ID NO: 10705 - protein, 518 aa, Homo sapiens
MDFTEAYADTCSTVGLAAREGNVKVLRKLLKKGRSVDVADNRGWMPIHEAAYHNSVECLQMLINADSSENYIKMKTFEGFCALHLAASQGHWKIVQILLEAGADPNATTLEETTPLFLAVENGQIDVLRLLLQHGANVNGSHSMCGWNSLHQASFQENAEIIKLLLRKGANKECQDDFGITPLFVAAQYGKLESLSILISSGANVNCQALDKATPLFIAAQEGHTKCVELLLSSGADPDLYCNEDSWQLPIHAAAQMGHTKILDLLIPLTNRACDTGLNKVSPVYSAVFGGHEDCLEILLRNGYSPDAQACLVFGFSSPVCMAFQKDCEFFGIVNILLKYGAQINELHLAYCLKYEKFSIFRYFLRKGCSLGPWNHIYEFVNHAIKAQAKYKEWLPHLLVAGFDPLILLCNSWIDSVSIDTLIFTLEFTNWKTLAPAVERMLSARASNAWILQQHIATVPSLTHLCRLEIRSSLKSERLRSDSYISQLPLPRSLHNYLLYEDVLRMYEVPELAAIQDG

SEQ ID NO: 10706 - DNA, 2000 bp, Homo sapiens
  CDS (408)..(1013)
gatactcatatagtagagatctagaccttgctaagaaaaaacatgcttccctgaggcagacggagtctgatccagatgctgatagaaccactttaaatcatgcagatcattcatcaaaaatagtccagcatcgattgttatctagacaagaagaacttaaggaaagagcaagagttctgcttgagcaagcaagaagagatgcagccttaaaggcggggaataagcacaataccaacacagccaccccattctgcaacaggcagctaagtgatcagcaagatctccggactgaacgattacaaaaaacaacagaacgttttagaaatcctgttgtgttcagcaaagattctacagtcagaaaaactcaacttcagtctttcagccaatatattgagaatagaccagagatgaaaaggcagagatcaatacaggaagatacaaagaaaggaaatgaggagaaggcagcgataactgaaactcagaggaagccatcagaagatgaagtgcttaataaagggttcaaagacaccagtcagtatgtagtaggagaattggcagcactagagaatgagcaaaagcaaattgacacccgtgccgcgctggtggagaagcgccttcgctatctcatggacacaggaaggaacacagaagaagaagaagctatgatgcaggaatggtttatgttagttaataagaaaaatgccttaataaggagaatgaatcagctctctcttctggaaaaagaacatgatttagaacgacggtatgagctgctgaaccgggaattgagggcaatgctagccattgaagactggcagaagaccgaggcccagaagcgacgcgaacagcttctgctagatgagctggtggccctggtgaacaagcgcgatgcgctcgtcagggacctggacgcgcaggagaagcaggccgaagaagaagatgagcatttggagcgaactctggagcaaaacaaaggcaagatggccaagaaagaggagaaatgtgttcttcagtagccatcagatcagaaagaatctctcccaacattttagagtcttgcttcccaaaccagaaaaagtcagactcattgtcgatttaaaacttttaacattttgtttggctggattgtactactttacctctactttaccaccaccacccttttcctccctcctttccaaataatatacagaactccaaaatagcttcatttaaggatttttttgtgagttaacaatttccttgaaatcctgtgaaatagatttgcacagacaccttgtgagtgattggtattggaggtgttcaagaaactgttcgaaaaagaacaaaaacacttccctcgttattttctctcattttttgatgagaggaaaatttgaaacattattcttgttgttgttggtaatagcataatgacagtgggaggggtacaaggggataagaaaaatgtcatgatttttttccggtcctgccacatgtaacacttactctgttacctaaattttatagttagatcatatccaatctacttattaaactgtgttctatttaccagtggagtttttctgcagtggttgcgtttcactgtaaggataatggagttcctctcctctgctttcctcagaggatggtcctttaacatagccagaaacaagccctgtggtttgaaggtgagctgtgaggatgggactaattgatatgcaccagtttacaaagacagtcttatcatccgagaatacaccatctttttctctggataattatttcttacatcatgcttgattcctacattttgttgggtctcaacattggctcacgaatgctgttaatatttattctgtattgataaaaagtctgtcttgccactacaagtaaatcccccatttaatattttcttctttagcatagcactgtcattttttgtgaaaatggttatgtttatttattacaatactgagtcatatataaattttcaataaaagcagaaactttcttacctt

SEQ ID NO: 10707 - protein, 202 aa, Homo sapiens
MKRQRSIQEDTKKGNEEKAAITETQRKPSEDEVLNKGFKDTSQYVVGELAALENEQKQIDTRAALVEKRLRYLMDTGRNTEEEEAMMQEWFMLVNKKNALIRRMNQLSLLEKEHDLERRYELLNRELRAMLAIEDWQKTEAQKRREQLLLDELVALVNKRDALVRDLDAQEKQAEEEDEHLERTLEQNKGKMAKKEEKCVLQ

SEQ ID NO: 10708 - DNA, 1760 bp, Homo sapiens
  CDS (31)..(837)
aaaacgtttgtatctcaagcaagtgctacaatgcaacagtatgcacagagagataagaaacatgaatattggtttgctgtgccacaagaaaggacagatcacttgtatgccttcttcattcagtggagtccagaaatatatgcagaagatactggcgaatataccagagaacctggatttatagtagtaaaaaagattgaggagtctgaaacaattgaggattctagtaatcaagcagcagccagagaatgggagattactacaagggaagacataaattcaaagcaggttgctacagtgaaagcagacctggagtctgaatcttttcgaccaaacctaagtgatcccagtgaacttttactgccagatcaaattgaaaagcttaccaagcatcttccaccaagaacaattggctatccatggactcttgtttatggtactggaaaacatggcacaagcttgaaaactctttatcgaacaatgacaggtttagacaccccagtgctgatggtgattaaagacagtgatggacaggtttttggtgcgttagcatctgagccactgaaagtgagtgatggcttttatggtactggagagacctttgtttttacattctgtccggagtttgaggtctttaagtggacaggagatgatatgttttttatcaaaggagacatggattcactagctttcggtggtggaggaggagaatttgcgctttggcttgatggagatctctaccatggaagaagccattcttgtaaaacgtttgggaatcgtacactttctaagaaggaagatttctttatccaagatattgaaatctgggcttttgaataaataaaatgctctctgtcttagcaggagaatggcccaaacctgacatggacaagcattgtttggaaagttcaagaagcaatacagtgtaacatgtcacttgtgctttaaaattagtctgtatcaccatttattacagttataattttggagtttatttttcaaatcatgttcttgtcccagagttctttaggttaacactagggactgcgtccatgtactagtataacagcttgggtttgttagaatttgggcaacattttgattataatgacaacttcattttcacatgttactcagttccctaataggatggtgctcttttgttgaacctgtattgatttttttttttttaactatattgattcgtttactagaacagtctaattggggcattgaggaaatgaagactggatacttctgtatctgtgaagttggcacaggtaacatttggacatgttcatcttattcttaggaaggaaaaaatcacttgccaaaataatacatacttcatagaccactgagttctagtttttattcacactacaacattctctttaacgatgttgcaggtattctcaatttccttttaagaaaaatgaaatgtgaggagaattctggttgtaatagatgacagtacatatgatctgcaggtttgggcatatgctttcatcattaaattatctgataaagttacaagtcacaaaggagaatgagaacttaatgattctattggatttaatatattagcaagaaaacatactatttacatatgtgtagcttagtaaggcattaacataagtacaaaaactatgaaacagatgcatatttcctcaacatactgtgtcaggtatactgttttataatttggttgttttagccttattgcacaccaactcccaaaatataggttactcttgttc

SEQ ID NO: 10709 - protein, 269 aa, Homo sapiens
MQQYAQRDKKHEYWFAVPQERTDHLYAFFIQWSPEIYAEDTGEYTREPGFIVVKKIEESETIEDSSNQAAAREWEITTREDINSKQVATVKADLESESFRPNLSDPSELLLPDQIEKLTKHLPPRTIGYPWTLVYGTGKHGTSLKTLYRTMTGLDTPVLMVIKDSDGQVFGALASEPLKVSDGFYGTGETFVFTFCPEFEVFKWTGDDMFFIKGDMDSLAFGGGGGEFALWLDGDLYHGRSHSCKTFGNRTLSKKEDFFIQDIEIWAFE

SEQ ID NO: 10710 - DNA, 1543 bp, Homo sapiens
atttatggtggtagctttccaaaattatatagatacctcttacacaatctcaagctcttacagcaagcttgtccagcctgtggctcgacacaagtttataaactttcttaaaacattgtgagtttttttattttttattttttttaagctcatcaactatcattagtgtattttatgtgtggcccaagacagttcttccagtgtggcccagggaagccaaaagattggacaccccttataacatcttagaagttttaaataattatcttcatatccacatagctttacaaaagctcacgacagggagagcattttcttggttctgtagtaatttcagggggtttactgattggaacccttccttttcctcctctctccagtccagctggcattcagtcctttaaacaatgtggctatgcagtacttttgattactaatgacttctattaccttcttccccattgtgtacagatgggagaatcctcagcacaagtgtctactactattggatggacagcggcagatgttcacagcgcgtcatgattaattagtttaaattgcaaggttctatctgtgaggtagctcaggtagatttaagggcggtagacatgaactgaagtcacgtttgcgcagcggctctaggtatacacttcacattgtttctttgcaggtcgcacagcattttaatctgcgcccgcaatgcacaatgcgcgcatgcttgtctgccagtggaagctccatgaacaaaagatagtaattatgccaataaatggtgaaagagcttttggatatttatccaattattttataaatataatgtgcttgaaagaattgtccattgctgaaaatatgaacaaaataggaagtttttttgctgctggaatttgttcatggactttctaggtgctctacttttctccccccaacaggtgctctgctgcgcacagcaaactgaagcgcattgctttggggataaagcgtctcctggacagataaccctcttcagaccaaacctctcctcctgacattctgttctgccatcttatcgtagggagatggtctatctaagataggttttaaaaaaaaatagatttgtcataattggaataggtttgtttttgtttttgtttttgtttttactgtaaatttaaatccccattaatatgccactaaagctgtaactcagagtgggtaatttctattcagaagcactcccctcccccagcaaagaggtatttctattagtaaagcatagtacacccctcttctttaggtctgcctgcagtagccagttaatataagttggtaatctgcagtgcacacccatttaaaaaaatggataccttccccaaactaatccatctccttttttttcttcccacagcgtttgctgccaattgatggggcaaatgatctctttttttcagccacctccactgactcctacctccaaagtttatactatcagaccttattttcctaaggatgaggcatccgtgtacaagatttgcagagaaatgtatgacgatggagtgggtttacc

SEQ ID NO: 10711 - DNA, 1481 bp, Homo sapiens
  CDS (130)..(330)
taatgcaactaaaatgttctcgggtttagtaccaagcgtactagtatgagaggcatgagatgttccggcagtatttacacctaattttatgagatttccaaaacttgatgatttcaggtccttcgcaacatggtacactgtgcagacctgagcaaccccaccaagtccttggaattgtatcggcaatggacagaccgcatcatggaggaatttttccagcagggagacaaagagcgggagaggggaatggaaattagcccaatgtgtgataaacacacagcttctgtggaaaaatcccaggtatctaatatgagattttcaaagtttttgtgagctctgctgattatagagctggagggttctatttaattccgtttttccaatagaatatgtatatatgaaacaataaggagacaactacgcattttgttccattatagtcaggactcatgcgacttctccattacactcagtttcacagggtggggaaaagtagtcatcagaaacccatcaaaatttggactatgtgtccctaaatcatttagatagttgtctctgatgttagcaaatccagctgaataatatgaacatcagtgtctcctccatcccaaccctctggatttctcctagctctgtcttcattcaagaactctactcctcatccttgcttccagccctctgtttttatcttctgtccttaatcaagcccatggtgaccatcaccagaggcagtctcttttactgcatagtcaaagccctgtcttgtcttccctcccaaggatgcttctatgcttttgagaacatgctgacattttctggttgtgtccaaagcaacacattctgtgtgtgctcaggacaggggacaatagtctggaggggtgaatacagaaatgtccagatgccaatagctgcagaatatgcagcaatggaaagtatcagtatccatacaaagatttttcaagaaaacgaatgggctgagccaagtagctgagattgagaatgagttcatagactgtccaagatctttatcccaaaaacatttggattgtttattttcagtatttatcctctttccctactacctggatactccaaatttgcatatacttgtaatattaatatacagttcctttgcaatatttattttgttgcttcttagagaaacccaactaaatgagtttaaaaaatctgtgaaagggctgggcacagtggctcatgcctgtaatccagcactttgggaggctgaggtggacggatcacctgaggtcaggagttcaaaaccagcctggccaacatggtgaaaccctgtctctaccaaaaacacacaaaaaattggtcgagcatggtagtgtgtgcctgtagtcccagctactcgggaagctgagacaggaaaattgcttgaacccaggaggcggacgttgcagtgagctgagattgtgccactgcattccagcctgggcaacagagcaagactctatctc

SEQ ID NO: 10712 - protein, 67 aa, Homo sapiens [sequence omitted]

SEQ ID NO: 10713 - DNA, 1628 bp, Homo sapiens
  CDS (22)..(1626)
aaagcaaaaaaattagtagaaatggaaagagaacatgaaaaatcacttagtgaaattagacagttaaagagagaacttgagaatgttaaggccaagcttgctcagcacgtcaaaccagaggaacatgaacaggttaagagcagattagaacagaaatcaggagaacttgggaagaagatcactgagttaacattgaaaaatcagacactacaaaaggaaattgaaaaagtttatttggataataagctcctcaaggagcaagcacataacttaacaattgaaatgaaaaatcattatgttcctttaaaagtaagtgaagacatgaaaaagtcacatgatgcaattattgatgatcttaatagaaagcttttagatgtaacacaaaaatatacagaaaagaagttggaaatggagaaattgctactggaaaatgacagcttaagtaaggatgtaagccgcctagaaactgtgtttgtacctcctgagaaacatgaaaaagagataatagctctgaaatccaatattgttgaacttaagaaacagctgtctgaacttaagaaaaaatgtggtgaagaccaggagaaaatacacgctctcacatctgaaaacactaacttgaagaagatgatgagtaatcagtatgtgccagttaaaacccatgaagaggttaaaatgacactgaatgacacgttagccaaaactaacagagaattattagatgtgaagaaaaaatttgaagatataaatcaggaatttgtaaaaataaaagataagaatgaaatattaaaaagaaacctggaaaacactcagaaccaaataaaagctgagtacatcagcctggcagagcacgaggcaaagatgagctcgctaagtcagagcatgagaaaggtgcaggatagtaatgctgaaatcttggccaactacagaaaaggccaagaagagattgtgacactgcatgccgaaattaaagcccagaagaaggagctcgacacaatacaagaatgcattaaggtaaaatatgccccaattgtcagctttgaggagtgcgagagaaaatttaaagcaacagagaaagaactaaaagaccagttatcagagcagacacaaaagtatagtgtcagtgaagaagaagtcaagaaaaacaagcaagagaatgacaagttaaagaaggagatttttacccttcagaaagatttgagagataagacagttctcattgagaagtctcatgaaatggaaagagcattaagcagaaaaacagacgagctaaacaaacagttaaaagacttgtcacagaaatacacggaagtaaagaatgtgaaagagaagctagtagaagaaaatgccaaacagacttctgagatacttgcagtgcaaaatcttttgcaaaaacaacatgttccattggaacaggttgaggctctgaaaaaatctcttaatggcacaattgaaaatctaaaggaagaactgaagagtatgcaaaggtgttacgagaaagagcagcagacagtgaccaaactgcatcaattgttggagaatcaaaagaactcttctgtacccctggcagagcatttgcagattaaagaagcatttgagaaagaagttggaatcataaaagccagcttgag

SEQ ID NO: 10714 - protein, 535 aa, Homo sapiens
MEREHEKSLSEIRQLKRELENVKAKLAQHVKPEEHEQVKSRLEQKSGELGKKITELTLKNQTLQKEIEKVYLDNKLLKEQAHNLTIEMKNHYVPLKVSEDMKKSHDAIIDDLNRKLLDVTQKYTEKKLEMEKLLLENDSLSKDVSRLETVFVPPEKHEKEIIALKSNIVELKKQLSELKKKCGEDQEKIHALTSENTNLKKMMSNQYVPVKTHEEVKMTLNDTLAKTNRELLDVKKKFEDINQEFVKIKDKNEILKRNLENTQNQIKAEYISLAEHEAKMSSLSQSMRKVQDSNAEILANYRKGQEEIVTLHAEIKAQKKELDTIQECIKVKYAPIVSFEECERKFKATEKELKDQLSEQTQKYSVSEEEVKKNKQENDKLKKEIFTLQKDLRDKTVLIEKSHEMERALSRKTDELNKQLKDLSQKYTEVKNVKEKLVEENAKQTSEILAVQNLLQKQHVPLEQVEALKKSLNGTIENLKEELKSMQRCYEKEQQTVTKLHQLLENQKNSSVPLAEHLQIKEAFEKEVGIIKASL

SEQ ID NO: 10715 - DNA, 1765 bp, Homo sapiens
  CDS (75)..(398)
gttacccagtgcccaagggcagtcttgatattatcattctcatatttgttctttcagcaattgttccagacaagatgcagaaggctatcaacaggctgagcaggcttctgaaacctggcgggatgatgcttctgcgagattacggccgctatgacatggctcagcttcggtttaaaaaaggtcagtgtctatctggaaatttctacgtgagaggtgatggaaccagagtttacttcttcacacaagaggaactggacacgcttttcaccactgctggactggaaaaagttcagaacctggtggatcgccgactgcaggtgaaccgaggaaagcaactgacaatgtaccgggtttggattcagtgcaaatactgcaagccccttctgtccagcaccagctgagaggcacctgctgccaacacgatgcaagcccattgtgtttccgggctttttttaaaaaaaaaattgtagcactgggcgtggtgcatgcctgtaatcccagccactcaggaggctgaggcggggaggatccattgagcccagcagtccaacctgggcaaaatagtgagagaccctgtatctgaaagtaataataaaaataaaaaatataaatgaggtctcgttgatgttggacaattcaagaattcagacttgaaccttaaacctaggaaaagttactttgtatcaggattctaacaattatgcttcatatttgtgaagtcctttaaaacataattttctcaagttctttctttgagatctcaatctgtcttagcattttgtaactaataactgaaattttattcaaaggaattgtaaaccttaaaccaccaatttatttccatgtgaaaaagtgttacatatgacaagtgttttttgactgtaattgcgttaaatcttttgagaatgtaaatgccgggctaggcaattgcagttaatacatacagaggttagtgaagggcttattaagttgtaggggaagcaagctgggaagaatcagatcagatattttcctgacaaaaaaaatgaccctacagagagcatcaaaatgtggtgttcttgttaagtaattgatcgtggtcttcgctttaatcttagttccgccaggcacggtggctcacacctgtaatcccagcactttgggaggccaaggcgggcggatcagctgaggtcaggagttggagaccagcgtggccaacatggtgaaaccccgtctctactaaagataaaaaaattagctgagtgtgttggtgggtgcctgtagtccagctacttgggagactgaggcaggagaattgcttgaacccaggaggcagaggttgcagtgagctgagattgtgccactgcactccagcctgggcaacaaagcaagactctgtctcaaaaaaataaaaataaaaaaaaaatcttagttccatggaattttaagcattgttccccctctaacctgtgtctaaggaattaaaagaatttggccgggtgcggcagctcatgcctgtaatcccaacactttgggaggctgaggcaggcggatcacgaggtcaggagatcgagaccatcctggccaacacggtgaaacctcgtctccactaaaaataccaaaaaaattagctgggcatggtggcacacacctgtagtcccctgtagtcccagctactcgggaggctgaggcaggagaatcgtttgaacctgggaggtggaggttgcagtgagccaagatcatgtcactgcattccagcctgggcaacagaggaagactccgtctc

SEQ ID NO: 10716 - protein, 108 aa, Homo sapiens
MQKAINRLSRLLKPGGMMLLRDYGRYDMAQLRFKKGQCLSGNFYVRGDGTRVYFFTQEELDTLFTTAGLEKVQNLVDRRLQVNRGKQLTMYRVWIQCKYCKPLLSSTS

SEQ ID NO: 10717 - DNA, 1592 bp, Homo sapiens
ttctaatgcttttaaggttccttttcagcccttcctcctcgtaatccacaaatactgagaccaaggcattttttgggtcagtcctaatttcaagcattctatcctgccctccccaaatgaactcacacttattagaccatatgttcctatattagttcaggaagggggaaaaaatgttcatcacacttgtatataagagatcatagaaaaacagtttactaacctgtgaaaataccattcattctctgtttacctctggtccacagctaagcaatcagtaggatataaatgtaccctatgttcactattcagtattcataagtatactacttatgaattggaaatctgacacaacatttacatgacctaattttgaaaatttaaaatagtgtaaggcccctaggcttaattttacaggggaaagattaaaaggacacaagcaaacatatattctctctctgtgctgtgggacactggtaattttttgacttaaaatatttgatacttaaaatgccaaacttctacatttctgcagtaacaaggcagttatcatattgaataccatttctttctctccagtaagtaaatattagcacatgaactgaaaatattaagtgattataaaaaagtccaaataaattcattaaaatttagcttggcaaaatgttagtttcatgttcttggtagaagtccttttatatttatattcaaatgaaatgaacaatttacaagcaaaggaaatggcatcaaatatttgacaccctgcctcccaaggtgtattgattcatgctttttgctcagatctaggtttctccactcaggaaaagaggagaatgtacccatacttgggaaaacaagtttccgatggcacagctttgatcaaacagcaaaattctatccatctatgtattgccatctgacagtatgacaaatggtcccatgtgcgatattcacactgcattgtagtcaaacctgtaagtcaaaggatatgaaataatagtaactacacattaagcacagaagaaaatgaaacaaacaaaaaggttttaaaccaaccaaaaatatgtcttattttggatgttctatatgttcttacattctctcaggtcttttgtgtcgttatgaacacaattctaacaagcttgattattttatttccattcacatattacaggcaacaagctgaaaaagtagaacagggtgtagagagacaggacaaagtacagattagggcttgaagtgcccctgaccagtcgacagcaaccacatggaataatgactcatgtgcattaatgatcacactaaatgatatttgttttttacctagtccttcaactgacagcttaaagaacttcaggttgttctgattcttgagtctcctctacaacttcagagaggactttcattttattttggatcaaatgctccacaactagttgaaactggaattaaattttatatgaagttcctagatgatttaaagctgtaagaagaagaataatgaatcataagaaaacttgctgctacagatatcaaaaaggaatgttaccatccctcatgctaatccttttcattttaaataaacaggatct

SEQ ID NO: 10718 - DNA, 2065 bp, Homo sapiens
  CDS (20)..(370)
aggtgggggccggggcgggatggctgcagcggcggccggggccgggagcgggccctgggcggcccaggagaagcagttcccgccggcgctgctgagtttcttcatctacaacccgcgcttcgggccgcgcgaaggacaggaggaaaataagattttattttatcatccaaatgaggtagaaaagaatgagaagattagaaatgtcggattgtgtgaagctattgtacagtttacaaggacatttagcccatcaaaacctgcaaaatctttacatacacagaagaacagacagttcttcaatgaaccagaagaaaatttctggatggtcatggtatttacacacacagtgtatctttctgaaattgtatggtgaagttatgggtgatctttactgttcagaatttaggaaagttctctggctgttgcatccaagtaaaattaaaataaaattggttgcaattttaaaatcaagttcttcctatttgctttattcattcttggggctgttttaagaagttgtgtttctggtgctgtagcatgttcaaagtttttaaattaaggcaaaataaacatggtctaatgaattcattgtataatttcagtttatcaaactttgtaggttgttcggaatcctataattgaaaaacagagtaaagatggaaaaccagttattgaatatcaagaggaggagttgttggtaatgtgtcattgtttgtttatttatttatttttttaaatgtattgctgagtatgttgaatgccttacttggtcggatttaaactaggaggcttttgcagaagtttctcggggtatatagcaaaggtttatgtttatcatttacatgagcacaatctttttaaaatgtatatgcacccaatctcactaataccttctactcttcatctatattgaaagccctcctaaagtaaggcttactgattgacaaattagagtttaaacacttctggctgggaacagtggctcacacctgtaatcctagtactttgggaggtcaaggcaggcagattacttgaggtcaggggttcgagaccagcctggccaatatggcggaaccctgtctctactaaaactacaaaaactggccagggatggtggcgcacacctgtcatcccggcttctcaggaggctgaggcaggagaatcgcttgaaccggggacgcaaatgttgcagtgagccaggattgtaccactgcgctccagcctggacaacagagcgagactccatctcaaaaaaaaaaaaaaaaaaaaaagaacgcaaacactttttttcagcacgcaactattgtgggatgaagtttataaacattatactgtttggccaagagtcagtgtacctttgccatctatccagtagacattgtttttcccttgaactgagctgtgtgctgtgttttcgcgtctgcaggacaaggtttatagctcggtgctgcggcagtgctacagcatgtacaaggtaagcgtggcgttctttctcaactcagagtccaaccacttacccctatctctaggctccagggttgtttaaagagaagtctataaatgactgcaaagtgactctgtatttgtcttagagaagaaaataatgaggcctttgaaacaggtagtgaggtttatgcctacatttattcagtaagtattgaactcccttctcttttctcagccttatagtaggaatgtgtccccattgatgaaaaagtgtatctatgtgctcaaggaacatacagaatgcagataattttatgatttaaaagtttcagtgaggcagggcacagtggatcacacctgtaatttcagcattctgggaggctaaggtgggaggattgcttgagcccaggaattcaggaccagtctgggcaatatagcaagaccccatctctacaaaaaaattttataaaagttagccaggtatcatggtgcatgcctgtagtcccagctacctgggaggctgaggtgggaggatcgctcgcaccttggaggtcgaggctgcagtgaactgtgattgcaccactgcactctaccctgggcaacagcgagattccatctc

SEQ ID NO: 10719 - protein, 117 aa, Homo sapiens
MAAAAAGAGSGPWAAQEKQFPPALLSFFIYNPRFGPREGQEENKILFYHPNEVEKNEKIRNVGLCEAIVQFTRTFSPSKPAKSLHTQKNRQFFNEPEENFWMVMVFTHTVYLSEIVW

SEQ ID NO: 10720 - DNA, 1562 bp, Homo sapiens
  CDS (17)..(1483)
cttccttctagcagaaatggcggctgcggcggctcgagtggtgttgtcatccgcggcgcggcggcggctctggggtttcagcgagagtcttctaatccgaggcgctgcgggacggtcattatattttggagagaacagattaagaagtacacaggctgctacccaagttgttctgaatgttcctgaaacaagagtaacatgtttagaaagtggactcagagtagcttcggaagactctgggctctcaacatgcacagttggactctggattgatgctggaagtagatacgaaaatgagaagaacaatggaacagcacactttctggagcatatggctttcaagggcaccaagaagagatcccagttagatctggaacttgagattgaaaatatgggtgctcatctcaatgcctatacctccagagagcagactgtatactatgccaaagcattctctaaagacttgccaagagctgtagaaattcttgctgatataatacaaaacagcacattgggagaagcagagattgaacgtgagcgtggagtaatccttagagagatgcaggaagttgaaaccaatttacaagaagttgtttttgattatcttcatgccacagcttatcaaaatactgcacttggacggacaattttgggaccaactgaaaatatcaaatctataagtcgtaaggacttagtggattatataaccacacattataaggggccaagaatagtgcttgctgctgctggaggtgtttcccatgatgaattgcttgacttagcaaagtttcatttcggtgactctttatgcacacacaaaggagaaataccagctctgcctccctgcaaattcacaggaagtgagattcgtatgagggatgacaagatgcctttggcgcaccttgcaatagctgttgaagctgttggttgggcacatccagatacaatctgtctcatggttgcaaacacgctgattggcaactgggatcgctcttttgggggaggaatgaatttatctagcaagctggcccagctcacttgtcatggcaatctttgccatagctttcagtctttcaacacttcctacacagatacaggattatggggactgtatatggtttgtgaatcatccactgttgcagacatgctacatgttgttcaaaaagaatggatgcgactctgtacaagtgtcacagaaagtgaggttgcacgagccagaaatcttctgaaaacaaacatgttgttgcagcttgatggttcaactccaatttgtgaagatattggtaggcaaatgttatgctataatagaaggattcccatccctgagcttgaagcaagaattgatgctgtgaatgctgagacaattcgagaagtatgtaccaaatacacttataataggagtccagctattgctgctgttggtcccattaagcaactaccagattttaaacagatacgcagtaacatgtgttggcttcgtgattaaaatgctcctaatcaagattgtttgaacacatgtatttataaaacagagctagagaaaaataaaaatgaacatgtat

SEQ ID NO: 10721 - protein, 489 aa, Homo sapiens [sequence omitted]

SEQ ID NO: 10722 - DNA, 2536 bp, Homo sapiens
cataattttctatctatggtacccttggcttctgcctggcttctgaggcttagggaagggaggaagggacctacaaagagccagggtacacctgcctcttgtgctgagggcacgtgccagcttctctgccagtaagccttttgctagctaacatttcccaccctcccaaggcccctaacctgccctcccctctccactatgttagtatatctacctctgtttctgactctgaggaagggtcaggccacacggagggaacagtagtgggtaccagcctcccctctgctgtccagtccaccacatcaatctcttcctcttcagagctggcaggaagtgagcctagtagttcagagtgaccagatacctccttgcctgccttgggagaagggtataataactcatctgtagtcaaggagacttccagcccagtctccacccagtttgagcagggaggtgagaggtccccataagacctctggggagtatcaagggagctgacatggagaagtttgtcttcctgaccatccagtggctgggagctggtaatttcaaggtctggtgtccaacggcctcctactgaaagcacttcactcacctcagagggcatgacaagggggctaaggagctcagttggccctctgttctcaccagcaggttccttttccaattctgtgagctccctgggccagagttccatgtctggtagacaccattcttccccttcaatccagttctttcctgtttctgtcagatggtaggtaggcgttctgcagccctcagcccctggactctccagagaccctataggtggttcaatgtctgagccacagagcatgaagtccaggatctcctccagctcactggtggcagcagcacttgtgattcggtactcctcagcctcacagggctgctccagcagagctgtgtcaaatgcatagggttctctgcagtcaatagccaacataggttccttctctaccagttctggactggactcaaactctgacttcaccactgggtggtctggggagtggctagcagagaccagaatgtcttgtagcttagtgcacatgggggagtcctgacacagttctgttctagtaggtgacatttcctgctcattactggagaatggctgagttcctgaaggctcttggaagtctcctccgggatctgggatctgggggctatcttgagtgtttttgagaggagtctcttgtaccacttcccagcaagtcccattgacaatcttcctaagtttaactctcccaacctgcccctcctctgcagagtctgagttaggtgccctgacttcagggctccgcttcctgctcccacctgtctttcccagaccagatgggtttggggtgctctgcagaggactagctctgcctggttttggcttgtcctctggtgtttctttatttacactcctctgccgccaaagacgccggccaggggttgcaggcactgagctagatccacttaaaatgctggaaggctttgatgtacagataccaggagatggctttgagcgactgagcctgatctttctgggcaacaggtgtttgtccacagaggggtacaagctgggtggggagagcactgtaggatcaagggcagtgtcattcttgttctctctaggctcttgactatggcttgatggtgaagagtttttttttcttgtggagttgggcaggctctggccttcctcttgagcagaagagtgccagacaaattgtctgcattctgtcggttgttttcctgagggaatggaggaggcgaccgttgttatcgagctggcctctcccgctccaggcgctctgtgaagaaggggctacaagctgacaggatgcagcagtgagctggaactgcctcacctgaagggaaacccaaatacttttgttatcaggtagactggcatgttcatgggctaagcatagacattactacccaaatgtactgccccttcttttattttccttccatgggacttcaagtaaaagaaaaaaattattcttctgcctgcctggaaccttctgccattaccttttgcctagctatttttttttttttttttgagacagtctcgcttggttgcccaggctggagtgcagtggtgcaatctcagctcactgcaacctctgcctcccgggttcaagcaattctcctgtcttagcctcccgagtagctgggattacaggcgcatgctgccacacccggctaatttttgtatttttagtagagacggggtttcaccttgttggtcaggccggtctcctgacctcaggtgatccacccgcctcggcctcccagagtgctgagattacaggcgtgagccaccgtgtccagcccgctaccttgtttctttattctcaaaatctacctttgtcatcacttccttcagaaagcctcctggggctgagtgcagtgccacatgcttgaaatcccaactgttaggtaggctgaagcaggagaattgcttgagtccagggctttgaggctagcctggggaacacagttataccttgtctcc

SEQ ID NO: 10723 - DNA, 1564 bp, Homo sapiens
  CDS (314)..(1138)
gaagcacatctggacagctgtgcggcctccttgcgggccgacgtcagccgagcacgtcccccacgtcctctccttctcgccacttattatttattcgttttcccaaagaagcgactagggacccaagtttaaaaattcctccccccactcaatgcgagacgtggccagatcccatccaacacacggtttaattttcatggggctctgggatcaaaagaacagaaacagcaacaacaaaagcccagccgctgtctgattttaagctggcaaagtgggaaaaataaagtgttgagtaaacagaccaagttggatcatggggaatttcagaggtcatgccctccctggaaccttcttttttattattggtctttggtggtgtacaaagagtattctgaagtatatctgcaaaaagcaaaagcgaacctgctatcttggttccaaaacattattctatcgattggaaattttggagggaattacaatagttggcatggctttaactggcatggctggggagcagtttattcctggagggccccatctgatgttatatgactataaacaaggtcactggaatcaactcctgggctggcatcatttcaccatgtatttcttctttgggctgttgggtgtggcagatatcttatgtttcaccatcagttcacttcctgtgtccttaaccaagttaatgttgtcaaatgccttatttgtggaggcctttatcttctacaaccacactcatggccgggaaatgctggacatctttgtgcaccagctgctggttttggtcgtctttctgacaggcctcgttgccttcctagagttccttgttcggaacaatgtacttctggagctattgcggtcaagtctcattctgcttcaggggagctggttctttcagattggatttgtcctgtatccccccagtggaggtcctgcatgggatctgatggatcatgaaaatattttgtttctcaccatatgcttttgttggcattatgcagtaaccattgtcatcgttggaatgaattatgctttcattacctggttggttaaatctagacttaagaggctctgctcctcagaagttggacttctgaaaaatgctgaacgagaacaagaatcagaagaagaaatgtgactttgatgagcttccagtttttctagataaaccttttcttttttacattgttcttggttttgtttctcgatcttttgtttggagaacagctggctaaggatgactctaagtgtactgtttgcatttccaatttggttaaagtatttgaatttaaatattttctttttagctttgaaaatattttgggtgatactttcattttgcacatcatgcacatcatggtattcaggggctagagtgatttttttccagattatctaaagttggatgcccacactatgaaagaaatatttgttttatttgccttatagatatgctcaaggttactgggcttgctactatttgtaactccttgaccatggaattatacttgtttatcttgttgctgcaatgagaaataaatgaatgtatgtattttggtgc

SEQ ID NO: 10724 - protein, 275 aa, Homo sapiens
MGNFRGHALPGTFFFIIGLWWCTKSILKYICKKQKRTCYLGSKTLFYRLEILEGITIVGMALTGMAGEQFIPGGPHLMLYDYKQGHWNQLLGWHHFTMYFFFGLLGVADILCFTISSLPVSLTKLMLSNALFVEAFIFYNHTHGREMLDIFVHQLLVLVVFLTGLVAFLEFLVRNNVLLELLRSSLILLQGSWFFQIGFVLYPPSGGPAWDLMDHENILFLTICFCWHYAVTIVIVGMNYAFITWLVKSRLKRLCSSEVGLLKNAEREQESEEEM

SEQ ID NO: 10725 - DNA, 2108 bp, Homo sapiens
  CDS (97)..(1836)
acttgctttttctcccgctttgtaattgtaggagaaaaccaaagaactagcagagaagcaggcgcaactgagcccatctcgctggccagctgcgccatggctgatctggttccagacttgcagcccattcttttctggatgtctaactccatcgagctcctgtactttatccagcagaaatgcccactctacatgcagagcatggaggagcagctggacatcacaggctcgaaggaatcgctgttctcctgcacgctgacggccagcgaggaggccatggcggtgctggaggaggtggtgctgtacgccttccagcagtgcgtctactatgtctccaagtccctgtacatctgcctcccggcactcctggagtgcccgccattccagacggagcgccgtgagagctggtcctcggcccccgaactgcccgaggagctgcgccgcgtggtgtctgtgtaccaggcagccctggacctcctgcggcagctgcaggtgcaccccgaggtggcctcgcagatgctcgcctacctcttcttcttctccgggacactgcttctcaaccagctcctcgacaggggcccctccctgagctgcttccactggcccagaggtgtccaggcctgcgcccgcctgcagcagctcctggagtggatgcggagcgccggcttcggggcggctggagagcacttcttccagaagctctcctgcaccctcaacctgctggccacacccagggcccagctcatccagatgagctggacagccctgcgggctgcgttccccgcactgagcccagcacagctgcaccggctgctgactcactaccagctggcctcggccatgggccccatgagcacctgggagccaggggcccaggacagccccgaggccttcaggtcagaggatgttctggagtcctacgaaaaccccccacccatcgtcctgcccagcgacggcttccaggtggacttggaagccaactgcctggacgacagcatctaccagcacctgctctacgtccgccactttctgtggggtctgcggagcagagccagccccggcagccctggcaggcctggcagtggggcctcccagccagtgtgccccgagggtatgcaccacgtggtccttgacgggcacctggaggccccgagctgccccctggctcccagggaccctggcccagcagcccgggaagtggccccggagcgtactcttcccttgaggggggctccctgggcacaggccccccctggaaggcaacccggccgtgggggctcccaggctggccccccgcacacggactcgtcctgcttgctcacgcctcccagcactccacttggccctgagcctggggaccccgactggccagagtccggcggcccctgtggaaaagcgctcccagagaggcagaggaacggactcagcggcctccggggtgcagctccggaaggagactctgcagcccttgcggaggagtcccctccagccccgtccagccgcagctccagcaccgaggacttctgctacgtcttcacggtggagctggaacgaggcccctccgggctggggatgggcctgatcgacgggatgcacacgcacctgggcgcccccgggctctacatccagaccctgctcccgggcagccccgcagcggccgacgggcgcctgtcgctgggggaccgtatcctggaggtgaatggcagcagcctcctgggccttggctacctgagagctgtggacctgatccgtcatggcgggaagaagatgcggttcctggtcgcgaagtccgacgtggaaacagccaagaagatccatttccgcacgccccctctctaggggggctgcgaggacacccccacaggcccggcacccggtcccacctggtgacactgggcttcctcccgccttcgtccccgttttgtaactgaccaagttgggtcccgggtggggagcctcaccctggggacatgcctgttgataacatgcatctcagtgtaggttctatttatatggcagatgacgtgaaattgtgatgtttgttacagagcttttatgtttaaagacttcaatggagaagtacggttcaataaactatttttcccgtt

SEQ ID NO: 10726 - protein, 580 aa, Homo sapiens
MADLVPDLQPILFWMSNSIELLYFIQQKCPLYMQSMEEQLDITGSKESLFSCTLTASEEAMAVLEEVVLYAFQQCVYYVSKSLYICLPALLECPPFQTERRESWSSAPELPEELRRVVSVYQAALDLLRQLQVHPEVASQMLAYLFFFSGTLLLNQLLDRGPSLSCFHWPRGVQACARLQQLLEWMRSAGFGAAGEHFFQKLSCTLNLLATPRAQLIQMSWTALRAAFPALSPAQLHRLLTHYQLASAMGPMSTWEPGAQDSPEAFRSEDVLESYENPPPIVLPSDGFQVDLEANCLDDSIYQHLLYVRHFLWGLRSRASPGSPGRPGSGASQPVCPEGMHHVVLDGHLEAPSCPLAPRDPGPAAREVAPERTLPLRGAPWAQAPPGRQPGRGGSQAGPPHTDSSCLLTPPSTPLGPEPGDPDWPESGGPCGKALPERQRNGLSGLRGAAPEGDSAALAEESPPAPSSRSSSTEDFCYVFTVELERGPSGLGMGLIDGMHTHLGAPGLYIQTLLPGSPAAADGRLSLGDRILEVNGSSLLGLGYLRAVDLIRHGGKKMRFLVAKSDVETAKKIHFRTPPL

SEQ ID NO: 10727 - DNA, 1352 bp, Homo sapiens
ccaatatgaggaggaagactccgtaaatccaacaaacaggagaattagcaccaaaagaacttaagatcttaacagaatggtttcaaagaaaatgtagtatatgaagtcaaaagctcaatggacttgctaaatagcaaattagttaaaattcaatgaataagttaaaaacagcttaagaaaagaattagcgtttgaggctgccatgagcctcaaacatccagccttttatctctctgtagcataaagagataaaaaaagtagaaaaaattataggaaggttaaatattggaggactgaatgagaaagtcccacatacatctcataaggaatctagaacaagagagaaaataagaaaactaatttcaaaatgaaaatagatgagaattttccagaaattcaatttcattcctcaaattaaagaagcacaacacatccccagcaagttaaataaaaataaatccacagacatctccagtgaaactcaataccaaattcaaagatacaatcttaaaagaaccaaagattacctagtatgaatgcagactggcatcatgttttttgcaacatcaggggccagatgacaatggaataaagtaatatctttgaagtaatgagaaaaaatatcaatctagaattctatacccaccttagctatttttaagagtaagggtaaaataaaatttcactcttgcagaaaggacacccaactctagagttagaaaacagtaaccaaaaataaggtgggactcaaagactaaaatatgttggtaaatctaaatcagcaatgactgcataaaacaacattaatagttaacttaggaagttgttaagataaatgtaaaatactaggcaataacaacatagtacatgagaagaattgatggccattaattcttttttttttttttttttttttgagatggagtctcgctctatcgcccaggctggagtgcagaggcactatctcggctcactgcaagctccatctcccgggttcacgccattctcctggatgaccattaattctaatgtcttagtatcattgaggacatgagtaggagttctgattaatattacaaatctttataaaatcaaatatgcatgctaaaaatttgatgcatattcctagattctgaggaattctagcaaagtggcaggaatgacagaattataaagttgctattttgcaactgctaacaaagtaactgatttaggcaaagatcaatggatgaaaccttttagctaaaaagttgatgggaaacttcacagtgagtggggaacacatggtcagtgcctgaacccactaagtgtgcactgaatgtggtattaccagagaatacagcaccacctac

SEQ ID NO: 10728 - DNA, 1520 bp, Homo sapiens
  CDS (69)..(1328)
aggagcttgcagtagcgggcggcagagctggagtgaagggagctagtgtttaggtagcagtcaccattatgctcaaagcggtgatcctgattggaggccctcaaaagggaactcgcttcagacctttgtcttttgaggtgcccaaaccattgtttcctgtggcaggggtccctatgatccaacaccatattgaagcctgtgcccaggtccctggaatgcaggagattctgctcattggcttctaccaacctgatgagcccctcacccagttcctagaagccgcccagcaggagtttaaccttccagtcaggtacctgcaggaatttgcccccctaggcacagggggtggtctttaccattttcgagaccagatcctggctgggagccccgaggcattcttcgtgctcaatgctgatgtctactccgacttccccttgagtgctatgttggaagcccaccgacgccagcgtcaccctttcttactccttggcactacggctaacaggacgcaatccctcaactacggctgcatcgttgagaatccacagacacacgaggtattgcactatgtggagaaacccagcacatttatcagtgacatcatcaactgcggcatctacctcttttctcctgaagccttgaagcctcttcgggatgtcttccagcgtaatcagcaggatgggcaattggaggactcaccaggcttgtggccaggggcaggtaccatccgcctagagcaggatgtgttttcagccctggcagggcagggccagatatacgtgcatctcactgatggtatctggagtcagatcaagtccgcaggttcagccctctacgcctcccgcctctacctgagccgataccaggacactcacccagaacggctggccaagcacaccccagggggcccatggatccgagggaatgtgtacatccacccgaccgccaaggtggccccctcggctgtgctgggccccaacgtctccatcgggaagggggtgaccgtgggtgagggtgtgcggctccgggagagcatcgtcctccatggagccactttgcaggagcacacgtgtgttctgcatagcatcgtgggctgggggagcaccgtgggacgctgggcccgcgtggagggtacccccagtgaccctaaccccaacgatccccgagcccgcatggacagtgagagcctcttcaaggacgggaagctgctgcctgctatcaccatcctgggctgccgagtccggatccctgccgaggtgctcatcctgaactcgattgttctgccacacaaggagctgagccgaagcttcaccaaccagatcatcctctgagtagggctgccagaaggcccccagctcctacccactccccttgaggctgctgcctgcttggccagcctctgtccagaaaggaccagagaaagccaggctggatcgtcacatgccggggagcaatgtggatggcctggggactcctgggttttctccctcccgactccctaataaaccccgtgaaccttg

SEQ ID NO: 10729 - protein, 420 aa, Homo sapiens [sequence omitted]

SEQ ID NO: 10730 - DNA, 1583 bp, Homo sapiens
  CDS (225)..(1121)
acaccaagctgaagcggctggagatcacgccggtggtgtgcaatgtggaacaagttcgcatcctgaggggactgggcgccatccagccaggagtgaaccgctgcaaactcatctccaggaaggacttcgagaccctctacaatgactgcaccaacgcaagttctagacctggaaggcctcctaagaggactcaaagtgtcacctccccagagaactctcacatcatgccgcattctgtccctggtctcatgtctcctgggataattccaccaacaggtctgacagcagccgctgcagcagctgctgctgctaccaatgcagctattgctgaagcaatgaaggtgaaaaaaatcaaattagaagccatgagcaactatcatgccagtaataaccaacatggagcagactctgaaaacggggacatgaattcaagtgtcggactggaacttccttttatgatgatgccccaccctctaattcctgtcagcctacctccagcatctgtcaccatggcaatgagccagatgaaccacctcagcaccattgcaaatatggcagcagcagcacaagttcagagtcccccatccagagttgagacatcagttattaaggagcgtgttcctgatagcccctcacctgccccctctctggaggaggggagaaggcctggcagtcacccatcatcacatcgcagcagcagcgtgtccagctcccctgctcggactgagagctcttctgacagaatcccggtccatcagaatgggttgtccatgaaccagatgctgatgggcttatcaccaaatgtacttcctgggcccaaagagggagatttggccggtcatgacatgggacatgagtcaaaaagggtgcatattgaaaaagatgagaccccgctttctacaccaaccgcaagagacagccttgacaaactctctctaactgggcatggacaaccactgcctccaggttttccatctccttttctgtttcctgatggactgtcttccatcgagactcttctgactaacatacaggggctgttgaaagttgccatagataatgccagagctcaagagaaacaggtccaactggaaaaaactgagctgaagatggattttttttaagggaaagagaactaagggaaacacttgagaagcagttggctatggaacaaaagaatagagccatagttcaaaagaggctaaagaaggagaagaaggcaaagagaaaattgcaggaagcacttgagtttgagacgaaacggcgtgaacaagcagaacagacgctaaaacaggcagcttcaacagatagtctcagggtcttaaatgactctctgaccccagagatagaggctgaccgcagtggcggcagaacagatgctgaaaggacaatacaagatggaagactgtatttgaaaactactgtcatgtactgaatctttcctgttgaagaaatccatgttatagaaaagaactttgcagtcagacattcgtcatgggaaagttcagaaaaaaataaagtccttttaagggaacttcctgaattttgtgtattaatgttctttaaaagtttaagtattctac

SEQ ID NO: 10731 - protein, 299 aa, Homo sapiens
MPHSVPGLMSPGIIPPTGLTAAAAAAAAATNAAIAEAMKVKKIKLEAMSNYHASNNQHGADSENGDMNSSVGLELPFMMMPHPLIPVSLPPASVTMAMSQMNHLSTIANMAAAAQVQSPPSRVETSVIKERVPDSPSPAPSLEEGRRPGSHPSSHRSSSVSSSPARTESSSDRIPVHQNGLSMNQMLMGLSPNVLPGPKEGDLAGHDMGHESKRVHIEKDETPLSTPTARDSLDKLSLTGHGQPLPPGFPSPFLFPDGLSSIETLLTNIQGLLKVAIDNARAQEKQVQLEKTELKMDFF

SEQ ID NO: 10732 - DNA, 1818 bp, Homo sapiens
  CDS (79)..(471)
cctcctgaaaatgaaaagaaggtagaggaagatattatcacagagcttgctcttggagaagatgctatatctagcagtatggaaattgaccaaggtgaaaagaatgaagatgaaacttctgcagatcttgtagaaacgattaatgaaaatgttattgaagataacaaaagtgagaatatcttagaaaatacagactctatggagacagatgaaatcattcctattttggaaaagcttgcaccttctgaggatgaacttacttgcttttctaaaacatctctccttccaatcgatgagacaaatccagatttggaagagaaaatggaaagttcttttggttcaccatctaaacaagaaagtagtgagagtttgccaaaagaagcctttctggtcctctctgatgaagaggatatttcgggtgaaaaagatgagtctgaagttatatcgcaaaatgaaacgtgctctccaggttagcatataacttaaatgttaaagattttttattgactttgatgaactgtttaataaaacattatcataatgttttaaatttattttagctgcagagaaagttgagaatagtgatgactctatagaaagatgtcttaacttcatagaattcagaattagtgtgtgtactctgtgagtagcattgtactaaatactaagaagggagataaaataagtagaaaatatgcccttatagtctggaaatagagatgaagtagagcaccataacactgagataacagcttaagttagtacataattgactagagttgtagcagttctttcttgctatcacttagcgaacaaataacttagaactaaaagcctaatagtttaatctatttgcttcaagtgtaacaaattatattttcaattaatattcccaatgaaatcctgttctttaatattctttgtccaggaatgacagcaccattgttgtaagccagaaaccttaaagcttgattatccatttgataaagactttacccatttgctccctcagcccttttgattctacccagcctattctcttccccattttctgaatgagctccctgtaacccaattctcttatttgatattgtccgtctatgtcttagatctctgttacttttaggttgatttcaaactccttatgtaaaaggtacattaactttatggtttgttcagtacctatctctcccatctcttttattttatttattattcctagagaaaaagaatgagaaaaattctaccttcttttatggtcaaactgaaaaacattattcctctatgaaactttctaagcctgtggaagactgagaaaagcatgaatacctttcttttcccattatatcacattcttttagatttagacatctctgagagaagtgaccttgctagcataaaacaccatctaatttcttcaaagaaaaaaaaatggaggcaggtctaagagacagagacaacttttttccccaatatatcataccagcttttggaggtagagatttttttcttattaaaaaatggcttttttttttttttggccaggtaaggtggctcacacctataatcctaggactttgggaggctgaggcaggcagattgcttgagctcaggagttcgagaccagcctgggcaacatggtgagaccccgtctctacaaaagtacaaaaattagccaggcgtggtggcacttgtctgtagtccagggtacttgagggcctgaggtagggggatcacttgaacctgggtggtcgaggctgcagtgagccgagatcgcgccactactccagcctgggtgacaaagtaagaccctgcctc

SEQ ID NO: 10733 - protein, 131 aa, Homo sapiens
MEIDQGEKNEDETSADLVETINENVIEDNKSENILENTDSMETDEIIPILEKLAPSEDELTCFSKTSLLPIDETNPDLEEKMESSFGSPSKQESSESLPKEAFLVLSDEEDISGEKDESEVISQNETCSPG

SEQ ID NO: 10734 - DNA, 1593 bp, Homo sapiens
  CDS (52)..(549)
aaggcgcggaagcggcggtagctgcagctggcgaagttgggcgactggcggatgcaggccttgcggcacgtcgtgtgcgccctgtccggcggcgtggacagcgccgtggccgcgctgctgctgaggcggagaggttaccaggtgacaggggtgtttatgaagaactgggactcactggatgaacatggggtctgtactgccgacaaagactgtgaagatgcttacagagtttgccagatcttagacatccctttccatcaagtgtcctacgtaaaggagtattggaatgatgtgttcagtgactttttgaatgagtatgaaaaaggaaggactcccaatcctgacatagtttgcaacaagcacatcaaatttagttgcttttttcattatgctgtggataatcttggggcagatgccattgccacaggtcactatgcaagaacttccctggaagatgaagaagtccttgagcagaagcacgttaagaagcccgaagggcttttcagaaatcggtttgaagttagaaatgccaggtttcccaggatgccctgaggagaaccatcttccctctggggggattaacgaaagagtttgtaaagaaaatcgctgctgagaatagacttcatcatgtgcttcagaagaaagagagcatgggcatgtgtttcatcgggaagaggaattttgaacatttccttcttcagtatctgcagcctcgacctggtcactttatttccatagaagacaataaggttctgggaacacataaaggttggttcctgtataccttgggccagagagcaaacataggtggcctgagagagccctggtacgtggtggagaaggacagcgtcaagggtgacgtgtttgtggccccccggacagaccacccagccctgtacagggacctgctgaggaccagccgcgtgcactggattgcggaggagcctcccgcagcactggtccgggacaagatgatggagtgccacttccgattccgccaccagatggcactagtgccctgtgtgctgaccctcaatcaagatggcaccgtgtgggtgacagctgtgcaggctgtgcgtgcccttgccacaggacagtttgctgtgttctacaagggggacgagtgcctgggcagcgggaagatcctgcggctggggccgtctgcctacacgctccagaagggccagcgcagagctgggatggccactgagagccccagtgacagcccagaagatggtccaggcctgagtcccttgctctgacagagatggatctgctagaaggaacctggagagcaggacccatggctgggcggctggtgagcagtccaggtgcccaagggccagcttgctgctgcccaaagcagaggaagccgggctggctgagggtccggaaagcctgcaggggcccggcgagccccaggaagagcctcagctccaggctggggctctggctgctggagcatctgctggctggtggggtggcccgagttccccttcaccgcccccagggagggtttcccacctcagagtacaccgaggggacctgcagagggggctgtcgggacagcgtggaataaacattatttcaagg

SEQ ID NO: 10735 - protein, 166 aa, Homo sapiens
MQALRHVVCALSGGVDSAVAALLLRRRGYQVTGVFMKNWDSLDEHGVCTADKDCEDAYRVCQILDIPFHQVSYVKEYWNDVFSDFLNEYEKGRTPNPDIVCNKHIKFSCFFHYAVDNLGADAIATGHYARTSLEDEEVLEQKHVKKPEGLFRNRFEVRNARFPRMP

SEQ ID NO: 10736 - DNA, 2008 bp, Homo sapiens
  CDS (21)..(503)
acccacgctgcgggcaagccatggcgggaagcgagccgcgcagcggaacaaactcgccgccgccgcccttcagcgactggggccgcctggaggcggccatcctcagcggctggaagaccttctggcagtcagtgagcaaggagagggtggcgcgtacgacctcacgggaggaggtggatgaggcggccagcaccctgacgcggctgccggtgagcgtcggccgcaggccgcggaggacagtggggccggcccgggccggagggacctcccctggagccccccggggcctggggaactctcgcgccccggcctgggtctggctccgtccatgcagccattcctggcagtgtagtcaccgagaagctacagttgatcagaagcgtcttggcgtggaccctggtgctccgcagggggcccgaacatctcagggaagcaccttcatggggcccctggggaccctcccgatcgccctcaggttttccacccgccaaaacaggcacatgtgactaggacaccctgaatgtccggttacggaaatgagacagttcccaacttgctgattagcttgggaaagcattccagcgtccctgttcccagcgtctttgattccggatcactgtaccaaaacacttggagggccaaggtttttaccctctcaagaggacattgtgcctgtggctgttattgtgtatttgaagaaacaaaacggcccctcagttgaaaataaatgacttaagttacaagtgcctcaagttacatcaaggccacgagaatgacacacataacttattgttaaactttggggtagataggtaaatgaagagaacaaaaattattgaaaattattacaattctttgtctcatttggactattgacacctctctccaatgtgtatatcaacgtgaaagctgcaggtttagaatgcctccaagtttctccttgcagaggtttttcataacattttaatagattctgtagaggaactaagatgacaaatttacggccgggcgcggtggctcacgcctgtaatcccagcactttgggagacccaggtgggcggatcacgaggtcaggagatcaagaccatcctggctaacacggtgaaaccccgtctctactaaaaatataaaaaattagccgggcttggtggcaggcgcctgtagtcccagctacttgggaggctgaggcaggagcatggcgtgaacctgggagacggagcttgcagtgagccgagatcttgccactgcactccagcctgggcgacagagcgagactgtgtctcaaaaaagaaaaagacaaatgtacactctttgatttggtctgatgataaaatcagataaaggttgatatgggttttattttgaaggacaaattatttccttaactaatttatgtaactaactggtatatccaaatatctctgaggaaaaattaaaggaactggtgattttgctggaaaaatagcaagacagtggttgctttttcaggaatgtttcaggtgtttcagaaattaaatgtttaacaactacgaaactaaaatgttcagttatgatcctttgctgatagcaggaaaataatagatttaattattaatggtagatttagttattaaaaatactagtcagttgaccttttgttatttatttgttgattatgtggtttatcacccaaaaactattttcttcattcctttttcctacctgctgctttcttctgtttcagattgatgtacagctatatattttgtcctttctttcacctcatgatctgtgtcagttgggaagtacaaatcattattggaatgaaactgtaagagatccaattctgtggagatactttttgttgagggatcttccttcttggtcttctgttgactggaagtctcttccagatctagaaatcttaaaaaagcctatatctgaggtcactgatggtgcattttttgactacatggcagtgtaagtatctagttttatgaattaaaaagaagctattaaattttcctgt

SEQ ID NO: 10737 - protein, 161 aa, Homo sapiens
MAGSEPRSGTNSPPPPFSDWGRLEAAILSGWKTFWQSVSKERVARTTSREEVDEAASTLTRLPVSVGRRPRRTVGPARAGGTSPGAPRGLGNSRAPAWVWLRPCSHSWQCSHREATVDQKRLGVDPGAPQGARTSQGSTFMGPLGTLPIALRFSTRQNRHM

SEQ ID NO: 10738 - DNA, 1834 bp, Homo sapiens
  CDS (61)..(1452)
gcgagcaacaggccgtgccgggtttgcatttccttactgctttgtcttgaagacagaacgatgccaaagaaagcaaagcctacagggagtgggaaggaagaggggccggctccctgtaagcagatgaagttagaagcagctggggggccttcagctttaaactttgacagtcccagtagtctctttgaaagtttaatctcgcccatcaagacagagacttttttcaaggaattctgggagcagaagccccttctcattcagagagatgaccctgcactggccacatactatgggtccctgttcaagctaacagatctgaagagtctgtgcagccgggggatgtactatggaagagatgtgaatgtctgccggtgtgtcaatgggaagaagaaggttttaaataaagatggcaaagcacactttcttcagctgagaaaagattttgatcagaaaagggcaacgattcagtttcaccaacctcagagatttaaggatgagctttggaggatccaggagaagctggaatgttactttagctccttggttggctcgaatgtgtacataactcccgcaggatctcagggcctgccgccccattatgatgatgtcgaggttttcatcctgcagctggagggagagaaacactggcgcctctaccaccccactgtgcccctggcacgagagtacagcgtggaggccgaggaaaggatcggcaggccggtgcatgagtttatgctgaagccgggtgatttgttgtactttcccagaggaaccattcatcaagcggacactcctgcggggctggcccactcgactcacgtgaccatcagcacctaccagaacaattcatggggagatttccttttggataccatctcggggcttgtatttgatactgcaaaggaagacgtggagttacggaccggcataccccggcagctgctcctggtggaatccacaactgttgctacaagacgattaagtggcttcctgaggacacttgcagaccggctggagggcaccaaagaactgctttcctcagacatgaagaaggattttattatgcacagactccccccttactctgcgggagatggggcagagctgtcaacaccaggtggaaagttaccgaggctggacagtgtagtgagactgcagtttaaagaccacattgtcctcacagtactgccggatcaagatcaatctgatgaaactcaagaaaagatggtgtacatctatcattccttaaagaatagtagagagacacacatgatgggaaatgaggaggaaacagagtttcatggacttcgcttccctttgtcacatttggatgcactgaagcaaatttggaatagtccagctatttctgtcaaggacctgaaacttactacagatgaggaaaaggaaagcctggtattatccctctggacagaatgtttaattcaagtagtctagtgcctttgcagaatcaaatgcctactattttatatgcatatattaaaagaaaagcaaagacctgagccgaggagaggatgaattcaagtttccttacctgcgtatctactaacaaacatgagacctccctgttacaggtggtcagtcggccaaatgtactaacgggcacatgaaagaaagaacagcaaattaccaagtgtctcagaaaatgacaaaaccatattttgacaagtttatttaatccagtgtggtagaaaaggcacaattccaatgtatcatttagaattgaatgtcattaacctggctttgttctttggaagaaacaacttctttaaagagctgctttggctctagaaaaatttcaaacaattaaaataag

SEQ ID NO: 10739 - protein, 464 aa, Homo sapiens
MPKKAKPTGSGKEEGPAPCKQMKLEAAGGPSALNFDSPSSLFESLISPIKTETFFKEFWEQKPLLIQRDDPALATYYGSLFKLTDLKSLCSRGMYYGRDVNVCRCVNGKKKVLNKDGKAHFLQLRKDFDQKRATIQFHQPQRFKDELWRIQEKLECYFSSLVGSNVYITPAGSQGLPPHYDDVEVFILQLEGEKHWRLYHPTVPLAREYSVEAEERIGRPVHEFMLKPGDLLYFPRGTIHQADTPAGLAHSTHVTISTYQNNSWGDFLLDTISGLVFDTAKEDVELRTGIPRQLLLVESTTVATRRLSGFLRTLADRLEGTKELLSSDMKKDFIMHRLPPYSAGDGAELSTPGGKLPRLDSVVRLQFKDHIVLTVLPDQDQSDETQEKMVYIYHSLKNSRETHMMGNEEETEFHGLRFPLSHLDALKQIWNSPAISVKDLKLTTDEEKESLVLSLWTECLIQVV

SEQ ID NO: 10740 - DNA, 1499 bp, Homo sapiens
  CDS (6)..(641)
tacacatgagcctcctccggcagaaaatagcccagctggaggaggagaagcaggcacgcacggccttggtggttgagagggacaacgcgcatcttaccatcaggaacttgcagaagaaggtggagaggctgcagaaagagctgaacacgtgtcgagacttgcacaccgagctcaaagccaaactggccgacaccaatgaactgaagattaaaactttggaacagactaaagccattgaagatctaaacaaatccagagaccaactggagaagatgaaggagaaagctgagaaaaagctcatgtctatcaagtcagaactggataccacagaacatgaggctaaggagaataaagaaagggccagaaacatgatagaagtggtaaccagtgaaatgaagacactaaaaaaatctctggaagaagcagaaaagagagaaaagcagctggcagacttcagggaggtggtgtcgcagatgctaggcttgaacgtgaccagccttgctcttcctgattatgaaatcatcaagtgtcttgaaagattgatccattcacatcagcatcactttgttacctgtgcctgcctcaaagatgtgactactgggcaagagaggcacccacaaggccatttacagcttcttcattgaacactgtatctcttgagagaggtggccataagacatggcacacaattcccaatttcacaaattcctcctgtctttgagatttgatcagtttgtgaatattttatgctttgatgatatagtgagaatgcatcacttgcaaaaacgatctcaaaagtgtcagccttagataaacgttcagcattaaaaacgcctattatttcatttactagcattttaggatccagaagaattccaccagattgcatgagttagattgggaaatgggagtgggagataacattgggaggtatctattttaagtcaggggctttactagccgatttagttctcacaataaccatgtggagaagctgtgacatttttaatttacaacctttctggggctcagacataaagttacctatccaaggttgcagttgggtagtggtgggaccaggatggacaactcattggccctgcctcaaaagccatacctcttctcctgctacgcagaatctgtttctcctgaatctctgtgatgctggtgggaattgtttgcatagaggaaggacaataaccctgccattgtgagttaatgtccgggctggtcatagtggttcatgcctgtaatcccagcactttgggagtccaaggcaggcatatcatttgaggtcaggagtttaagaccagcctggctaacatagtgagaccctgtttctactaaaaatacaaaaataagccaggtgtggtggtgcatgactgtaatcccaactactcagcaggagaagcacttgaacccaggagacggaggcggcagtgagccaagattgtgccactgcactccagcctgggcgacagagtgaaactacatctcag

SEQ ID NO: 10741 - protein, 212 aa, Homo sapiens [sequence omitted]

SEQ ID NO: 10742 - DNA, 2213 bp, Homo sapiens
  CDS (977)..(1864)
attcctcgagcactgttggcctactggaatcgagtcggccttgttggcctactgggcggcgcttcctagttcggctggttcttctgtcgccggcttcagcagcccgcgcccgggcaggtaaggcattccccgccttaatgcctcggtcaaacgtcgtccgaggtccgcttccaggcctcggcacctctgccccagggttgctggggtcggctgcggaacggaaatctctttatcatccgtgagaaaagttagagaggaagtgggttcctttgacagagcttactccagaagaaagacttgggtaggtccccggtaatcaagaagttcgtcggccctgaggaagagcctgaggcttggagggacgtcacccagctgttctggggcgcagtcggacctcaagtttctcacctctcaggccctggattccgtgaacccgactgcgaaatgaagtctcttttccccagaaccaggaagtcaggccagcacctgacagatgcctgtggcgccagcagctcgctgagcctccacacgattgtaattcgcttgtttctccggcctccaagcttccagggaattagaaagtggaggcggcttatgggatcagatgagtacattcgcagatgggggaaaaaagtgtacctgtcagcttggaagccagagggagacaaagggataaaagcaaaccctgtccaggggcctggagcagtatctagcacaaagtagacactcagtaaatatttggaatagaagatgaacaaacccataacaccatcaacatatgtgcgctgcctcaatgttggactaattaggaagctgtcagattttattgatcctcaagaaggatggaagaagttagctgtagctattaaaaaaccatctggtgatgatagatacaatcagtttcacataagatgctgttcccaaaactgctaatacactaccttctaaagaagctataacagttcagcaaaaacagatgcctttctgtgacaaagacaggacattgatgacacctgtgcagaatcttgaacaaagctatatgccacctgactcctcaagtccagaaaataaaagtttagaagttagtgatacacgttttcacagtttttcattttatgaattgaagaatgtcacaaataactttgatgaacgacccatttctgttggtggtaataaaatgggagagggaggatttggagttgtatataaaggctacgtaaataacacaactgtggcagtgaagaagcttgcagcaatggttgacattactactgaagaactgaaacagcagtttgatcaagaaataaaagtaatggcaaagtgtcaacatgaaaacttagtagaactacttggtttctcaagtgatggagatgacctctgcttagtatatgtttacatgcctaacggttcattgctagacagactctcttgcttggatggtactccaccactttcttggcacatgagatgcaagattgctcagggtgcagctaatggcatcaattttctacatgaaaatcatcatattcatagagatattaaaagtgcaaatatcttactggatgaagcttttactgctaaaatatctgactttggccttgcacgggcttctgagaagtttgcccagacagtcatgactagcagaattgtgggaacaacagcttatatggcaccagaagctttgcgtggagaaataacacccaaatctgatatttacagctttggtgtggttttactagaaataataactggacttccagctgtggatgaacaccgtgaacctcagttattgctagatattaaagaagaaaaaaaaaaaaaaaaaggccacatgtgctcgagctgcaggtcgcggccgctagactagtctagagaaaaaacctcccacacctccccctgaacctgaaacataaaatgaatgcaattgttgttgttaacttgtttattgcagcttataatggttacaaataaagcaatagcatcacaaatttcacaaataaagcatttttttcactgcattctagttgtggtttgtccaaactcatcaatgtatcttatcatgtctggatccccgggtaccgagctcgaattaattcctcttccgcttcctcgctcactgactcgctgcgctcggtcgttcggctgcggcgagcggtatcagctcactcaaaggcggtaatacggttatccacagaatcaggggataacgcagg

SEQ ID NO: 10743 - protein, 296 aa, Homo sapiens
MPFCDKDRTLMTPVQNLEQSYMPPDSSSPENKSLEVSDTRFHSFSFYELKNVTNNFDERPISVGGNKMGEGGFGVVYKGYVNNTTVAVKKLAAMVDITTEELKQQFDQEIKVMAKCQHENLVELLGFSSDGDDLCLVYVYMPNGSLLDRLSCLDGTPPLSWHMRCKIAQGAANGINFLHENHHIHRDIKSANILLDEAFTAKISDFGLARASEKFAQTVMTSRIVGTTAYMAPEALRGEITPKSDIYSFGVVLLEIITGLPAVDEHREPQLLLDIKEEKKKKKGHMCSSCRSRPLD

SEQ ID NO: 10744 - DNA, 1601 bp, Homo sapiens
  CDS (208)..(1119)
cctttgcgcgccgggttaatgggcggtaatttggtacccttgggtgcactttgttttgcccctgttcatttgaatgcaaatgggtgacccgggcccgactaggtgcttattaaattgcagttttcccccctgccttttccggaatgcagacttagaggagagaggctgcgccctggcccagcctggctcggctcagctccgcgcgccatggcaagctcggcttccctggagaccatggtgcccccggcctgcccgcgcgccggagcgttgccggccacttccaagacactggccttttccatcgagcgcatcatggccaagacgtcggagccccgtgcgccctttgagccccggcctggagcgctagaggcggacggcagccagggcaagaaactgctcaacctctgctcgccgctgccctgtatgatccccctccagcccctaggctacgaggtgccgtcaaagacactgctcagttactcggagctctggaaaagcagcctccgggcgggcggcggcggaggcggcggcggcggtggcggcggcggcggcgggggggccccagtgtgcggcgccagcggcttgtgcaaaaccaactgtggcgtgtgctgcaaggccgagctgggcctggcgccgtccgcgctgcccgcgggcagggtcatcaagccgcaggtcatcaaccaggctgtggggctgccggccagcggctcgctctactacttcaactacctggactcgaccgcgtacccgccgtctgagctcctcagcggccacctcttcccgtctggcctcctcaatgcgcaggcccccgccgccctggctgctcaccccaagctctttctgctggagaacgccaagctggccggcctggctgcggacaagttcccccacccggctccctatccccataaggagcgcttgccggcgccgctggagcaggtactgaaggaaaactcggccctgactgccgagcgcggaggcgtcaagggccacagcaagctgccaggaggctccgcagatggcaagcccaaaaacttcacctgcgaggtgtgcggcaaggtgtttaacgctcactataatctcacccgccacttgcggcaaagggttttgcagaaactttgacttaaagaaacatgtgcgcaaactccacgacagcgtgggccctgctgccccctccgcaaaggacctgactaggacagtgcagagctgagagctactgccttgcccttccttccctccctgtaccacctgaaaacagatcacacatataaacttatttctaaaattaaaagaaaaaaaaactatagcagagaggctaaaatctatttatcgaaaccagcatatttttggaaagctaaatgtttcctcgatgactggcagcaaactcgtggcccccacctttgtatattcaggaaacttatttaaatccagtgcgccgaaacgtatttaattccaggcctccgcttctcctggggcagccagttttaaccccagcctgtcaccgtgagcgccccagaagagcgcggcgcccctagccatctttatacagccatgtaaatcctcctgtacaagcgaacacggaatatatacatatataactc

SEQ ID NO: 10745 - protein, 304 aa, Homo sapiens
MASSASLETMVPPACPRAGALPATSKTLAFSIERIMAKTSEPRAPFEPRPGALEADGSQGKKLLNLCSPLPCMIPLQPLGYEVPSKTLLSYSELWKSSLRAGGGGGGGGGGGGGGGGAPVCGASGLCKTNCGVCCKAELGLAPSALPAGRVIKPQVINQAVGLPASGSLYYFNYLDSTAYPPSELLSGHLFPSGLLNAQAPAALAAHPKLFLLENAKLAGLAADKFPHPAPYPHKERLPAPLEQVLKENSALTAERGGVKGHSKLPGGSADGKPKNFTCEVCGKVFNAHYNLTRHLRQRVLQKL

SEQ ID NO: 10746 - DNA, 1694 bp, Homo sapiens
  CDS (143)..(1546)
agcagagggaacagggaagaaacctaaaggctgcaggctgccaggtgtgcttggagagcccccttcttccgccgggcctcgcaagcagcgtaggactgtggagaagggcggtgggcaaggagggaactcgagagcagcctccatgggcacacaggagggctggtgcctgctgctctgcctggctctatctggagcagcagaaaccaagccccacccagcagaggggcagtggcgggcagtggacgtggtcctagactgcttcctggcgaaggacggtgcgcaccgtggagctctcgccagcagtgaggacagggcaagggcctcccttgtgctgaagcaggtgccagtgctggacgatggctccctggaggacttcaccgatttccaagggggcacactggcccaagatgacccacctattatctttgaggcctcagtggacctggtccagattccccaggccgaggccttgctccatgctgactgcagtgggaaggaggtgacctgtgagatctcccgctactttctccagatgacagagaccactgttaagacagcagcttggttcatggccaacgtgcaggtctctggacggggacctagcatctccttggtgatgaagactcccagggtcgccaagaatgaggcgctctggcacccgacgctgaacttgccactgagcccccaggggactgtgcgaactgcagtggagttccaggtgatgacacagacccaatccctgagcttcctgctggggtcctcagcctccttggactgtggcttctccatggcaccgggcttggacctcatcagtgtggagtggcgactgcagcacaagggcaggggtcagttggtgtacagctggaccgcagggcaggggcaggctgtgcggaagggcgctaccctggagcctgcacaactgggcatggccagggatgcctccctcaccctgcccggcctcactatacaggacgaggggacctacatttgccagatcaccacctctctgtaccgagctcagcagatcatccagctcaacatccaagcttcccctaaagtacgactgagcttggcaaacgaagctctgctgcccaccctcatctgcgacattgctggctattaccctctggatgtggtggtgacgtggacccgagaggagctgggtggatccccagcccaagtctctggtgcctccttctccagcctcaggcaaagcgtggcaggcacctacagcatctcctcctctctcaccgcagaacctggctctgcaggtgccacttacacctgccaggtcacacacatctctctggaggagccccttggggccagcacccaggttgtcccaccagagcggagaacagccttgggagtcatctttgccagcagtctcttccttcttgcactgatgttcctggggcttcagagacggcaagcacctacaggacttgggctgcttcaggctgaacgctgggagaccacttcctgtgctgacacacagagctcccatctccatgaagaccgcacagcgcgtgtaagccagcccagctgacctaaagcgacatgagactactagaaagaaacgacacccttccccaagcccccacagctactccaacccaaacaacaaccaagccagtttaatggtaggaatttgtattttttgcctttgttcagaatacatgacattggtaaat

SEQ ID NO: 10747 - protein, 468 aa, Homo sapiens
MGTQEGWCLLLCLALSGAAETKPHPAEGQWRAVDVVLDCFLAKDGAHRGALASSEDRARASLVLKQVPVLDDGSLEDFTDFQGGTLAQDDPPIIFEASVDLVQIPQAEALLHADCSGKEVTCEISRYFLQMTETTVKTAAWFMANVQVSGRGPSISLVMKTPRVAKNEALWHPTLNLPLSPQGTVRTAVEFQVMTQTQSLSFLLGSSASLDCGFSMAPGLDLISVEWRLQHKGRGQLVYSWTAGQGQAVRKGATLEPAQLGMARDASLTLPGLTIQDEGTYICQITTSLYRAQQIIQLNIQASPKVRLSLANEALLPTLICDIAGYYPLDVVVTWTREELGGSPAQVSGASFSSLRQSVAGTYSISSSLTAEPGSAGATYTCQVTHISLEEPLGASTQVVPPERRTALGVIFASSLFLLALMFLGLQRRQAPTGLGLLQAERWETTSCADTQSSHLHEDRTARVSQPS

SEQ ID NO: 10748 - DNA, 2317 bp, Homo sapiens
  CDS (476)..(1507)
agtgctagctcgccgcggccgcctccggggaccacctggcttcatgtgtggatttccacggctcttgcccagaggcgggtacactgtgttccaatgtgccacggaactcacgcagtggcactttgtggcttcatgaaggaagaggcaggccacgcaacacttcctccccaagccaaggagaagtatcacttttagaggcagaggagcggaaggcagtgggtgtgaccaaaagtgccatttgttaaagcttatcttccttgccagattttaaaaactattatggaaaatctcaagcattcacaaaagtagagagaaagaaaggactctcagactgttggagcagaactactgagaaaaaccaggcattgtatcttcagttgtcatcaagttcgcaatcagattggaaaagctcaacttgaagctttcttgcctgcagtgaagcagagagatagatattattcacgtaataaaaaacatgggcttcaacctgactttccacctttcctacaaattccgattactgttgctgttgactttgtgcctgacagtggctgggtgggccaccagtaactacttcgtgggtgccattcaagagattcctaaagcaaaggagttcatggctaatttccataagaccctcattttggggaagggaaaaactctgactaatgaagcatccacgaagaaggtagaacttgacaactgcccttctgtgtctccttacctcagaggccagagcaagctcattttcaaaccagatctcactttggaagaggtacaggcagaaaatcccaaagtgtccagaggccggtatcgccctcaggaatgtaaagctttacagagggtcgccatcctcgttccccaccggaacagagagaaacacctgatgtacctgctggaacatctgcatcccttcctgcagaggcagcagctggattatggcatctacgtcatccaccaggctgaaggtaaaaagtttaatcgagccaaactcttgaatgtgggctatctagaagccctcaaggaagaaaattgggactgctttatattccacgatgtggacctggtacccgagaatgactttaacctttacaagtgtgaggagcatcccaagcatctggtggttggcaggaacagcactgggtacaggttacgttacagtggatattttgggggtgttactgccctaagcagagagcagtttttcaaggtgaatggattctctaacaactactggggatggggaggcgaagacgatgacctcagactcagggttgagctccaaagaatgaaaatttcccggcccctgcctgaagtgggtaaatatacaatggtcttccacactagagacaaaggcaatgaggtgaacgcagaacggatgaagctcttacaccaagtgtcacgagtctggagaacagatgggttgagtagttgttcttataaattagtatctgtggaacacaatcctttatatatcaacatcacagtggatttctggtttggtgcatgaccctggatcttttggtgatgtttggaagaactgattctttgtttgcaataattttggcctagagacttcaaatagtagcacacattaagaacctgttacagctcattgttgagctgaatttttcctttttgtattttcttagcagagctcctggtgatgtagagtataaaacagttgtaacaagacagctttcttagtcattttgatcatgagggttaaatattgtaatatggatacttgaaggactttatataaaaggatgactcaaaggataaaatgaacgctatttgaggactctggttgaaggagatttatttaaatttgaagtaatatattatgggataaaaggccacaggaaataagactgctgaatgtctgagagaaccagagttgttctcgtccaaggtagaaaggtacgaagatacaatactgttattcatttatcctgtacaatcatctgtgaagtggtggtgtcaggtgagaaggcgtccacaaaagaggggagaaaaggcgacgaatcaggacacagtgaacttgggaatgaagaggtagcaggagggtggagtgtcggctgcaaaggcagcagtagctgagctggttgcagctgctgatagccttcaggggaggacctgcccaggtatgccttccagtgatgcccaccagagaatacattctctattagtttttaaagagtttttgtaaaatgattttgtacaagtaggatatgaattagcagtttacaagtttacatattaactaataataaatatgtctatcaaatacctctgtagtaaaatgtgaaaaagc

SEQ ID NO: 10749 - protein, 344 aa, Homo sapiens [sequence omitted]

SEQ ID NO: 10750 - DNA, 1723 bp, Homo sapiens
  CDS (242)..(865)
cgacgctccacagctcgccgcggccggggggcggtgcgcggaccgtgcgcgccgcgggcgccagatgtgcagtccccgccgccgccagtgaccgagccgcagtccgagcggtatcgggccgcctccctgatgctgcgggggcgaccttgagcgtacagcggcttccctcggtggggaccccgacatcccagcgctgtgcccggtcttgccctctgtagcccggttcgccccgcgcttggacatggaaggggccgccgcgcctgtggcgggggaccgccccgacttggggctgggggcgccgggctctccccgagaggcggtggcgggggcgactgcagccctggagcccaggaagccgcacggggtgaagcggcatcaccacaagcacaacttgaagcaccgctacgagctgcaggagaccctgggcaaaggcacctacggcaaagtcaagcgggccaccgagaggttttctggccgagtggttgctataaaatccgttcgtaaggacaaaattaaggatgaacaagacatggttcacatcagacgagagattgagatcatgtcatctctcaaccatcctcatatcatcagtatttatgaagtgtttgagaacaaagataagattgtgatcatcatggaatatgccagcaaaggggagctgtacgattacatcagtgagcggcgacgcctcagtgagagggagacccggcacttcttccggcagatcgtctctgctgtgcactattgtcacaagaacggtgtggtccaccgggacttgaagctgaaaaagaccagcagagagaatcaggttactactcttccccagagcgcagtgagtcttcggagctgttggacagtaatgatgtgatgggcagcagcatcccctcccccagccccccggacccagccagggtaacctcccacagcctctcctgccggaggaagggcatcttgaaacacagcagcaaatactcagcgggcaccatggacccagccctggtcctctccttacttctgtgggccttgcaccgtcttagtttacacatctgccaaaggggtagaattacacttctttttacaggtaaatgtcaaggcacaatcagttttcaggaagtgcttcaagaccccaggtgaaatgaaaatgctaagtaccctctgaatggccatgcctgttaccaggtgctgcttcttcagatgatggggagcacttttcagggtgaaattcaggcgagttttgcccaggcctgctgtcttgagtacaaatgtgaatgatcgactgactgcttgttgccaaactggaaatgttctgtagggatttactggcatggtatcattcctagaagaaaaaaagagagaaacttgactgcacattaaaaaaaaaaaaaaatccacattgtgacttttatttaatttctattttttttggtaataaaaagttgacttttttatttgaatttgtcttttttatttattggtctgaaaggcatttcaaaggtattataataatatattggtgtaatttaattggtgcaacatgctttatggctcctgtcaaaattggttttcactcatttgattggtttgagcccagaacagcctacaggggaaagacaagctggataaccacccaaagtgtttgtattttcgttggaaactgatttttgtttcattttggtttttgtttctgtttttatttttaaattaaataaattgcaatgaactg

SEQ ID NO: 10751 - protein, 208 aa, Homo sapiens [sequence omitted]

SEQ ID NO: 10752 - DNA, 1721 bp, Homo sapiens
accatcatgttaccatattcttgccaaaaaaaaaaaaaaaaaaaaaaaaacaccagagtcgttacatgaagtatctttgatcactgaatttccagcacttctttgttgtgtctagatgctaagcccttttctaatttgaaaaaaaaaaaaaaacaaaaaactggagacctgattctgtttatctcttgtagtttctcttatctctgtttctaaccactctatgtagtgcctctttttttctgtctacacacacacggagcatccaccataccaataatcacagtatgtggtaatgaaaagtggaagggaaaaatggcccttgcttctcacagacaaactcactatctcaatggatcatttttgtttttttgttttgttttgtttttgagacagtctcactctgttgcgcaggctggagtgcagtagtgcaatcttagctcactacaacctctgcccccgggttcaagcaattctcctgcctcagcctcctgagtagctgggattacggcacctgccaccatgccctgctaatttttgtttttttagtagagatagggtttcaccatgttggccaggctggtctcgaactcctgacctcaagtgatctgcccgcctcggcctcccaaagtgctgaaattacaggcatgagccacagcgccccgcctcaatggatcctgatgagctacgcaaaccattatttttatgtctttacgaatgccaccagaaagtttcattttgttctttctgaaaacaaccatgattataagatgtcttctgaaacacggaagtgagagaacatgttgtacagagaagcatgcatccctctgccctgccaccactgcacctatgctaagcatattatagacagaaggatgtccatctgcctatgtaagctcttgcccgtttattcttgggctctgtccaggctgtgaccctattactcctttgctccttcatttgaggactatgactgtgaactgtatttcttcctctctgcacctatataggctacaggaggaagtaacaaaaatcttcccccacacccagagctaaatattttttgccccaagctgaaagttctctagtgaaaatgcagttcaaggccatagatgcaggagagaagtagatttgttggcttctaaaaggaatatctatacagatttgtctaacagcaccatcctaacagcattctgatttgttttattttccatttttaatacctttgttgatgtgtaatttacatacagtaaactacacacttaatgtatacaatattataagtttttatgtacatgtgtactcgagaaaccatcaccactatcaagataataaacatccatcaccccttggagaaatcacgttgcaatccctctcttgtgcccctacctacattctccgttctaaggaactgctgatcttctttctgtctctgtagattagtttgcattttctagaattttatataaatggagccatataatatgtactctttttttggtctggattctttccatcaacataattatcttgagatttatccattttttgcatgtttcaatagtttatgcctttttattgctcaacagtattccattgtatgtatataccacagactgtttatccatttgcctgtagatggatatttgggttgtttctagttttgttgttgttgttgttgttgttgttaccaataaagctgctgtgaacatttggcaccagtc

SEQ ID NO: 10753 - DNA, 2283 bp, Homo sapiens
aacaaacatgcagacagtcttacagctgcagttgcctgagccttaagggccttgctactcaaagtgtggtcctcggaccgccagcatcagcatcacctgggagcttgttagagaaaacaaatctcagacctcaccgaccccacggaatcactatctgcattttaacgacatctccaggtgattcatctgcacacaagttcaaccacaggctgaccatttagagaagctggacttgagtgggattttgcagtttttccttttgatggcctcctcccctttgcttcccctcctacccttctgactccttgtagcttattttagaacatgtcgggatcctgcttctcttgtcaacaaaaggctgttgttaaaatctttcagccggcagcagcaatgtttaattcatggactagaaaattaattttattttcatgaatagagctgaggaaaaatagcaaggagactctgtgcatggcccttgggaatccagcttgtctatttaacagatgaactggcaacagtggggaggcctgaggggagggctgccttctacaaacttgtgtagcaaattgtattaggatgcttttggctgcaggtatcacaaaattcagcttcaaatggcttaaaagaaaaggaaaatttctaatttcactgataaaaaatcttgagatagggtacttttaggatgacccagaaatgccatcaaatagcaggtttgttttctgccatggtggcttgttgcattcagttttcctcatggttacaaggtggccgccagagttccgggcagcacatggagtcaatgtcctatggaaggagaaagaggctgcccctccctgaagtttcattttatcagagacaaaatctttcctggttacctcacagctgatcctcacagctggtgtcctcttaaatctcacttgtggccgggtaatggctcatgcctgtaaccccaccactttgggagactgaggtgggtggatcgcttgaggccaggagttccagaccagcctggccaacataacgaagccccttctctactaaaaatacaaaaattagctgggagtgatcgtgaacacttgtaatcccagttactcgggaggctgaagcacgagaattgcttgaacccaggaggcggaggttgcagtgagccgagatcatgccgctgcactccagcctgggtgacggagcgagactgtcataaaaaagattttaaaaaaagtctcacatgtaggattgtgtcatgcgtcccttggtaaaccagtcattgggaaggggatggattactatgggtggctcagcctgatcagggttggacactttcttcatctgttgaggatactataacagagtaccacaaactgggtgacttttaaatggaagaggaagaaatttatttctgagttctggaggctgggaagtccatgaacaatgcatcggtagattggcggctggtaaggacccacttccttattcatatatggtgccttctttctgtgtcttcacatggcaaaaggggtgaagggtctcttctctctccagccttttaaaaagtattgattgattgattgattgtctgacagggtcttgttctgtctcctaggctggagtacagtggtgcactcacagcttactctaaccacgaactcctgaactcaagggatccttctaccccagcctcccaagtagctaggactacagaggcatgctaccatacctggttaattttttacgttattatttttgtagagaatgagggtctttttatgttgtccaggctggtctcaaactcctagcctcaaatgatccttccacttcagcctcccaaagtgttgggcttacaggcatgagtcactgagtctagcccaccagccttttcttagtgccttagagggcactaatcccattcctgatggttccatcctcatgacctaattacctccccaaagccccacctcctaataccaacaccttgaaggtaaggatttcaacataggaattttggagggaagacaaacattcagaccacagcagccactgagtcacatgaggcaagggcaaaagagccaaatgaaacagaggctctggctcgaaggaagcggagggcgtggctgctgagacagccaacacctcttccaaggccttccttggtgttgcctccattccctggaaaggtctggctcctgtgttttacatttcagtgtgctcttcccagtagagcggtaggttactctgggcacagggaatttttaaacacccttgtgggagggttcctggaactgaatt

SEQ ID NO: 10754 - DNA, 1587 bp, Homo sapiens
  CDS (88)..(1374)
gtggctgtactggcggcggcagggctggcggcttaggccgcagaggtctgtgggcctgagcccacgctggactctgtccgttctgcgatgactgctgctctggccgtcgtcacgacgtcgggtttggaagatggggtgcctaggtcccgtggcgaagggaccggggaagtggtcttggagcgggggcccggcgcggcctaccacatgttcgtggtgatggaggacttggtggagaagctgaagctgctccgctacgaggaggagttcctccggaagagcaacctgaaggccccgtccagacactattttgcactgcctaccaaccctggcgaacagttctacatgttttgtactcttgctgcttggttgattaataaagcgggacgtccctttgagcagcctcaagaatatgatgaccctaatgcaacaatatctaacatactatccgagcttcggtcatttggaagaactgcagattttcctccttcaaaattaaagtcaggttatggagaacatgtatgctatgttcttgattgcttcgctgaagaagcattgaaatatattggtttcacctggaaaaggccaatatacccagtagaagaattagaagaagaaagcgttgcagaagatgatgcagaattaacattaaataaagtggatgaagaatttgtggaagaagagacagataatgaagaaaactttattgatctcaacgttttaaaggcccagacatatcacttggatatgaacgagactgccaaacaagaagatattttggaatccacaacagatgctgcagaatggagcctagaagtggaacgtgtactaccgcaactgaaagtcacgattaggactgacaataaggattggagaatccatgttgaccaaatgcaccagcacagaagtggaattgaatctgctctaaaggagaccaagggatttttggacaaactccataatgaaattactaggactttggaaaagatcagcagccgagaaaagtacatcaacaatcagcttgagaatttggttcaagaatatcgtgcagctcaagcccagctgagtgaggcaaaggagcgataccagcagggaaatggaggagtgacggaaagaaccagactcctctctgaggttatggaagaattagaaaaggtaaaacaagaaatggaagaaaagggcagcagcatgactgatggtgctcctttggtgaagattaaacagagcttaacaaaactgaagcaagaaactgtagagatggacattagaattggcattgtggaacacacactactccaatcaaagctgaaggagaagtccaacatgactaggaacatgcatgccacagttattccagaaccagcaacaggcttttattaaaacatactggttttcatgtttctgattagttgggttttttatatcaaactatatttcatgttgcatagatttcaaaacataattttatgttcaatgggtatttttttacatatacatactcacatattatatcatggtgattatgatggttaaagcctttacactgaatgtaatgtttaataaagaaattacaaattctcactttctaag

SEQ ID NO: 10755 - protein, 429 aa, Homo sapiens
MTAALAVVTTSGLEDGVPRSRGEGTGEVVLERGPGAAYHMFVVMEDLVEKLKLLRYEEEFLRKSNLKAPSRHYFALPTNPGEQFYMFCTLAAWLINKAGRPFEQPQEYDDPNATISNILSELRSFGRTADFPPSKLKSGYGEHVCYVLDCFAEEALKYIGFTWKRPIYPVEELEEESVAEDDAELTLNKVDEEFVEEETDNEENFIDLNVLKAQTYHLDMNETAKQEDILESTTDAAEWSLEVERVLPQLKVTIRTDNKDWRIHVDQMHQHRSGIESALKETKGFLDKLHNEITRTLEKISSREKYINNQLENLVQEYRAAQAQLSEAKERYQQGNGGVTERTRLLSEVMEELEKVKQEMEEKGSSMTDGAPLVKIKQSLTKLKQETVEMDIRIGIVEHTLLQSKLKEKSNMTRNMHATVIPEPATGFY

SEQ ID NO: 10756 - DNA, 1420 bp, Homo sapiens
aaggttatgtgtgatcgggtgtgggagagacactctttggggctctgtatgggacattgagagaccgtatgtgggagtgagagaccgtgtgtgacggtgcgtgtgagggggcagtgtgtgtggctgtgtgcaacatggtgagcatacggtgctgtgtgtgtcacagaagtagattctgtgtgagagagagtgagactgatgactgatgtacactgagaggtggtgtgggcaggtgtcatgagaggcacatagggggcctgggtgggacagacacagtgagtgtcagacagtctgtgttggccactctgtgtatggcttgtgaaaaagtgcgtgatccgggcacattgctgtaatcccagcactttgggtggctgaggcgggaggatcccttgaggccaggagtttgagatcagcctgggcaacatagggagacccctccccccacccccgccgtctctaccaaaataaaaataaaagaaattaaccaggtgcggttatgtacctctgtggtcccagctactgggaggctgaggttggaggatcgcttgagcctgggaagtggaggctgcagtgagctaagatcgtgccactgcactccagcctgggtgacagagagagagaccttgtctcaaaaaacaaaacaaaactgcgtgactatgtgtgacactgagctggtgagagatggcagcgttgtgacagtgcatgcgagagtttgcggctgtgcagggcactcggaagcgagagcgtgagggaggccttgtgtgtagaaggcaagagatgatggagaggtgggagtgagtgtgtgaaacgctgcgagcttgtgtgggactctgtgagacactgagccatcgtgggtagctaggtatgacaccaggagatgggttgcgtgcgtgtgtgtgacagggacagactgtgtatggagggaatgtgtcagatgcgtgtgacaccaggagactgtgagagaatgtatgtgaccttccatggttgtcgctggacaggcgactgggtgttactatgaaatactataaaacagtgtgtacttgacaggttgtattgggtaattgcatgccaccgtgagacacagaaagtgtgagactgggacagggtgtgagattgagagagtttaaatggcatgcaaggccaggcgcggtggctcacgcctgtaatcccagcactttgggaggccgaggcgggtggatgacctgaggtcaggagttcaagaccagcctggccaacattgtgagaccctgtctctacgaaaaatacaaaaatcagacgggcgtggtgtcaggcacctgtaatcccagctactcaggaggctgaggcaggagaatggcttgaacccaggaggcggaggttgcagagagctgagattgggccactgcactccagcctgggcaacacagggagacttcatctc

SEQ ID NO: 10757 - DNA, 1976 bp, Homo sapiens
tgtacaagagatcattgtcatcctgggtgttctttgtattcttcatactagaaatccataacacgccaaatgcccttagaaccatggacagcacccaggttttacaaatgtcttctccaggcttcagaaggaaggtggtggacattctttccatcatgacacaaaccaacaattacataccaggctttgttggtgagaaagcaaggtggcccacctggagatttatgccgaaacaaccactttacaacacaacccacggagtccttgacgttggcttggtttgtcaatcccaccacctcataccatttagaaacttatcagctatttctagataactgggtgttttagtttcctgtagataaaactgaaggctaaattgaatatatgactaagttatttactatgaggaatcttagtccaggaaaacctctcaaaatacacaaatgtctgagagatgtaatatatttaattaatcccttactccttttatttttattttttattttttcagagacaaggtcttgctttgacacccaggctggagtgcagtagtgcaatcagaggtcattacagcctccaactcctgggcttaagtgatcctcctgcctcatcctcccaagcagctggagctacaagtgtgcaccatcatgcctggcccctttattcctaaacgtttcttcatgaaggaagatacaaatttacatgagcccatgctcttcacatgggtaaggggaaaacagagagaactcacagggcacccacatattgtgctttatcatttgacctaggaacagtcttgaataggcagcttgggtttctactcccagaaaatactttgacatacattaatttattcacttaaaactcattatttcctgggtttccatgcagtgtctctgaaaaacattctcaaaatctcactaaaaatgggatccgttagatcaattcaagaatagataaaaccaaaacagaacaaaaataccagcagaaccaaaggtaactcaaagatgctgcaccagtgtagttagcacactcaattcagttcaattcaatttgtaaaaataaagttagaagggttcttaaataactttgaccttaaataacaacattcagtctttaatccagtttgagtgtttgtcgaggaatcctgccataaaaatgtttgactctctgtaattggtggttgggaagattagaaagagaaccaaaatgtgaggaattcaaccaaacatcaagataaatcaactcagggccaggagtatttgtgccatgcctgctcagagccgctatggacaagctcagtttgttagttcagctctttgaagcatgatatgtagacacacttgcatgttcacacacattgtttgctaaactgtgggaaggtaatcagaagagaagagccacgaggttgtcaatctagcatcagaaatttggtggcataggatttctctacaatgctgtccactaaaactttttgtaatgatgaagatatcctatagccaagctgaccaatacaatagacattagtcatatgtgactgttgagcacttgaatatgggtagtgaaattgaagaactgaatttttatttttagattttaattattttaaatttaagtagctgcagatggctaaaattgaatggtgaacttccaggacaaaggatgtttttgccttcaacaatatcggaaaagcaggggtgagtggaatgtcagattgcaatgcaattgcttgtgtttctgcggagttcatggaagaaactcattatactcatttgtaatgcttgatggtaaatttgattttctctttagaatgtagagattaaatcttggtttaaaactgcctctctgtgagcagtttctccatcagtgaaacgggtgtaatttcaactcgttgagagtgctcagttatgcaatatatgcaatgtttcttatctgtgtctgaaaacagttaataaaaggttgctgtgcttgacgct

SEQ ID NO: 10758 - DNA, 1610 bp, Homo sapiens
  CDS (249)..(587)
tataaaaccataataaattacttagactacaatgagcaaaacacatttgtgggtttggtcagcagatactgctctgatttgccattaaaatcttaaaaattcttaaaaagctctcttgaattcgacctctactaccttccaaggaccttggaaagacttaagtatgtgttagaactctcttgaaggcttggtcttcctttagtgacattaacactcaggtttgttattccagtgggcagccccagttcatgcaaactgacctgttgtgtctggtgtccttagactttgatatgcaggccaaagtccaagggatatgcaaacataacacacacctgtacttccataaaaaccagcagaattgtagatcagctcattttactgaaattttaaaccctgtaaaaaaaaaaatactatgtttgaagaaagaaatcctggtgcatataaaaactacaatgagtaacagtaatacaggtaagaatcaagcaggccttgagcaaaacagtccattattactgcgtaaactatgttgctatgatacttattttgagcctttatgcaccagcacatacatagtaagacacacaagatagttcaacaaaatctaagtaatatacaaacactgtaagagcttttccaaccaaagaaactttaatgtagatctgaaatgagccatcatgatacagaaaaagatgattaccatttcgtgtcctttccaagtagaactatctgataaacttttctgtttgtatcagaagagatttcaactcaacatgaaaattctactacttggaattatttgaaaaatcaagtatttgaaggaaaaaattatttttcatctaaagacgcattacatttccttttgctagaaacgattgacaatgatgtaatttttcctgacatataattaattatggtactcttcaggtggatggcagctgtatacctacactcattccaagtcatgttgaagtgagtccagcatttccctttctccagcatccagctatatctaaggagatttttttttccccacaaatgacagtggctgaaatttcatatgtattgttctcttctcacccaaggcaactcttaagaaagaacagtatgtggaatgttgcatgtaaaagatttttgcatactcaaaaaattgctctgacataacaggggcatgcatttaggggatatatggataaactagggaggaaactgacagttattgatggactcacatatcccatagtgaagtaggcattacatatattatttcagaatacctggtatgtttttgcctacaaatcttttatttgattttgaagaaagctattgtataatgtttgaagaccagtccctgtaagtaggactaatgtgtggtggtggcccatagtcttctggatattggtttgtttttgtcatagatttcattaataaatttatttctgccctcaactatatatacaactgagtaagccatttaagaattctgactccttggctgggcatggtggctcatgcctgtaatcccagtactttgggaggccaaggcagccagatcacttgaggtcaggagtttgagaccaacctggccaacatggtgaaactctgtctctacc

SEQ ID NO: 10759 - protein, 113 aa, Homo sapiens
MQTDLLCLVSLDFDMQAKVQGICKHNTHLYFHKNQQNCRSAHFTEILNPVKKKILCLKKEILVHIKTTMSNSNTGKNQAGLEQNSPLLLRKLCCYDTYFEPLCTSTYIVRHTR

SEQ ID NO: 10760 - DNA, 1813 bp, Homo sapiens
acatggaatgatcagaatcgtggaggcaaagctctgtccaaaaatgttcattttgttttgttttgttttgttttcttgtttttaacatttccttcatcctggtgaaatatcctggaaattcatagatctgggtttggtgatttcaaaactcaccatgcccagtggccatttcagttactgccgtgacatccctgaggctaccatactctcaaaaccaaatcaatgccagtgatctaacaggattctttcttatttatgagttttgtttagatggatatttttgcagagcataaaaaattaaatgacatttagttatccattgaatgtatcaccctgacttaaaaaaaaatccttaaatcaaaacttttcaaaaaatctgggctatggagtcactccctctgtggagcgagagcccagtcttttctggtactaaggccacagaggcaatttccagtagcatttttatatcttctctaagtttcttttccttttctgtctgtatctgtttttctctgactgcctatatcttactttgtatacccatacataaattattttcccatcttctctcttcccctttttttctgatttgttttctctcttgcaagaaactctgaaataaccttcagaacacaaaaaactggaggttctatacctacagagtcattatcattattgtgattaccattgttactgttgttggtgtttttcctctttttattgtgtagcaatatccatattcacttctgatgaggcaaacctgtttactataaaccaatgtcctccctaaaggagtcagtttcattttcacttctcacatcaccagttgtatcgcaacccatcttacaaccattgccatgttttcaggcttccttgccataaatgttttctgggcaaataatggcaaagcaacaattccagaatgctgtctagatctgctttctcccaccctcagcatttgaccctcctcattcgcctgagcccccagggttaggatttcttggaaaaacttgtatactgtacctgatggaatgcccattcttcctaactacttagcacaagtgcttgctcatcgtaagtgatctgagggccactaattcctgaagactgacaaagagacacgaagagactaccctcttaagatggggatgcatggttcttcatgcagtgctcttggccaccgagatccttcatccatgccattgcatggatgaatacgtttgatgttggcagttaaaatgggatgggagtgtcaccctgcaggaagtaagaaaagaggatggcaggatctctgatcagggagctggtcaaagcagggctggaaagcttctgtgcttaacaaaatgtgcatgctgtccccaagtaaatgctcatccctaggtttagagctgacctgggttttggggagtttgtatttttaaggaattaaatactcatgagttaaaatactcatgattgcaaagaaggtctggattgcctgaaaaacaaattaattctaagaagctaatatgagtttctcatcatcccttagctcttccttttccctccttttgtcctcactcaaccccagaccctgtgtaataggaacattaatttttaaagacccacagatcaatagccacactcttccactctacaccttttattgacaccaagttatcatcccagaactaatgaagcaagtccagatgctagacgtggccccttaatattgagcaatttgattgcaatcctgcttgtttttgtaagttatctcaactttattcttgtgaaattgcaaaggaagatcaataaaaagacttcatatgaatgt

SEQ ID NO: 10761 - DNA, 1801 bp, Homo sapiens
  CDS (411)..(1799)
agaagatctaggaaagaagattgctttggccttgaacaaagtggatggagccaatgtggctcttaaagactctgaccaagtagcacagagtgatggggaggagagccctgctgctgaagagcagctcttgggagagcacattaaagaggaaaaagaagaatctgaatttctaccctcatctggaggaacatttaatatctctgtcagtggggacattgatggtttaattactcaggctttgctgacgggcaattttgagagtgctgttgacctttgtttacatgataaccgcatggccgatgccattatattggccatagcaggtggacaagtactcttggctcgaacccagaaaaaaatacttcgcaaaatcccaaagcaaaattaccaggctcatcactgcagtggtgatgaagaactggaaagagattgttgagtcttgtgatcttaaaaattggagagaggctttagctgcagtattgacttatgcaaagccggatgaattttcagccctttgtgatcttttgggaaccaggcttgaaaatgaaggagatagcctcctgcagactcaagcatgtctctgctatatttgtgcagggaatgtagagaaattagttgcatgttggactaaagctcaagatggaagccaccctttgtcacttcaggatctgattgagaaagttgtcatcctgcgaaaagctgtgcaactcactcaagccatggacactagtactgtaggagttctcttggctgcgaagatgagtcagtatgccaatttgttggcagctcagggcagtattgctgcagccttggcttttcttcctgacaacaccaaccagccaaatatcatgcagcttcgtgacagactttgtagagcacaaggagagcctgtagcaggacatgaatcacctaaaattccgtacgagaaacagcagctccccaagggcaggcctggaccagttgctggccaccaccagatgccaagagttcaaactcaacaatattatccccatggagaaaatcctccacctccgggtttcataatgcatggaaatgttaatccaaatgctgctggtcagcttcccacatctccaggtcatatgcacacccaggtaccaccttatccacagccacagccttatcaaccagcccagccgtatcccttcggaacaggggggtcagcaatgtatcgacctcagcagcctgttgctcctcctacttcaaacgcttaccctaacaccccttacatatcttctgcttcttcctatactgggcagtctcagctgtacgcagcacagcaccaggcctcttcacctacctccagccctgctacttctttccctcctcccccttcctctggagcatccttccagcatggcggaccaggagctccaccatcatcttcagcttatgcactgcctcctggaacaacaggtacactgcctgctgccagtgagctgcctgcgtcccaaagaacaggtcctcagaatggttggaatgaccctccagctttgaacagagtacccaaaaagaagaagatgcctgaaaacttcatgcctcctgttcccatcacatcaccaatcatgaacccgttgggtgacccccagtcacaaatgctgcagcaacagccttcagctccagtaccactgtcaagccagtcttcattcccacagcccttccatggcgtacagcaacctcttggtcaaacaggcatgccaccatctttttcaaagcccaatattgaaggtgccccaggggctcctattggaaataccttccagcatgtgcagtctttgccaac

SEQ ID NO: 10762 - protein, 463 aa, Homo sapiens
MKNWKEIVESCDLKNWREALAAVLTYAKPDEFSALCDLLGTRLENEGDSLLQTQACLCYICAGNVEKLVACWTKAQDGSHPLSLQDLIEKVVILRKAVQLTQAMDTSTVGVLLAAKMSQYANLLAAQGSIAAALAFLPDNTNQPNIMQLRDRLCRAQGEPVAGHESPKIPYEKQQLPKGRPGPVAGHHQMPRVQTQQYYPHGENPPPPGFIMHGNVNPNAAGQLPTSPGHMHTQVPPYPQPQPYQPAQPYPFGTGGSAMYRPQQPVAPPTSNAYPNTPYISSASSYTGQSQLYAAQHQASSPTSSPATSFPPPPSSGASFQHGGPGAPPSSSAYALPPGTTGTLPAASELPASQRTGPQNGWNDPPALNRVPKKKKMPENFMPPVPITSPIMNPLGDPQSQMLQQQPSAPVPLSSQSSFPQPFHGVQQPLGQTGMPPSFSKPNIEGAPGAPIGNTFQHVQSLP

SEQ ID NO: 10763 - DNA, 1678 bp, Homo sapiens
  CDS (373)..(1005)
agacgatccgctagccacattaggcgctcggtctctgcgtccgcccctcccgtgcctcagagacttgcgctccccaggcccgagcccctgtcggcccatcctcgagcccgtgtggctcgcgaacctctaactccagccgctgcagccccctcccaggcccggcgtccccgagccccgcgggcgccgcgcctgcccttctttggctacgctgcagccgcggtgtcggcgagtcctcccgggttgcccccgcgggcgtcagagggagggcgggcgcccgcgtggtgacggcgacgcctgcagcccaaggagcgctccactcgctgccgccggaggggccggtgacctcttggctaccccgcgtcggaggcttagatggctcaggcgaagatcaacgctaaagccaacgaggggcgcttctgccgctcctcctccatggctgaccgctccagccgcctgctggagagcctggaccagctggagctcagggttgaagctttgagagaagcagcaactgctgttgagcaagagaaagaaatccttctggaaatgatccacagtatccaaaatagccaggacatgaggcagatcagtgacggagaaagagaagaattaaatctgactgcaaaccgtttgatgggaagaactctcaccgttgaagtgtcagtagaaacaattagaaacccccagcagcaagaatccctaaagcatgccacaaggattattgatgaggtggtcaataagtttctggatgatttgggaaatgccaagagtcatttaatgtcgctctgcagtgcatgttcatctgaggtgccacatgggccagttgatcagaagtttcaatccatagtaattggctgtgctcttgaagatcagaagaaaattaagagaagattagagactctgcttagaaatattgaaaactctgacaaggccatcaagctattagagcattctaaaggagctggttccaaaactctgcaacaaaatgctgaaagcagattcaattagtcttcaaacctaagagcatttacacaatacacaaggtgtaaaaatgataaaatactattttaattgataactagttctttgttaggtataaccacttagttgacactgatagttgtttcagatgaggaaaatattccatcaagtatcttcagttttgtgaataacaaaactagcaatattttaattatctatctagagattttttagattgaattcttgtcttgtactaggatctagcatatttcactattctgtggatgaatacatagtttgtggggaaaacaaacgttcagctaggggcaaaaagcatgactgctttttcctgtctggcatggaatcacgcagtcaccttgggcatttagtttactagaaattctttaccttaagcagcacacacatttactacacacacagtgttaacaaagcactgtgcttagagggtaaaaaggaatcacaaaacaagaatctttccaaagttgtctcattcagcaatgttaaggcatctgtatcaaattattttggatgtaaagattcctgtgtctcataatatgaatgtattttttgatatacaagaaactgacataaaatatgagaaaaccacctataatttaccactgtgaacaattatatatctatctgcttcatcttttctcaaatgcatcaattctct

SEQ ID NO: 10764 - protein, 211 aa, Homo sapiens [sequence omitted]

SEQ ID NO: 10765 - DNA, 1734 bp, Homo sapiens
  CDS (246)..(1064)
attgtgggaagggcggccggtgcagccgcagctgccatcttaggggcgcctggcgctacgggtttctcgttggaggcggccttcgtggcagctgtagacgccgggaaaaggcataaagtccgttggccgacacctttctttcctccggcctcggtagaaccgccagcccgcgtccgaaggcggaggcgaggggaactggccgcgtgaggggcctgaggcgagcggttagagcgtctcccggaaggatgggccggtctcggagccggagctcgtcccgctccaagcacaccaagagcagcaagcacaacaagaagcgcagccggtcccggtcgcgatcccgggacaaggagcgcgtgcggaagcgttccaaatctcgggaaagtaaacggaaccggcggcgggagtcgcggtcccgttcgcgctccaccaacacggccgtgtcccggcgcgagcgggaccgggagcgcgcctcgtccccgcccgaccgcatcgacatcttcgggcgcacggtgagcaagcgcagcagcctggacgagaagcagaagcgagaggaggaggagaagaaagcggagttcgagcggcagcgaaaaattcgacagcaagaaatagaagaaaaactcatcgaggaagaaacagcacgaagagtagaagaattggtagcaaaaagggtggaggaagaactggagaaaaggaaggatgaaattgaacgagaagttctccgaagggtggaggaagccaaacgcatcatggaaaagcagttgctcgaagaactcgagcgacagagacaagctgagcttgccgcacaaaaagctagagaggaggaagaacgtgcaaaacgtgaggagctagagcgaatactggaagagaataaccgaaaaattgcagaagcacaagccaaactggccgaagaacagttgagaattgttgaagaacaaagaaagattcatgaggaaaggatgaaactagaacaagaacgacaacgtcaacagaaagaagaacaaaaaattatcctgggcaaggggaagtccaggccaaaactgtccttctcattaaaaacccaggattaaattgcaaactctgaactttttacaaagaaaaatggaaaaactttgtatggtagcttcatgttgaagtggttttttgtttttgtttttgtttttttaatttgtaaaatctggaaagttagcttgttctaataggggctatgctctgcaattcccttttttttttttttttccttccactaagtcaaatccttatcagatcattgttgtattctaaggagtgacgtatttttcacctgtttggattctatattagtggtctgaggaagagcagatcacattgtaaaactatggatggtctgataaggcttttactgaccccactgacttcagagttatactctgcttgctacatcataatgctggttttgctgactttttgtttttttatatatttataaaaaaagaaaaagttggtgattgcattgggaaattcccagggtattactggacctatgtggtgtattgttaaaccagtgtccttgtgatactgtcgctcttgatgttcctgatacaggtaaggaaacagttggtcaactctgatacaaagtatatatacagttcagtattgtctctgttcattttgtttttatttcattgacaaaatcaaaccagcattccccattgtgtaaataaatgattttgctgaataaagtaaagtcttaaattc

SEQ ID NO: 10766 - protein, 273 aa, Homo sapiens
MGRSRSRSSSRSKHTKSSKHNKKRSRSRSRSRDKERVRKRSKSRESKRNRRRESRSRSRSTNTAVSRRERDRERASSPPDRIDIFGRTVSKRSSLDEKQKREEEEKKAEFERQRKIRQQEIEEKLIEEETARRVEELVAKRVEEELEKRKDEIEREVLRRVEEAKRIMEKQLLEELERQRQAELAAQKAREEEERAKREELERILEENNRKIAEAQAKLAEEQLRIVEEQRKIHEERMKLEQERQRQQKEEQKIILGKGKSRPKLSFSLKTQD

SEQ ID NO: 10767 - DNA, 2044 bp, Homo sapiens
  CDS (107)..(1303)
gcgcacgtcccggagcccatgccgaccgcaggcgccgtatccgcgctcgtctagcagccccggttacgcggttgcacgtcggccccagccctgaggagccggaccgatgtggaaactgctgcccgccgcgggcccggcaggaggagaaccatacagacttttgactggcgttgagtacgttgttggaaggaaaaactgtgccattctaattgaaaatgatcagtcgatcagccgaaatcatgctgtgttaactgctaacttttctgtaaccaacctgagtcaaacagatgaaatccctgtattgacattaaaagataattctaagtatggtacctttgttaatgaggaaaaaatgcagaatggcttttcccgaactttgaagtcgggggatggtattacttttggagtgtttggaagtaaattcagaatagagtatgagcctttggttgcatgctcttcttgtttagatgtctctgggaaaactgctttaaatcaagctatattgcaacttggaggatttactgtaaacaattggacagaagaatgcactcaccttgtcatggtatcagtgaaagttaccattaaaacaatatgtgcactcatttgtggacgtccaattgtaaagccagaatattttactgaattcctgaaagcagttcagtccaagaagcagcctccacaaattgaaagtttttacccacctcttgatgaaccatctattggaagtaaaaatgttgatctgtcaggacggcaggaaagaaaacaaatcttcaaagggaaaacatttatatttttgaatgccaaacagcataagaaattgagttccgcagttgtctttggaggtggggaagctaggttgataacagaagagaatgaagaagaacataatttctttttggctccgggaacgtgtgttgttgatacaggaataacaaactcacagaccttaattcctgactgtcagaagaaatggattcagtcaataatggatatgctccaaaggcaaggtcttagacctattcctgaagcagaaattggattggcggtgattttcatgactacaaagaattactgtgatcctcagggccatcccagtacaggattaaagacaacaactccaggaccaagcctttcacaaggcgtgtcagttgatgaaaaactaatgccaagcgccccagtgaacactacaacatacgtagctgacacagaatcagagcaagcagatacatgggatttgagtgaaaggccaaaagaaatcaaagtctccaaaatggaacaaaaacaccaactaaattgccaagtataaataaaagtaaagatagggcttctcagcagcagcagaccaactccatcagaaactactttcagccgtctaccaaaaaaaagggaaagggatgaagaaaatcaagaaatgtcttcatgcaaatcagcaagaatagaaacgtcttgttctcttttagaacaaacacaacctgctacaccctcattgtggaaaaataaggagcagcatctatctgagaatgagcctgtggacacaaactcagacaataacttatttacagatacagatttaaaatctattgtgaaaaattctgccagtaaatctcatgctgcagaaaagctaagatcaaataaaaaaagggaaatggatgatgtggccatagaagatgaagtattggaacagttattcaaggacacaaaaccagagttagaaattgatgtgaaagttcaaaaacaggaggaagatgtcaatgttagaaaaaggccaaggatggatatagaaacaaatgacactttcagtgatgaagcagtaccagaaagtagcaaaatatctcaagaaaatgaaattgggaagaaacgtgaactcaaggaagactcactatggtcagctaaagaaatatctaacaatggcaaacttcaggatgatagtgagatgcttccaaaaaagctgttattgactgaatttagatcactggtgattaaaaactctacttccagaaatccgtctggcataaatgatgattatggtcaactaaaaaatttc

SEQ ID NO: 10768 - protein, 399 aa, Homo sapiens
MWKLLPAAGPAGGEPYRLLTGVEYVVGRKNCAILIENDQSISRNHAVLTANFSVTNLSQTDEIPVLTLKDNSKYGTFVNEEKMQNGFSRTLKSGDGITFGVFGSKFRIEYEPLVACSSCLDVSGKTALNQAILQLGGFTVNNWTEECTHLVMVSVKVTIKTICALICGRPIVKPEYFTEFLKAVQSKKQPPQIESFYPPLDEPSIGSKNVDLSGRQERKQIFKGKTFIFLNAKQHKKLSSAVVFGGGEARLITEENEEEHNFFLAPGTCVVDTGITNSQTLIPDCQKKWIQSIMDMLQRQGLRPIPEAEIGLAVIFMTTKNYCDPQGHPSTGLKTTTPGPSLSQGVSVDEKLMPSAPVNTTTYVADTESEQADTWDLSERPKEIKVSKMEQKHQLNCQV

SEQ ID NO: 10769 - DNA, 1483 bp, Homo sapiens
  CDS (50)..(763)
cttagtggtgtcggggtctagtggacagagaagactcttggccaggcagatggcttctcggtggcagaacatggggacctccgtgcgccggagatctctccagcaccaggagcagctggaggacagcaaggagctgcagcctgtggtcagccatcaggagacctctgtaggggccctggggtccctgtgcagacagttccaaaggaggctgcccctgagaaccgtcaacctcaacctccgcgcagggccctcctggaaacgcctggaaaccccagagccaggtcagcagggcctccaggctgcagctcgctcagctaagagtgctttgggtgccgtgtcccagagaatccaggagtcctgccaaagtggcaccaagtggctggtggagacccaggtgaaggccaggaggcggaagagaggagcacagaagggcagtggatccccaactcacagcctgagccagaagagcacccggctgtctggagccgcccctgcccactcagccgcagacccctgggagaaggagcatcaccgcctctctgtccggatgggctcacatgcccacccattacggcgatcaaggcgggaggctgccttccggagcccctactcctcaacagagcccctctgctctcccagcgagtctgacagtgacctagagcctgtgggggcgggaattcagcatctccagaagctgtcccaagagctagatgaagccattatggcggaagagagtggtgacatcgtctctctcattcatgactgaggaagtgcctgcaggaaacaagccctgtctgaccgccaaggcttcatactcaaggatgtctatgcttccccgtgtgcttcctggaaaaaacccccgggagtcgtcagtacccctgggccactgctaacaagcacctaacaaggggcccagagccccctgctccagccacatctggacccatcagtgactgcctgccatagcctgagagtgtcttggggagaccttgcagagggggagaattgttccttctgctttcctaggggactcttgagcttagaaactcatcgtacacttgaccttgagccttctatttgcctcatctataacatgaagtgctagcatcagatatttgagagctcttagctctgtacccgggtgcctggtttttggggagtcatccgcagagtcactcacccactgtgtttctggtgccaaggctcttgagggccccactctcatccctcctttccctaccagggactcggaggaaggcataggagatatttccaggcttacgaccctgggctcacgggtacctatttatatgctcagtgcagagcactgtggatgtgccaggaggggtagccctgttcaagagcaatttctgccctttgtaaattatttaagaaacctgctttgtcattttattagaaagaaaccagcatgtgactttcctagataacactgctttctcataataaagactatttgcatttg

SEQ ID NO: 10770 - protein, 238 aa, Homo sapiens
MASRWQNMGTSVRRRSLQHQEQLEDSKELQPVVSHQETSVGALGSLCRQFQRRLPLRTVNLNLRAGPSWKRLETPEPGQQGLQAAARSAKSALGAVSQRIQESCQSGTKWLVETQVKARRRKRGAQKGSGSPTHSLSQKSTRLSGAAPAHSAADPWEKEHHRLSVRMGSHAHPLRRSRREAAFRSPYSSTEPLCSPSESDSDLEPVGAGIQHLQKLSQELDEAIMAEESGDIVSLIHD

SEQ ID NO: 10771 - DNA, 2226 bp, Homo sapiens
  CDS (486)..(1703)
ttcagaaggccagccggcaggaggagccggacagcctctcctattactgcgctgctgagaccaacggggtgggtgcagcctcgggcaccccgccctccaaggctaccctggaggggaaggtggcttcccccaagcactgtgttctggctcggcccaaagggactccccctctgccccctgtccgaaagtccagcctggaccagaagaaccgggccagccctcagcacagtgccagcggcagcggcaccagcagccccctgaaccaaccagccgccttcccggcgggcctcccagacgagcctagcggcaagacgaaggacgccagcagcagcagcaagctcttcagtgccaagctggagcagctggccagcagaagcaactcgctgggcagggcgacggtcagccactacgaatgcctctccccggagcgggccgagagcctgtcctccgtgagctcccggctgcacgcgggcaaggacggcaccatgccccgcgcggggaggagcctgggccgcagcgccgggacctcgccccccagctccggggcctcgcccaaggccggccagtccaagatctccgccgtgagcagactcctcctggccagccccagagcgcacggcccgtccgcctccaccaccaaaaccctcagcttctccaccaagtccctgccgcaggcggtgggccagggctccagctcgccccccggtgggaagcacacgccctggtccacgcagtccctcagcaggaacaggagctcgggcctggcctccaagcttcccctgcgggccgtcagcgggcgcatctcggagctgctgcagggtggcgcgggcgcccggggcttgcagctgcgggccgggcccgaggcggaggcgcgcgggggggccctggccgaggacgagcccgcggccgcgcacctgctcccgtcgccctacagcaagatcacgcccccgcggaggccccaccgctgcagcagcggccacggcagcgacaacagcagcgtgctgagcggggagctcccgccggccatggggaagacggccctgttctaccacagcggcggcagcagcggctacgagagcgtgatgcgggacagcgaggccaccggcagcgcgtcctcggcgcaggactccacgagtgagaacagcagctccgtgggcggcaggtgccggagcctcaagaccccgaagaaacgctccaatccaggttctcagagacggaggcttatcccagcactatccctggacacctcttcccctgtgagaaaaccccccaacagcacaggcgtccgctgggtggatggccccttgcggagcagcccgaggggccttggggaaccctttgagattaaagtctatgaaatcgatgacgtggagcgcctgcagcggcgacgagggggtgccagcaaggaggccatgtgcttcaatgcaaagctgaagattctggaacaccgccagcagaggatcgccgaggtccgcgcgaagtacgagtggctgatgaaggagctggaggcgaccaaacagtatctgatgctggatcccaacaagtggctcagtgaatttgacttggagcaggtttgggagctggattccctggagtacctggaggcactggagtgtgtgacggagcgcctggagagccgtgtcaacttctgcaaggcccatctcatgatgatcacctgcttcgacatcacctccaggcgccggtagatgagccagacccttgtcctagtggtcccccgctccccaggacttcagagatgttgcacgcccctaggccctctgtgctggggcatcaaagacaatgaatgaggatgaaggttggtggcaagtctggagcgggcgttgagcggaaggcgagttttcttttgttttctgtaggaaaggtgcaaacgtcaaacaccgtggaaggagaaaaggatgggaagcccgaggggtgtccaagccctgtgagactgaaaaagcactttgaggaaccttaaagaccttgtttgtacataagaactgctagcaaaagagacctcactcttctcttgctttcgtgagaaaggaggggcgtggatgtaggattgctgtggaaagcgaacacaaaacaacccagaatgactgattaagtgccttgcgaatctttattattatccaaacatttatgttcatactttcttgtgtacagatggtgctagtcaagatgaaaacaacaaaacaaacaagaaaaacattttggaaatgt

SEQ ID NO: 10772 - protein, 406 aa, Homo sapiens
MPRAGRSLGRSAGTSPPSSGASPKAGQSKISAVSRLLLASPRAHGPSASTTKTLSFSTKSLPQAVGQGSSSPPGGKHTPWSTQSLSRNRSSGLASKLPLRAVSGRISELLQGGAGARGLQLRAGPEAEARGGALAEDEPAAAHLLPSPYSKITPPRRPHRCSSGHGSDNSSVLSGELPPAMGKTALFYHSGGSSGYESVMRDSEATGSASSAQDSTSENSSSVGGRCRSLKTPKKRSNPGSQRRRLIPALSLDTSSPVRKPPNSTGVRWVDGPLRSSPRGLGEPFEIKVYEIDDVERLQRRRGGASKEAMCFNAKLKILEHRQQRIAEVRAKYEWLMKELEATKQYLMLDPNKWLSEFDLEQVWELDSLEYLEALECVTERLESRVNFCKAHLMMITCFDITSRRR

SEQ ID NO: 10773 - DNA, 1713 bp, Homo sapiens
tttccatgggcagggtcgacagactcccttttcagtgatttctggctctgagaaacctctttactcactagaaaagaactttatttaaatggccaattttgttcctcagaaaaagaaattaaaaaaaaagaaaaataggatactgaagacagaaccatgtgacttggtgacaaacaaaaggaggggtgcactagaatttcaataggctccctaattccatagaaaaagcaaagcaacccaatgcctcctgagcctgcagtgcatgaagagagtgcttgagctgacccagccaccaggccttctggggctagacataacttcccactggaacagcagcagcctctttcccctctttgtgttttcatgaagaaaacggctgttctcttaggtagccaggaaatagattacatggggcaaactttcaaaagcaatctctaccctggtgctcaggctacatacagaggcagaaaaggggcacggaagagcccttgctcttgagagagagtattttcatattcccaagggctttccgtgtagagttgctatttctgatatcacttaaacctttacaagaaaaaaggctgtggtgactcagtgttcctataaattcagaatgtggaaactactaatccaaagcatcacttctagcactgagtatcaagacgatcagcctgaccaaaatattgcaaagagttttctaagtctctgaagatttttttctccttgaacactgagtctatagcagtcagcaatgtaccttagccgatccctgggaatggttatggaacagtagggcttgtttccatcctttttagagtgaagagatagaaaattagggctacctagtgtgggttctttttcagaactatgtattttctcctcactgcatgatgggtaaaaatgccctgggttgaaacaagaaacattatctttccacaccactgactaaaacacctgccagtggtttctttaggctccaccttttgctccgtaaactgtagactttcagactgaaatctaatcttaagtgacctcaattaaggtattttcacaaaaggctacttatagtgtagcattattgccttaaatcagaaagccctgggaagaggataaaagatatagaaatgagaaggctctgaagttataggcatttcttgctgtttaatagttacattatcacaaaaacaagccctattcatgattgaggactatggaaatagtgacttcttgaggaggcaccaaactttcctagaactgggtactctcagatagtggctgctatttcctattctatttcagtgacgtaggttggggctgaatgtaaaatagacatcatattactaaatagaatcctataaaatgcaatcacaggtgcccgggagtactagttttaaacatttccttaacaaggagaacaatccagcaaaaagctttctttctctatacagtgcatatctctaaacttttcttcctcagttttagagaacatctgttttatctggtggttctttgtttgaatgcaaactcataactttcaagtctccggtgcaagagcataatctacagatcatgggcaaaatctagccacagtcctgagagtccaggcttctgggatgcccagctgggtataaaagtccctactaaccctgtttcaaattcagaggtttctttggtttagaatgcctcaatgagattttgatacatccaagagag

SEQ ID NO: 10774 - DNA, 2070 bp, Homo sapiens
  CDS (1)..(804)
atgcagcagatccgcccgcccttcatccgcgggcctccgcaccatgcctccaaccccaacagccccctgtccaaccccatgcttcccggcatcgggcccccgcccggtggccccagaaacctgggccccacttccagccccatgcaccggcccatgctatcgccccacatccaccccccgagcacccccaccatgcccgggaaccccccaggcctgctgcccccgccgcctccgggcgccccactgccgagtcttcccttcccgccagtgagcatgatgccaaatggcccgatgccggtgccccagatgatgaatttcgggctgccgtcgcttgccccgctggtgccgcccccgaccctgctcgtgccgtaccccgtgatcgtgcccctaccggtgcccatccccatccccatccctatccctcacgtcagcgactccaagccccccaagaagctgctgtcgcctgaggaaccggcggtgagcgagctagagtcggtcaaggagaataactgtgcttccaactgccacctggacggggaggcggccaaaaagctgatgggcgaggaggccctggcggggggcgacaagtcagacccgaaccttaataaccccgcggacgaggaccatgcctatgctctgcggatgctgcccaagaccggctgcgtgatccagcctgtgccaaaacccgcggagaaggctgccatggcaccgtgcatcatctcctcgcccatgctcagcgccgggcctgaggacctggagccgccgctcaaaaggaggtgcctccgaattagaaatcagaataagtaaaaggaacgttcactcacagggtacgctcatggagagagggcgcagagcaaaccatgtcacgccatccaatgacaccagctggtcagctcaccaccccctctgtctaaaactcaagcaaataaagccgcttcctgtcattaagcatctcagaggaagcagccctccctcgatggcctctagcccagagaagcccgcgcatcttggacccaccaagcaggcccagccttcctgctgccaccatctctgcttctccccagaggaacttagagatttcacccctggcttttaaaaaaaacgaaataccgacaagccacaaggaccaatgtaggtattctccccgccccatcttcaaggctcagcgactgaggctggaagatgatatggattggaacacaaaaaatctttttttaatctttttaaaaactgctgtggttttgctgctacactaagaattgtgatttgcattgtacggttttggacctatattgttcacgttttgatggcggagaggggtggtcctggaggcccaatgcttcagagtcatctctgtcctgcccgggatgcactttaaatgaagagttagaatattttattggctaatatacttttcttgttatttttacaaaggccacctttatcctttttgatgccatattttcagtgttacacttttatggcttttaattttcgatttgacagatgtaagaagcagcatgaatagtttatactgtggtttttcagagactgaatgccaagagaactcggtaaatgtttattcttctcagctttctctttaaattcccctaaatagcgccccatttgggaacagagcaagagtgttgaactgaagaccaaaatgccctcaaggtgtaaaataatccgagggggaatatttgctgggcgtcaggaaagactcaaatgaaatttcaaccctgatggttttcggtgatccaggaagtcagtgagacaatctctctatatgcagagccctttcatgttaattagaatggtatggacaaaccaatgaaaacaagagggaaagtgagaaagatcacccatgattctgtttcactgtttgctttctcctgtcatggttaagagaaatgtgcaattcgatcctcaatcagtgggtggaggataacagggtagattcacttgtgtgcacttgtacagttgtagctgcgagtccagaagtcctctagagcatgtgtactggcactgagttggtgagacagttgtggagtatcccattctgatgagtac

SEQ ID NO: 10775 - protein, 268 aa, Homo sapiens
MQQIRPPFIRGPPHHASNPNSPLSNPMLPGIGPPPGGPRNLGPTSSPMHRPMLSPHIHPPSTPTMPGNPPGLLPPPPPGAPLPSLPFPPVSMMPNGPMPVPQMMNFGLPSLAPLVPPPTLLVPYPVIVPLPVPIPIPIPIPHVSDSKPPKKLLSPEEPAVSELESVKENNCASNCHLDGEAAKKLMGEEALAGGDKSDPNLNNPADEDHAYALRMLPKTGCVIQPVPKPAEKAAMAPCIISSPMLSAGPEDLEPPLKRRCLRIRNQNK

SEQ ID NO: 10776 - DNA, 1798 bp, Homo sapiens
  CDS (80)..(1156)
agcaaagagccgaggccgggcgcgcgaccctcgtccttctgcccctggccgcacactttgcgcacatctctttttctgcatggtggatattatttttcattatccttttctgggtgctatgggtgatcattccaagaagaagcccgggacggccatgtgcgtgggctgcgggagtcagatccacgaccagtttatcctgcgggtgtcgcccgacctcgagtggcacgcggcctgcctcaagtgtgccgagtgcagccagtacctggacgagacgtgcacgtgcttcgtgagagacgggaagacctactgcaagcgggactacgtcaggctgttcggcatcaagtgcgccaagtgccaggtgggcttcagcagcagcgacctggtgatgagggcgcgggacagcgtgtaccacatcgagtgcttccgctgctccgtgtgcagccgccagctgctgcctggggacgagttctcgctgcgggagcacgagctgctctgccgcgccgaccacggcctcctgctcgagcgcgccgcggccggcagcccgcgcagccccggcccgcttcccggcgcccgcggcctgcatctgcccgacgctgggtcgggccggcagcccgcgttgcgcccgcacgtgcacaagcagacggagaagacgacccgcgtgcggactgtgctgaacgagaagcagctgcacactctgcggacctgctacgccgccaacccgcggcccgacgctctcatgaaggagcagctggtggagatgaccggcctgagcccgcgggtcatccgcgtctggttccagaacaagcgctgcaaggacaagaagaaatccattctcatgaagcagctgcagcagcagcagcacagcgacaagacgagccttcagggactgactgggacgcccctggtggcgggcagtcccatccgccatgagaacgccgtgcagggcagcgcagtggaggtgcagacgtaccagccgccgtggaaggcgctcagcgagtttgccctccagagcgacctggaccaacccgccttccaacagctggtctccttctccgagtccggctccctaggcaactcctccggcagcgacgtgacctccctgtcctcgcagctcccggacacccccaacagtatggtgccgagtcccgtggagacgtgagggggacccctccctgccagcccgcggacctcgcatgctccctgcatgagactcacccatgctcaggccattccagttccgaaagctctctcgccttcgtaattattctattgttatttatgagagagtaccgagagacacggtctggacagcccaaggcgccaggatgcaacctgctttcaccagactgcagacccctgctccgaggactcttagtttttcaaaaccagaatctgggacttaccagggttagctctgccctctcctctcctctctacgtggccgccgctctgtctctccacgccccacctgtgtccccatctcggccggcccggagctcgcccacgcggacccccgccctgccccagctcagcgctccctggcggcttcgcccgggctcctagcggggaaaaggaaggggataactcagaggaacagacactcaaactcccaaagcgcatgattgctgggaaacagtagaaaccagacttgccttgaaagtgtttaagttattcgacggaggacagagtatgtgagcctttgccgaacaaacaaacgtaagttattgttatttattgtgagaacagccagttcatagtgggacttgtattttgatcttaataaaaaataataacccgg

SEQ ID NO: 10777 - protein, 359 aa, Homo sapiens
MVDIIFHYPFLGAMGDHSKKKPGTAMCVGCGSQIHDQFILRVSPDLEWHAACLKCAECSQYLDETCTCFVRDGKTYCKRDYVRLFGIKCAKCQVGFSSSDLVMRARDSVYHIECFRCSVCSRQLLPGDEFSLREHELLCRADHGLLLERAAAGSPRSPGPLPGARGLHLPDAGSGRQPALRPHVHKQTEKTTRVRTVLNEKQLHTLRTCYAANPRPDALMKEQLVEMTGLSPRVIRVWFQNKRCKDKKKSILMKQLQQQQHSDKTSLQGLTGTPLVAGSPIRHENAVQGSAVEVQTYQPPWKALSEFALQSDLDQPAFQQLVSFSESGSLGNSSGSDVTSLSSQLPDTPNSMVPSPVET

SEQ ID NO: 10778 - DNA, 1366 bp, Homo sapiens
  CDS (75)..(887)
cttcgctctagctgggaggctgacggcccgcgggcgtaagcggactgcagccgcgagctcctggaggcggcgggatggaggcggcggccgagcctggaaacctggccggcgtcaggcacatcatcctggtcctctcaggaaaggggggcgttgggaaaagcaccatctccacggagctggccctggcactgcgccatgcaggcaagaaggtgggaatcctggatgtggacctgtgtggccccagtataccccgcatgctcggggcgcagggcagggctgtgcaccagtgcgaccgcggctgggcacccgtcttcctggaccgggagcagagcatctcgctcatgtctgtgggcttcctgctggagaagccggacgaggccgtggtgtggagaggccccaagaaaaacgcgctgataaagcagtttgtgtccgacgtggcctggggggagctggactacctggtggtggacacgcccccggggacctccgatgagcacatggccaccatagaagccctgcgtccctaccagcccctgggggccctcgtggtcaccacgccccaggcggtgtccgtgggggacgtgaggcgcgagctgaccttctgtaggaagacgggcttgcgggtgatgggaatcgtggagaatatgagcggcttcacctgcccacactgcacggagtgcaccagcgtcttctccaggggcggcggagaggagctggcccagctcgccggggtgcccttcttaggctccgtgcccctggaccctgcgctcatgaggaccctggaggagggccacgactccatccaggagttccccgggagccccgccttcgctgcactcacctccatagcccagaagattctggacgcgacgcccgcgtgcctcccctgactaaggccaccttgcagccgctttccagggccaccaagggctctgctccagcctctcagagaaacagaggcctgggctcggttcccgggccctgcaggggcaggcccaggcagcgtcagcgggagagcttctccccgaccagcccagccccaggatgtgtcgcaccagcagctctgcctggttggcctgcagtgccgtggtctgcgtgctctgcagctgtgagacgggggcggcctgggctctcttcccatccatgttgcctacctgtgcccctggcagccgcgtgtccacacagttagcggagcgcaggacttctgcagtcctcaggtgaccccgggcctccagcaccctgggtcgctgtcatctgtgtttagctcggggagtgccccctaagggggcgaactgacctcaggcatgtcttgtaactgtagaggcgcctgccattaaacgtgtccgctgctgtggcgacagatctg

SEQ ID NO: 10779 - protein, 271 aa, Homo sapiens [sequence omitted]

SEQ ID NO: 10780 - DNA, 2124 bp, Homo sapiens
acaacgctgccgccgcgctccgtgggcaactcctactactgctgggctgggctgggctgggctgggctgcgccggagctcgcctgcacagatcagctccggagaggggagaaccacgctcctcggaccaagcctcgggagctaagccagatctgccagtgagcctcaggctttaggaactgaagagtgtttctgaaagatctatccagcactccgatggccagcaacaacaccgccagcatagcacaagccaggaagctggtagagcagcttaagatggaagccaatatcgacaggataaaggtgtccaaggcagctgcagatttgatggcctactgtgaagcacatgccaaggaagaccccctcctgacccctgttccggcttcagaaaacccgtttagggagaagaagtttttctgtgccatcctttaagtctttgagaggggcctgaagagcctccgggctcctgggacattgatgtagagtttttagtgaagtgggcacctttctagtccacggcatttgaagagagcgaggagaaccattctggaaactctaggctatgcatgtttaaagatctggtcccctttatgagaatgcaagccgatccacatcctgacttaagagatctgattctgacgaactgcctggaggaggggaatatataaaaataaaattggtgtcacttcttttctgctatcccccagcccccccccccaaaatcctcatgtttctgcttcatattttgaaaaataacaattaaaacagacagctgtactgaggtaagatatgtgtgaccttcttggaatgaatattgtctttagaataccctttgataagctgagctgtcccgtgtagatgcaattcggtttaatggcattgatgtatagtcactgtgcctttctttttctttcttccttctcctctacccctccttccacccctccccattagagtagtgtggagataaggctggactggtctatcagattgaactccaagaatgatcacacaaaatgtttagggagatgttccccgtggtgtatcctcatggtaacaacgacaaaaaatgccggttgtctgtgttctcttttcactattcctaacatgtgtacatgatagttttgattctgcaagtaaaagtaaatcctgtgttgtgactggtgctttcatatatttgtgacaatttttgagtaatattgcatgaaaatgtccctatgttacatccattcagaagttttgttgttttactctaaagctgggaaaggaaatgagagggaaaagaccccggagagggaagaaaatctcagtattttgaaaattgagattacttcagagccttagccacacctaaaatacctcctagttaatagtggtataaatgcctcttcaatacgttttccagaatccaaagcattttggtttatccaggacccagggcagcacagctgtcaccaagcaggagagttaaggattcaccatgagctgggaaatgcttttgccatgagtatgagcaaattccctctttccctgaatcatggacattctagattaaaagaacattttttgtgctcttaacaagaaaaccatggccctcctttgttcaagtatcacaagaaataaacccacagctccagagaaggtgaccattctcagaactccagctattcactctccagggagaaggacctcaaatcgccactctttgggcggcaggtgcggtccccacggccggctctacgaggaagagttctggctcttttgtccactgagatggtcttggtttttcacttaacaaattttttaatggaatctttgtttttgttctccatcttgtttgttagagtctctcggcctttatttacaaattccttgcaactagagcgctccttccccaagatatggtagtgagagtaatttttcattgtagctgtagtctccatcagtaacagcaggccctggaagacttgatcacctttttctgtgtcattttcagtcaaagagggcctctcttacatcttgtttgctttcaaatccccaaatatcatctccatctcccaattaattttattctctctttcctctgtattcgctttctcctgtttttttttttaaaaaaagcatg

SEQ ID NO: 10781 - DNA, 1817 bp, Homo sapiens
  CDS (747)..(1151)
acaccatgccgactgtcagcgtgaagcgtgatctgctcttccaagccctgggccgcacctacactgacgaagaatttgatgaactatgttttgaatttggtctggagcttgatgaaattgctccgtagaatttgtgacagccctggctgacctccgagcagaggctagctgtcccatctgtctggactacttgaaagacccagtgaccatcagctgtgggcataacttctgtctctcctgcatcattatgtcctggaaggatctagatgatagtttcccctgccccttttgccacttgtgctgtccagaaaggaaatttataagcaatccccagctgggtagtttgactgaaattgctaagcaactccagctaagaagcaagaggaagaggcaggaagagaagcatgtgtgtaagaagcataatcaggttttgactttcttctctcagaaagacctagagcttttatgtccaaggtgcagtttgtccactgatcaccagcatcgctgtgtttggcccataaagaaggctgcctcctatcaggaaaaaactggagcaatacaatgcaccgtggaaggagagagtggaactaattgaaaaagtcataactatacaaaccagaaaatcactggaactgaagaaaaaggtaaaacatacggcagaagaagtcaagtctgaatttgagcaacttaggttatttctgcaaaatgagcaagagactgtttttgggcaattacaagatgacgagatggatattttagcacaactaaatgaaagcctaacaaaattttcagattatacctcctcattaaaatatctactaaagaagatagagagcatatatgtgaagtcagaactggaattactggctgatgttaaggatatctatcacagacataagaatttaaaattccctaaaccttttttattcaaattaaaagaatatggttaccatctgtctccacaatattgtggccaaaacaaaattatcaagcgatttcaagtagatgtaattctagatcctgaagcagcacatcgtaaacttatagtctcagaagatagaaaaactgtgcgatatggaaatacaacacaaaacttacctcataacccaagaagattttatctgctcccagctgttctgggttctaagggataaaattgtggcaggcagtaccgggaagtagaagttaaagacatgcctgaatggattcttggtgtctgtagtgactctcctcccacaaggaggaagagtcaaccaattttagtacaggatggattatggagaatttggtaatctagtcggaataattatattgtattgggccataaggaaattattctgctgccaaaagtaacacctagtaagattggcattttttttagactgtgaaatgaatgaggtttccttttataatttgaatgatagatctcttctctgtacttttaatgatgattttacaggagaactttggccttatttttatactggaactgactcaaaacctcttaaaatttctacagtaacagattctgtattttctttcacctagtagacataactgagccagttaatctagttttggccattctgtattttgtccggtttttctcataaaaaaacaatattttttatctcaatttcagcaacttccaaaaaatgtgattatgggacctactttataataaattatggggtcaatgacaaagtactttagaaattctatggtaagatacttgaaaaatatattactgaaggaacgtattatgtaagaaaatctattacttttgtaattgccaataaaagcccaatttttttctc

SEQ ID NO: 10782 - protein, 135 aa, Homo sapiens [sequence omitted]

SEQ ID NO: 10783 - DNA, 1668 bp, Homo sapiens
  CDS (28)..(1572)
tcgggctccgcgggcgggcgggcggacatggcggccaacatgtaccgggtcggagattatgtctactttgagaattcctccagcaacccatacctaataagaaggatagaagaactcaacaagactgcaagtggcaacgtggaagcaaaagtagtatgcttttatagacgacgtgatatttccaacacacttataatgctcgcagataagcatgctaaagaaattgaggaagaatctgaaacaacagttgaggctgacttgaccgataagcagaaacatcagttgaaacatagggaactctttttgtcacgccagtatgaatctctgcccgcaacacatatcaggggaaagtgcagtgttgcccttctgaatgagacagaatcagtattgtcatatcttgataaggaggataccttcttctactcattggtctatgacccctcattgaaaacactattagctgacaaaggtgaaatcagagtgggacctagatatcaagcagacattccagaaatgctgttagaaggagaatcagatgagagggaacaatcaaaattggaagttaaagtttgggatccaaatagcccacttacggatcgacagattgaccagtttttagttgtagcacgtgctgttgggacattcgccagagccctggattgcagcagttctgtgaggcagcctagtttgcatatgagtgctgctgcagcttcccgagacatcaccttgtttcacgctatggatacattgtatagacacagctatgatttgagcagtgccattagtgtcttagtaccactcggaggacctgttttatgcagagatgaaatggaggaatggtcagcctctgaagctagcttatttgaagaggcactggaaaaatatggcaaagacttcaatgacatacggcaagattttcttccttggaaatcattgactagcatcattgaatattattacatgtggaaaactactgacagatatgtgcaacagaaacgtctaaaagcagcagaagctgagagtaaactgaaacaagtatatatcccaacctacagcaaaccaaatcccaaccaaatatccactagtaatgggaagcctggtgctgtgaatggagctgtggggaccacgttccagcctcagaatcctctcttagggagagcctgtgagagctgctatgctacacagtctcaccagtggtattcttggggcccacctaatatgcagtgtagattatgtgctatttgttggctttattggaaaaaatatggaggcttgaaaatgcccacccagtcagaagaagagaagttatctcctagcccaactacagaggaccctcgtgttagaagtcacgtgtcccgccaggccatgcagggaatgccagtccgaaacactgggagtccaaagtctgcagtgaagacccgccaagctttcttccttcatactacatatttcacaaaatttgctcgtcaggtctgcaaaaataccctccggctgcggcaggcagcaagacggccgtttgttgctattaattatgctgccattagggcagaatgtaagatgcttttaaattcttaaccttatatgttgtgcttctgaccattttctcttttcctctctttccttttttttttgtttgtttgtttgcaataaacataagttcttgtgtac

SEQ ID NO: 10784 - protein, 515 aa, Homo sapiens
MAANMYRVGDYVYFENSSSNPYLIRRIEELNKTASGNVEAKVVCFYRRRDISNTLIMLADKHAKEIEEESETTVEADLTDKQKHQLKHRELFLSRQYESLPATHIRGKCSVALLNETESVLSYLDKEDTFFYSLVYDPSLKTLLADKGEIRVGPRYQADIPEMLLEGESDEREQSKLEVKVWDPNSPLTDRQIDQFLVVARAVGTFARALDCSSSVRQPSLHMSAAAASRDITLFHAMDTLYRHSYDLSSAISVLVPLGGPVLCRDEMEEWSASEASLFEEALEKYGKDFNDIRQDFLPWKSLTSIIEYYYMWKTTDRYVQQKRLKAAEAESKLKQVYIPTYSKPNPNQISTSNGKPGAVNGAVGTTFQPQNPLLGRACESCYATQSHQWYSWGPPNMQCRLCAICWLYWKKYGGLKMPTQSEEEKLSPSPTTEDPRVRSHVSRQAMQGMPVRNTGSPKSAVKTRQAFFLHTTYFTKFARQVCKNTLRLRQAARRPFVAINYAAIRAECKMLLNS

SEQ ID NO: 10785 - DNA, 1587 bp, Homo sapiens
tatgcacaggcacacaagaattgtgggcagatgagtgagattgaggccaaggtccgctacgtgaagctagcccgttctctcaagacttacggtgtctccttcttcccggtgaaggtaggttatggacccttttcactgccctccttgtttcccactcttgcccttttctgtctctgaaagtctctggccttgccctcagtcacatctcccaccattccctaagattcccattctcttccttgctctgacctcatgaaaacctgcctgtcatcagccctacaccaccacttccctccctaccctgcattttcccttgtccgttagccctcccggccacctcaacatcccctatggctgcaagctgatctgatcattcacctctcatttgacctttgacctgtaacaccaacaccaacctctgcctcataggaaaaaatgaaagggaagaacaagctagtgcccaggcttctgggcatcaccaaggagtgtgtgatgcgagtggatgagaagaccaaggaagtgatccaggagtggaacctcaccaacatcaaacgctgggctgcgtctcccaaaagcttcaccctggtaagtctggggactataacaagaaagtgctttgggagtttcattaaaggggcagctgcagaggtctcttccctctcttggggtaagtatactgagtattactccagaaaaaaaggaggttagagtagatggagaatcttcctctgggagagtgtgaggcttaaatgaaacggatgatggacttattctttaaaatcagcagaacaaaaatctcatcagcaagctgagatcacaggaattcttgtaggtgtggtgaaaggaaaaatgtgataacctccctgtttcagcagcagctatatacagtgaatttttgactttatattatagggttatgaattgaaaactgatatcaacttgataaagtaccctaatgacacaaatacaaattataggaaatgctgttttttcccttttggatactacagccaaccttaaagtgtggccattttatgccaaatattatatcctctcaattttatcatcagagtaaaaataagagacttcctaaatgatatgtatttgaaactgtgtagtgtagaggccactcctcagaagtaaaaaatttccctccaaggagaaaataaagaggaggttcaagaaaggtgggcatcttccaagagggccgttgccacgggaaggcatctcatcagctcaaccttgggcctcccatcctagccatttccatcctggatagatttgagctttccctctgagtcccccacttgtcaccctaggattttggagattaccaagatggctattactcagtacagacaactgaaggggagcagattgcacagctcattgccggctacatcgatatcatcctgaagaaggtgagcactgcctgccctagccttctccttatcgcctcttgccctctccacaagccagtcctttagaaatgggcactcagattgcttgaacctgggaggcggaggttgcaatgagccgagatcttgcctctgcactccagcctgggtgacagagccctttcttgtc

SEQ ID NO: 10786 - DNA, 1513 bp, Homo sapiens
  CDS (221)..(1411)
gtgcatttgtgttgtgggggcatggggtgcatttgtgtgtatatatgtgtggatgtagggtgcgtttgtctgtgtgtatttgtgtgggcatggagtgcatttgcgttgcgggggtgtggagtgtgtttgtgtgtgtgcacacgcacatggttctcatggtcctcccgttttcaactgaacctgtaattagctcctcagagaccaggtttcaagacaacagatgaattgtgaaagagagcagctaaggggtaatcaggaagcagccgctgcccctgacacaatggctcagccttacgcttcggcccagtttgctcccccgcagaacggtatccccgcggaatacacggcccctcatccccaccccgcgccagagtacacaggccagaccacggttcccgagcacacattaaacctgtaccctcccgcccagacgcactccgagcagagcccggcggacacgagcgctcagaccgtctctggcaccgccacacaggcagatgacgcagcaccgacggatggccagccccagacacaaccttctgaaaacacggaaaacaagtctcagcccaagcggctgcatgtctccaatatccccttcaggttccgggatccggacctcagacaaatgtttggtcaatttggtaaaatcttagatgttgaaattatttttaatgagcgaggctcaaagggatttggtttcgtaactttcgaaaatagtgccgatgcggacagggcgagggagaaattacacggcaccgtggtagagggccgtaaaatcgaggtaaataatgccacagcacgtgtaatgacaaataaaaagaccgtcaacccttatacaaatggctggaaattgaatccagttgtgggtgcagtctacagtcccgaattctatgcaggcacggtcctgttgtgccaggccaaccaggagggatcttccatgtacagtgcccccagttcacttgtatatacttctgcaatgccaggcttcccgtatccagcagccaccgccgcggccgcctaccgaggggcgcacctgcgaggccgcggtcgcaccgtgtacaacaccttcagggccgcggcgcccccgcccccgatcccggcctacggcggtgttgtttaccaggatggattttatggtgcagacatttatggtggttatgctgcataccgctacgcccagcctacccctgccactgccgctgcctacagtgacagttacggacgagtttatgctgccgacccctaccaccacgcacttgctccagcccccacctacggcgttggtgccatgaatgcttttgcacctttgactgatgccaagactaggagccatgctgatgatgtgggtctcgttctttcttcattgcaggctagtatataccgagggggatacaaccgttttgctccatactaaatgacaaaaccataaaaaccttccaatgtggggagaaaggaagctttccgaggcctgagtattgcaatacatgcagtagtacatcattttagcaactct

SEQ ID NO: 10787 - protein, 397 aa, Homo sapiens [sequence omitted]

SEQ ID NO: 10788 - DNA, 1712 bp, Homo sapiens
  CDS (485)..(1249)
ctcacgcagccaacatggctccagtggagcacgttgtggcggatgctggggctttcctgcggcatgcggctctgcaggacatcgggaagaacatttacaccatccgggaggtggtcactgagattcgggacaaggccacacgcaggcggctcgctgtcctgccctacgagctgcggttcaaggagcccttaccggaatacgtgcggctggtgactgagttttcaaagaaaacaggagactaccccagcctctctgccacggacatccaagtgttgcactcacataccagttggaagcagagtttgttggggtgtctcacctaaaacaagaaccacagaaggttaaggtgagctcatcgattcagcacccagaaacacctctgcacatttctggtttccatctgccctacaagcctaaacccccacaagaaacagaaaaaggacactcagcttgtgagcctgagaacctggaatttagttccttcatgttctggagaaaccctttgcccaacatcgatcatgaactgcaggagctgctgattgacagaggtgaggacgttccaagtgaggaggaggaggaggaagaaaacgggtttgaagacagaaaagatgacagcgatgacgacgggggtggctggataacccccagtaacatcaagcagatccagcaggagctggagcagtgtgacgtccccgaggacgtgcgggttggctgcctgaccacagacttcgccatgcagaatgttctgctgcagatggggctgcacgtgctggcggtgaacggcatgctgattcgtgaggcccggagctacatcttgcgctgccatggctgtttcaagacaacgtctgacatgagccgagtgttctgctcacactgtgggaacaagaccctgaagaaagtgtccgtgaccgtcagcgacgacggcaccctgcacatgcacttctcccgcaaccccaaggtgctgaacccccgcggcctccggtactcgcttcccactcccaaagggggcaaatacgccatcaacccccatctcaccgaggatcagcgcttccctcagctgcgactctcccaaaaggccaggcagaaaaccaacgtgttcgcccctgactacatcgccggggtgtcaccctttgtcgagaatgacatctccagccgctcagctaccctgcaggtccgggacagcaccttgggagctgggcggagacgcttaaatcccaacgcttccagaaagaagtttgtgaagaaaaggtgaagagcgagttcccgcaggcaaattggatgggcgtctggccgccgtggagttccggtgacccatttccccagccgtgtcgtctccaggaccacccgatggaaataacaggcgggcttcacggtgcggctctgtccgcccatgccccgctgggtctgcagggaactggactgtcccatggcctgtgagcaccggagcgcctggctgcctgccaaggaagtgcaattgcataaaaacagaaagaacaacgccctggagccaatcttcaagaaaggaatttccaaaggataatatttttctaataaatgcggctgcaacctcctgtgcatttaattaaataggccaaatttttgctgcttaggtcatctcaaggctgatacttgagctgtgtgcccagagatcatgcatttagatttatatttttgccagaaaatacaaggttataataaaactaagaactacc

SEQ ID NO: 10789 - protein, 255 aa, Homo sapiens
MFWRNPLPNIDHELQELLIDRGEDVPSEEEEEEENGFEDRKDDSDDDGGGWITPSNIKQIQQELEQCDVPEDVRVGCLTTDFAMQNVLLQMGLHVLAVNGMLIREARSYILRCHGCFKTTSDMSRVFCSHCGNKTLKKVSVTVSDDGTLHMHFSRNPKVLNPRGLRYSLPTPKGGKYAINPHLTEDQRFPQLRLSQKARQKTNVFAPDYIAGVSPFVENDISSRSATLQVRDSTLGAGRRRLNPNASRKKFVKKR

SEQ ID NO: 10790 - DNA, 1894 bp, Homo sapiens
  CDS (172)..(720)
aatcgcgatccactacccaatccatgggcaccaccgccagctacccagagttctgcaactaccagcacgaccacaagcactggtagtgggtctggcaatagttccagcaatgctactgggaacaccgttgctgccgctaattatgtcgccagcatctttagtaccccaggcatgcagagcctgctgcaacagataactgaaaacccccagctgattcagaatatgctgtcggcgccctacatgagaagcatgatgcagtcgctgagccagaatccagatttggctgcacagatgatgctgaatagcccgctgtttactgcaaatccacagctgcaggagcagatgcggccacagctcccagccttcctgcagcagatgcagaatccagacacactatcagccatgtcaaacccaagagcaatgcaggctttaatgcagatccagcaggggctacagacattagccactgaagcacctagtgaaaccacgagtcatacatcagaatcaggacccaaccagcagttcattcagcaaatggtgcaggccctggctggagcaaatgctccacagctgccgaatccagaagtcagatttcagcaacaactggaacagctcaacgcaatggggttcttaaaccgtgaagcaaacttgcaggccctaatagcaacaggaggcgacatcaatgcagccattgaaaggctgctgggctcccagccatcgtaatcacatttctgtacctggaaaaaaaatgcatcttatttttgataatggctcttaaatctttaaacacacacacaaaatcgttctttactttcattttgattcttttaaatctgtctagttgtaagtctaatatgatgcattttaagatggagtccctccctcctacttccctcactccctttctcctttgcttatttttcctaccttcccttcctcttgtctccccactccctccctctttgtttccttccttccttatttcctttagtttccttccttagccgttttgagtggtgggaatcaatgctgtttcactcaaaagtgttgcatgcaaacacttctctttattctgcatttattgtgatttttggaaacaggtatcaaccttcacagttgggtgaacaagtgttgtcctacagatgtccaatttatttgcatttttaaacattagcctatgatagtaatttaatgtagaatgaagatattaaaaacagaagcaaattatttgaagctctctaatttgtggtacgatattgcttattgtgactttggcatgtatttttgctagcaaaatgctgtaagatttataccattgatcttttttgctatatttgtatacagtacagtaagcacaattggcactgtacatctaaaaatattacagtagaatctgagtgtaatatgtgtaaccaaaatgagaaagaatacaagaaatgtttctggagctagttatgtctcacaattttgtagaatcttacagcatctttgataaacttctcagtgaaaatgttggctaggcaagttcagttaaaatatagtagaaatgtttatcctggtatctctaagtatacatttaattgtacagaaaatttacagtgtaacattgtgtcaacatttgcagattgactgtatatgaccttaatctttgtgcagcctgaaggatcagtgtagtaatgccaggaaagtgctttttacctaagacttccttctcagcttctcccataaagagaccctaatatgcattttgatttgtaattggaaatgtaactttcactgaaagtgtcatgtgatgtttgcattacttttaactgctatgtataaaggaaagtgtgtcttttgacttcatcagttatttctcttgtgcacagagaaaaatgcattaaaaatgact

SEQ ID NO: 10791 - protein, 183 aa, Homo sapiens
MQSLLQQITENPQLIQNMLSAPYMRSMMQSLSQNPDLAAQMMLNSPLFTANPQLQEQMRPQLPAFLQQMQNPDTLSAMSNPRAMQALMQIQQGLQTLATEAPSETTSHTSESGPNQQFIQQMVQALAGANAPQLPNPEVRFQQQLEQLNAMGFLNREANLQALIATGGDINAAIERLLGSQPS

SEQ ID NO: 10792 - DNA, 1640 bp, Homo sapiens
atatgggctctccggactggaaagaatcttaggggtcctctaatctaaccctcacatgatgcttcaactcctccagatcatctctaacatagccagagtgtcacgctatgtttaagcatcttcagggatgggaaaatcccccacacccagccttcatcatccatatcccagaccacttccatgtgacgtcccactggcccccaaagacgctccacccagcagcctctcagccagagccatctgttcctggccttaccaactcctgggcttcctccagccttgctgaccccatggctctggcctcacttttgtttcagtcaaggagaaattgactgctgaccctgacagtgaggtggccactacaagtctccgggtgtcactcatgtgcccggtgggtaaaaggggagaagggaacagggtgggaagggagttgggtttagcctgtggactttgatgagggttcctagggatactggcgtgaagttttctgggatgaaatcagagtagggcctctgacaagagaacttgcttctcctcagctagggaagatgcgcctgactgtcccttgtcgtgccctcacctgcgcccacctgcagagcttcgatgctgccctttatctacagatgaatgagaagaagcctacatggacatgtcctgtgtgtgacaagaaggctccctatgaatctcttatcattgatgggtagggccattttgcttcctcttacctgggacatccactagaacctcttttcttggttatttctttttctttttcttttcttttttttttttttgagatggaatcttactctgttccccaggctggagtgcagtggcacaatcttggctcactgcaacctccacctcccgggttcaggcgatactcctgcctcagcctcctgagtagctgggattacaggcacccaccaccatgcctggctaatttttgtatttttagtaaagactgggtttcaccatgttggccaggctggtcttgaactcctgacctcaggtgatctgcccacttcagcctcctaaagtgctgggattacaggcatgagacaacatgcccagcctataatatttcttttttcttttagccaccacctccttcagggttttttaattcatatggcttacttcccctcacatgaactgcaattctcaccttatctatcccttttaccagtctgtgtgtgtgtgtgtgtatgtgcatgtgtgtggagggggagggcaacattaaggacttagtatatacaaggcatcttgctgagcactttgcatgagttatctcattgaatcctcacaataaccctatggactcggctcctacctgtaattccaacactggaaggctgagatgggaagatcatttgaggctgggagtttgagaccagcctgggcaacatggtagaccctctctctataaaaaattaaaaaaattagccaggcatgttataatagctcatgactgtagtcttagctgctcaggaggctgaggcgggaggatggcttgaacccaggagtttgaggctgcagtgagctatgattgcattactgcaccccagcctgggcaacagattgagaccctgtctcaaaaaaagaaataatcctatgattggctagtgacactcacccag

SEQ ID NO: 10793 - DNA, 1827 bp, Homo sapiens
  CDS (814)..(1254)
ctggtcttcctgctagagccaggcctgaggctccctgggagcccagtgcaatcatcagccccctgccctcctccccatacccactagctctggggagtaagccattatctcaaaggtcaggccgtgcaccagccagacctcatgaactcaggaaggtgcttgtccaggagttcctggctgctgtgcccttcacaggcaaagactgcattccttcctcagctgccagtgaggtgctgccaggcattccctgtagaactttcaggccagtttatgaactggttggcacccgtgtcctcctcctggcccaggcaggagaaccatgagcaggcagaaggagactttgcaaagtgccttccccagcatgtgtgccctctgcccttcagagcctgcagataggaggggtggcgaggacactgttctcaatgagcagaacctccaagacacccaaagctgcctgtttgccacctggccctatgcctgccccgttttctccctcaaggccttcacccgtgctagggcagtcacctggaatgtcctttccattacccctgctgtaatgcccagcacagaacttgatggcaggcctttgcatggtagcctgaagcgatctcacccttctaactgggtttggccacaggcacactggctcatgcttacctgtgctgcctgtggttatagttatgcgaattgtggttttacatccctaaaacagaagggcacggtgtccaggggatagcacccagcccaacttcagaaagacttcaggcaagatgtctaaccctcgtcttgttctgtttcttccagggaattccaatgcccactttcggaggcctcttcccctacccctacacctacatggcagcagcagccgcagccgcctcggctttgcccgccactagtgctgcagctgccgccgccgcagccgccggctccctctcccggagccccttcctgggcagtgcccggccccgactgcgtttcagcccctatcagatcccggtcaccatcccgcctagcactagcctcctcaccaccgggctggcctctgagggctccaaggccgctggtggaaacagccgggagcctagccccctgcccgagctggctctccgcaaagtaggggccccatcccgcggtgccctgtcgcccagtggctcggccaaggaggcggccaatgaactgcagagcatccagagactggtgagtgggctggagagccagcgagccctctccccaggccgggagtcgcccaagtgaggggctgcccagctgctcccctgccacgcagggcacccgggctgcctgcccctgctgcttgggacgtgtacagcacagaatgagtatttatttaaataaaggagaaaagtgggctgcagcagccggaatagagcctcgtctggcaagtcggggcctgggacacttccctgggcctcaacaaggatcaggctgctggaaacacagtcacttgggagctgctgggctaggtccagatccgctccagcgtcaaggtggcatccgaaggtgtctctggtcttccagcgaggtgggagaggcctcatccagggcccagcggtccctgcagaagccagaaggtgcaggggccaggggtgggagcatcggagggagtcccagagccctggaccttgggcctagaccgcgtgataaaactgggttgagggatgctggaaccagttacgactgaagtcagtgtagacctgagctgggagggaacctgttagtctccccacctcttccctgaagagacaggcacccctcccagccgtggtcaacggagggagtggcacttctgccttgagtccccagggg

SEQ ID NO: 10794 - protein, 147 aa, Homo sapiens [sequence omitted]

SEQ ID NO: 10795 - DNA, 2026 bp, Homo sapiens
  CDS (81)..(908)
tcaaagtggcttctcgtgagctaaagaatggtttcgctgtggtgtggcccccaggacaccatgcagatcattcaacagccatgggcttctgcttcttcaactcagtggccatcgcctgccggcagctgcaacagcagagcaaggccagcaagatcctcattgtagactgggacgtgcaccatggcaacggcacccagcaaaccttctaccaagaccccagtgtgctctacatctccctgcatcgccatgacgacggcaacttcttcccggggagtggggctgtggatgaggtaggggctggcagcggtgagggcttcaatgtcaatgtggcctgggctggaggtctggacccccccatgggggatcctgagtacctggctgctttcaggatagtcgtgatgcccatcgcccgagagttctctccagacctagtcctggtgtctgctggatttgatgctgctgagggtcacccggccccactgggtggctaccatgtttctgccaaatgttttggatacatgacgcatcaactgatgaacctggcaggaggcgcagtggtgctggccttggagggtggccatgacctcacagccatctgtgacgcctctgaggcctgtgtggctgctcttctgggtaacagggtggatcccctttcagaagaaggctggaaacagaaacccaacctcaatgccatccgctctctggaggccgtgatccgggtgcacagtaaatactggggctgcatgcagcgcttggcctcctgtccagactcctgggtgcctagagtgccaggggctgacaaagaagaagtggaggcagtgaccgcactggcgtccctctctgtgggcatcctggctgaagataggccctcggagcagctggtggaggaggaagaacctatgaatctctaaggctctggaaccatctgcccgcccaccatgcccttgggacctggttctcttctaacccctggcaatagcccccattcctgggtctttagagatcctgtgggcaagtagttggaaccagagaacagcctgcctgctttgacagttatcccagggagcgtgagaaaatccctgggtctagaatgggaactggagaggaccctgagaggagacgggctgggcggcgacccccacagggctctcgagaacagattctcccctccagtatgggccctggctgtggcccccattcctcaggactgcacagaggaggactggctccggctccgtcgggctcacccttaaccactattcctggctctgcaaaccccagactttgcacacagccccaggctccacacagaaatgtgaacttggcctcagacaggctggcccttcctaggctctaggggctagcggggagtggggagccaagaggtcccatattcctgagtgcaggggtagtccctctcacctgcttcctcagacgactctggaagcttccctctaccaccgggcactgagacgaagctccctgacagccgagactggcagccctccatctggtccgtaccctcgccagaggcccccctacatcaacctcctggcgatgccctggtggagcagatgggtgctctgggagtcctgtgcttcctgatccaatggtgccaaacccttcatctcccccagaagcgcagcatacccctgggacccctcggccactgcccactcggggagccttctctgtttctggggcctcccccaccatagctctgattcccaccccacataggaatagcctgactgagggggaaggggtgggagagaagatacagacatggaggaggggaggctgctctggcaaagtcttcaaggcttttgggggtccaggcctggggtcaagaaggaaaatgtgtgtgagcatgtgtgtgagtgaggcgtgtgtgtgagcgtgtgtgtgagtgaggcgtgtgtgtgtgtctttcctaggacccaccataccctgtgtatgtatgcatgtttttgtaaaaaggaagaaaatggaaaaaaatctgaacaataaatgttttatttgcttt

SEQ ID NO: 10796 - protein, 276 aa, Homo sapiens [sequence omitted]

SEQ ID NO: 10797 - DNA, 1569 bp, Homo sapiens
  CDS (64)..(1116)
agcagttgctccggcggcgctcggggagggagccagcagcctagggcctaggcccgggccaccatggcgctgcctccaggcccagccgccctccggcacacactgctgctcctgccagcccttctgagctcaggttggggggagttggagccacaaatagatggtcagacctgggctgagcgggcacttcgggagaatgaacgccacgccttcacctgccgggtggcaggggggcctggcacccccagattggcctggtatctggatggacagctgcaggaggccagcacctcaagactgctgagcgtgggaggggaggccttctctggaggcaccagcaccttcactgtcactgcccatcgggcccagcatgagctcaactgctctctgcaggaccccagaagtggccgatcagccaacgcctctgtcatccttaatgtgcaattcaagccagagattgcccaagtcggcgccaagtaccaggaagctcagggcccaggcctcctggttgtcctgtttgccctggtgcgtgccaacccgccggccaatgtcacctggatcgaccaggatgggccagtgactgtcaacacctctgacttcctggtgctggatgcgcagaactacccctggctcaccaaccacacggtgcagctgcagctccgcagcctggcacacaacctctcggtggtggccaccaatgacgtgggtgtcaccagtgcgtcgcttccagccccagggcttctggctacccgggtggaagtgccactgctgggcattgttgtggctgctgggcttgcactgggcaccctcgtggggttcagcaccttggtggcctgcctggtctgcagaaaagagaagaaaaccaaaggcccctcccggcacccatctctgatatcaagtgactccaacaacctaaaactcaacaacgtgcgcctgccacgggagaacatgtccctcccatccaaccttcagctcaatgacctcactccagattccagagcagtgaaaccagcagaccggcagatggctcagaacaacagccggccagagcttctggacccggagcccggcggcctcctcaccagccaaggaagaagaaatcaggacaaagacgcataacagagggaagaccatgggaagacacagaagatggccaagaagagacccctcagaagaaatcaatcttggtggggcgtggtggcttcacgcctgtaataccagcactgtgggaggttgaggtgggcagatcgcctgagcctaggagttcgaggccagcctgggcaacatggtgaaattccatctctacaaaaaaattagccgggtgtggtgttgagtatctgtagtcccagctacttgggaggctggggtgggaggactgcttgagtccagcaggttgaggctgcagtgagctgagattgagctactgcactccagcctgggcatagagtaataccctgtaaaaaaaaggaaggaagggagggagggaatcaaccatgccaacaaattgatcttggactactactggactactagcctccagaactatgaaataatacatttctgatgtct

SEQ ID NO: 10798 - protein, 351 aa, Homo sapiens
MALPPGPAALRHTLLLLPALLSSGWGELEPQIDGQTWAERALRENERHAFTCRVAGGPGTPRLAWYLDGQLQEASTSRLLSVGGEAFSGGTSTFTVTAHRAQHELNCSLQDPRSGRSANASVILNVQFKPEIAQVGAKYQEAQGPGLLVVLFALVRANPPANVTWIDQDGPVTVNTSDFLVLDAQNYPWLTNHTVQLQLRSLAHNLSVVATNDVGVTSASLPAPGLLATRVEVPLLGIVVAAGLALGTLVGFSTLVACLVCRKEKKTKGPSRHPSLISSDSNNLKLNNVRLPRENMSLPSNLQLNDLTPDSRAVKPADRQMAQNNSRPELLDPEPGGLLTSQGRRNQDKDA

SEQ ID NO: 10799 - DNA, 1590 bp, Homo sapiens
aaatattatgtctttcaagtctatttttttggtaagtcaatttttgactaccctttctttacttattgtgccctgtgaactcttccatgtccatacccattcattgtctataatcttggcactttcttattcattaattcaacaaatatttattccctatcacctttatttatgcatttctatagatgctagagatagggtaaataaaagtatggcaaaaccagcaattacttttgcaccaacctaatatgattttttaagaaatttataatttcattagagaaatagatgtataaacaaagaaattataatacaaacattgtgataagtgcaggaagtagaaaatagtgattattgctttcttcaaacataaagtattgttagtcaggagtccttcagttgtaagtgccagaaacccaatttcaaacagcaaaagcagaaaatggaatctattggctcgcatccctacaaattccaggaatagaactgtgctaagggactcaaataatgttgttgggtcttcatagcttattctggtttatttcttgcttttggggccttgcttttttcttctgaagatggactctgaagtgaattctacagcacactacccagatgccttatttagaatcgaagcattggtttccttcaggttttgggagtgttggctgctgatggctcatagttgagtctctttctgagacaaagggaggtgtctcactcaagtttatccctcctccctgagaatagcttgaatccaaagactgatcaatgagggatacaaagggctggcctcttgccttgattcaggacgtacctaaaaggccatccagctttagagttacccatgggaacagttcaggaatctgaggaacttaacatctgactcttggaagaacggttctgtggagaagagggttgagtttattttttttattctggagatatagggatgaaatggagagaagtaaagaagaggaaatatgaagggaaaccaaacaactgtttgaactggtgaaagactaggcaccttgccctgtgactcctctctagaaccctgcagacttttatcaagtatttggctacaagcaagttttttgtgaaaccagtggaagagtctgttcttcctctctcaactggcctaggatgggatggaactgtagagcacaggcatatttaggagtttagagacataattctgaggaaataagttctagaactttgcagaagcagtaggtagggctatgaactctatacattgtaaggtttgacaggcaaacatctggatgtatctgtcacagcaactaatgtcttagagaataaggtatagcttcaccaaacatttgaggaactagtagtaaaagtaatcaatgctaataaatgacagtataataaaatgaaggcaaagtgccacaggaacagaaaggtcttgaacagctaaccgatatattaaagaacaaatagacttgcccggcatggtgctatgtatctgtagtccaagctacttgggaggctgaagcaggaagatcactttgaacccaggagttcaaatgcagcctgggcaacatagagagatcctatctctaaaat

SEQ ID NO: 10800 - DNA, 1767 bp, Homo sapiens
  CDS (7)..(1275)
ggccggatggctgcgtggggctgtgtggctgcgctcggcgcggcgcgtgggctttgctggcgggcggcgcgcgcggctgcggggctccagggccgccccgcccgcaggtgctatgctgtgggccccgctcagagcccacccacctttgggttcctgttggacatcgatggagtgcttgtgcggggccacagagtgatccctgctgctctgaaagccttccgaaggctggtgaactcccaggggcagctgcgggtgcccgtgttttttgttacaaatgctggtaacatcttacaacacagcaaagcccaggagctgtcagccctgctggggtgcgaggtggatgcagaccaagttatcctctctcacagccccatgaagctcttctccgagtaccatgagaagcggatgctggtgtctggacaggggcccgtgatggaaaatgcccagggactgggcttccgaaatgtcgtcaccgtggatgagctgcggatggcctttcctctgcttgacatggtggacctggagcggcggctaaagaccacgcccctcccgaggaatgacttcccccgcattgaaggggtgctcctcctaggggagccggtccgctgggagaccagcctgcagctgatcatggatgtcctcctcagcaatgggagccctggggctggcctggcaacacccccctacccccacctccccgtcctagccagcaacatggatctcctgtggatggctgaagccaagatgcccaggtttggacatggcacctttctgctgtgcctggaaaccatttaccagaaagtgacgggcaaggagctgagatacgagggcctgatgggcaaacccagcatcctcacttaccagtatgccgaggacctgatcaggcgacaggcggggaggcggggctgggccgcccccatccggaagctctatgctgtgggcgataaccctatgtctgacgtatacggcgccaacctgttccaccagtacctgcagaaggcaacgcatgatggggcgccagaactaggggccgggggcacacggcagcaacagccctcagcaagccagagctgcatctccatcctggtgtgtacaggcgtctacaatcccaggaacccacagtccacggagcctgtccttggaggaggggagcctccattccacgggcaccgagacttatgcttcagtccagggctcatggaggcctcccacgtggtgaatgacgtgaatgaggctgtgcagctggtcttccgcaaggagggctgggctttggagtgagggcagtgcggtggaggtgagggggtgagcctggacctgtgggcgagtcccattggctgggctctggcctgatcactgggctcaggtcagggcttggttcccttgccacccttcttgctgccccatgagtgtggcattactggtcacttggaagaagaagtgactctttttccctgctgggtagcattttgtatggaacggttggaattttctgggcccagttcccacgtgcctttcgtggcagtctaacctcaggccattctcttcccctgtgtgcctcagtgtccttctcatttcagtagggacttctgaaatgggggaggcagtgtggaatactgtggatgtctgtgcagagcctttgccgacactgaaggcatgcagcctgtcggcagagtgtcttaacaccagatgctactttttactgtattgtagtttattgcccggagatgtggggctttttttttaaataaaataatcataataaatgtt

SEQ ID NO: 10801 - protein, 423 aa, Homo sapiens [sequence omitted]

SEQ ID NO: 10802 - DNA, 2398 bp, Homo sapiens
  CDS (42)..(602)
gcatcaagctcgagaaggagttcgacctgcccccggccgcgatgcccaacacggagaacgtgtactcgcagtggctcgccggctacgcggcctccaggcagctcaaagatcccttccttagcttcggagactccagacaatcgccttttgcctcctcgtcggagcactcctcggagaacgggagcttgcgcttctccacaccgcccggggagctggacggagggatctcggggcgcagcggcacgggaagtggagggagcacgccccatattagtggtccgggcccgggcaggcccagctcaaaagagggcagacgcagcgacacttgtgagtactgtgggaaagtcttcaagaactgtagcaatctcactgtccacaggagaagccacacgggcgaaaggccttataaatgcgagctgtgcaactatgcctgtgcccagagtagcaagctcaccaggcacatgaaaacgcatggccaggtggggaaggacgtttacaaatgtgaaatttgtaagatgccttttagcgtgtacagtaccctggagaaacacatgaaaaaatggcacagtgatcgagtgttgaataatgatataaaaactgaatagaggtatattaatacccctccctcactcccacctgacaccccctttttcaccactccccttccccatcgccctccagccccactccctgtaggatttttttctagtcccatgtgatttaaacaaacaaacaaacaaacagaagtaacgaagctaagaatatgagagtgcttgtcaccagcacacctgttttttttctttttctttttcttttttctttttccttttttttttttcttttcctttatgttctcaccgtttgaatgcatgatctgtacggggcaatactattgcattttacgcaaactttgagcctttctcttgtgcaataatttacatgttgtgtatgtttttttttaaacttagacagcatgtatggtatgttatggctattttaaattgtccctaattcgttgctgagcaaacatgttgctgtttccagttccgttctgagagaaaaagagagagagagagaaaaagaccatgctgcatacattctgtaatacatatcatgtacagttttattttataacgtgaggaggaaaaacagtctttggattaaccctctatagacagaatagatagcactgaaaaaaaatctctatgagctaaatgtctgtctctaaagggttaaatgtatcaattggaaaggaagaaaaaaggccttgaattgacaaattaacagaaaaacagaacaagtttattctatcatttggttttaaaatatgagtgccttggatctattaaaaccacatcgatggttctttctacttgttataaacttgtagcttaattcagcattgggtgaggtaataaaccttaggaactagcatataattctatattgtatttctcacaacaatggctacctaaaaagatgacccattatgtcctagttaatcatcatttttcctttagtttaattttataaacaaaactgattataccagtataaaagctactttgctcctggtgagagcttaaaagaaatgggctgttttgcccaaagttttatttttttttaaacaatgattaaattgaatgtgtaatgtgcaaaagccctggaacgcaattaaatacactagtaaggagttcattttatgaagatatttgctttaataatgcctttttaaaaatactggcaccaaaagaaatagatccagatctacttggttgtcaagtggacaatcaaatgataaactttaagaccttgtataccatattgaaaggaagaggctgacaataaggtttgacagaggggaacagaagaaaataatatgatttattagcacaacgtggtactatttgccatttaaaactagaacaggtatataagctaatattgatacaatgatgattaactatgaattcttaagacttgcatttaaatgtgacattcttaaaaaaagaagagaaagaattttaagagtagcagtatatatgtctgtgctccctaaaagttgtacttcatttcttttccatacactgtgtgctatttgtgttaacatggaagaggattcattgtttttatttttatttttttaattttttcttttttattaagctagcatctgccccagttggtgttcaaatagcacttgactctgcctgtgatatctgtatcttttctctaatcagagatacagaggttgagtataaaataaacctgctcagataggacaattaagtgcactgtacaattttcccagtttacaggtctatacttaagggaaaagttgcaagaatgctgaaaaaaaattgaacacaatctcattgaggagcattttttaaaaact

SEQ ID NO: 10803 - protein, 187 aa, Homo sapiens
MPNTENVYSQWLAGYAASRQLKDPFLSFGDSRQSPFASSSEHSSENGSLRFSTPPGELDGGISGRSGTGSGGSTPHISGPGPGRPSSKEGRRSDTCEYCGKVFKNCSNLTVHRRSHTGERPYKCELCNYACAQSSKLTRHMKTHGQVGKDVYKCEICKMPFSVYSTLEKHMKKWHSDRVLNNDIKTE

SEQ ID NO: 10804 - DNA, 1806 bp, Homo sapiens
gaatagaatgaaatctcagtaatgaattaaagcaacaaaaagatattgattggcaaaaagcaagatataagagatgcatttgcttaacatctctacataatatttatggtctggtcagtattggtctggtcagtattgcctggctgacgtgaaatgtaaactagtaggcatgttattgatctgctaaaactaaccctctttttaagaggagatttaaggaagacgtcaatcaaaatgtcaaatatgtgtgtcagaatataaataatttttcacattgtattgttgctatataaaaaaaataatagaattggttgggtttctgaggtgaaatccagagtaagagtactagacagttcaacaagccacatctaatggcacagatagaggatgtagctattttatacctttcataacatttgagagtaagatatccttcaggatgtgaagtgattattaagtactcatacctgaaatctgttgtcaagattagaactggggttcatgttaaaaaccttccatattacctgagggtacctgtggggaacagttccttcccctgtgtggtagtattttgttggaagagaatgtttatacgaaaaatgaaattcttccaacagcagagaaactctaaaaagtttgatagtacctatcaaagtgctgtacttctgtgatagagaacatctgatgtaccaatttagatctatttctttatactttttctaaccaattgcttaatagtactttggatgattatcacctttgccacttaaaatatataaatatcctttttacttcatgaggaaggaggaattttttgattactgagttcagccttttgtgatgacttatattttggacttacattttaactttaaagaatgtcagatcccttctttgtcttactagttaaatcctcacctaatctcttgggtatgaatataaatgtgtgtcatcgttatattgttcagctagatgagcaagtatcttagggtagtaggtagcctggtggttttagaagtgtttggtgatttttacggagagagttttcctaagtggtggtttataggtggtatcagatattattagggcagctttttggggagtaatctcaggtctcccagagcagcagcatttttctcattgatataagtaagattcttaggagcttttcttatcacacaagatgcctgaatcgaatgtgagaattgaaggcatttcttctgcataaacaaagaattctacctgctggacagaaacctggaaagttctttggaattcgctgaattacagtttagtatgtcctgattacagagtgacaatatttatcaagcctttgttatattggattatcttctctcttaaaatacaactgtattataattgaaatgacagcccaaaattggatggtttaccaaaaccaatgaaagggatttcacacatcaatttttatttctgttttgaagagcacatgctatataataattgctagtagcaactgcagtaaaacaggtgataagttattttctctgaaaagatccagtcctagagcaggattcttcgatcattcatggcagagtgaaaaaggtttgtatggttcttgtccaaataactcagttcttaaaatgcttaaaatgatcgtaaaccattatcctttaaaggtttatttgaagatgctgttaaagtacagaattttgtgtacaggtagatttttccgtccctcattaatagtgccttcttaattaatacagactggtgttagctataacaaaactccagtaaggccaaagaatcccaagttctttgtgg

SEQ ID NO: 10805 - DNA, 1798 bp, Homo sapiens
  CDS (5)..(304)
aaggatgcggtcccgggttctgtggggcgctgcccggtggctctggccccgccgggccgttggcccagcccgccggcccctgagctccggtagcccgccgctggaggagctgttcacccggggcgggcccttgcggaccttcctcgagcgccaggcggggtctgaagcccatttgaaggtcaggaggcccgagttgctggcggtgatcaaactgctgaacgagaaggagcgggagctgcgggagactgagcacttgctgcacggtaagggtcgggcccgggggagaggcgtcagagcacattcttgactcttcgtttgacttttccactgcccacactacccgagtttgaaactctttactcacttgcagccgtttttattttggatcagaggtcaggacatcattacgtgctgtgatcccatcctctcctgtgggctctcttgtgctcctttgccacggcgctctgccgccttttacatgcttattagttgtggactcgggcaagagctcattagctcagcaaggataaataaggcactgtccctgtgatgggctccacagcggtgtttctcaaagtgtggtgtggagacccatttgcagtagtatcagggcagtgcttgttaatagcagacttaggactcagaatctcagacctatacgtgggtaaaggtactaaattgggaaattcagtatggcctaagtatagaataggtgggagatgatgtcatagaaacatgaagccagaaaaatagttaagaaccttgcaagacaaagaatttggatttattttttatagaccatggaaagttagcaaatgtttttaagcagagaattcacgtctttgtaaagaaaagttaatggtggcatgcgctgaggataaattggagtattctccagaaacgctggtggctgacaggccagggaggaggcagttgaaacaatccaaagaagaaatggtgataggcatagttctgactcacaaaacattttgagaaacaagttaggatttagtggcttatgccctgagaaggatgagggagagagttagttctaagaaaagtcttaggtttctggcttcagcacgagtggtactgttaattaagatgaaagtataaaagttggaccgaattttttaaaaagatgagttttgcattgaatgccatattaagttaaaaatacctgtgaaaaggaattccaataaagatatctgtactagtctaggagaaaaaattactgacataggagaaaaattgagcccaaataatcatatgagagctctcgagatatacagtacgtggtaaattaaaccttagaagtagatgagaacactcagggaaaatgtgttaagatagaaacaagtctaacaaggccagaaatacacagtatttgaggagcaggcagagaagaaggctataaaaggtcaagaaaaaaacagccagagctttgtgaccctgaagtagataaataaatgaagctgtagaagccaatagaaaatttcaagaagtaagagatccttggccaggcgtggtggctcacgcctctaattccagcactttgagaggctcaggtgggccgatcacttgagcccaggagttcgagaccagcctgggtaacatggcaaaaccctgtctctacaaacaatgcaaaattagctgggcatggtggtgcgtgcctgtggtcccagctacttgagaggctgaggtgggagaatcgcttgaacccgggaggtggaggttgcagtgagccaagatggtgccactgcattccagcctgggtgacagcgcaagaccctgcctc

SEQ ID NO: 10806 - protein, 100 aa, Homo sapiens [sequence omitted]

SEQ ID NO: 10807 - DNA, 1759 bp, Homo sapiens
ttaccttgtcacccaggctggagtgcagcctcaaactcctcttgcttcagcctctgagtagctggaattacaggcttgtaccaccatgcccagctaattgtcagattttttttttttgtagagggggtcttgctgtgtttttcccggctggtctcaaactcccggccttaagcagttgtcccgcttcagcctcccaaagtgctaggattacaggtgtgagccatcatgccctgcctaatatactggctttaaggaagctttcaggtgcccacactctgtcagacttgacttaattcttctaggctttaccaacacccccaaccccatggttgggggtggggcattacaaccaggctgtggtcacctctgaggcacaggtgtcagccacaatgccaccttttccggtgagtcagcgagtttgtctggaatacccctccgtaggtgagagctggggtcctgggctgggaccacgatgggccgtagcttctcaggaagccgaagctggccctggccagagctgtcttgcagacttgagatacagatggcttctttccccctcccgttttctttttgaaaatgtttttaactcggagcatgtgtcggcacggcgttctttccacgaggacagaagctgtcactgcacgcagcagagacactggttctgatccaaagccgattgtggcctgcttctgggtctaattatttggcaggtcaggtgctggggtactgtccagggtgtaatcaagactcaagcatttgggcatgggggtgaggaggaaccatggggaggggaaggaaaaaggagggggtgtgtgacttagcctgtccagaccacagagcgagtcaatccccctggaacagtggcgtccgctgctctgcggggagggtctgcccatgacctggtgtgggagccgaggccgccaccaacttgggcgcccagcccagaccctaggagagggaggagcctggagcagcctttccctggcgagattggccacattccattttcctctctgaccagagagccctctcacccctgggtgtacaggctctttccgctaacagaggccctcctccagccccattgtccccactgtgagaccaggagtgcccctttcccagccccaaaaaatgagtgcgctcccattgtgaggcacagagtgaaagcctcgtgttttagaacggcgggtgggaaggacttgatgcgccgtgttcttgcagaaagggcagggacgataccgccttgtgctttgcctggcacatggtaggggcctaggtatttgggcgaatggagtgatgtccagagaaagcaggactttggctcgggcaaggagtgggtggcagtagggaggactgtggtctgtggaagggtcactgtggctcttggctttctcctactgtccctgccgatggtgacagccagccagcctcctggccgcaccattgtaccgcctctttcttggcttggtcctgggcgtggatgtcagatttgctttgttcatgtaaaatgtggtgggatcatgtctccctcaaatcaaattccaaccaaaatcaaaacaaaacaaatcaagcgtctcagtgaagacagccctgagggttctgttgtctcagcctgggagcctgggagcctggtcgacctcacctgcttttcagattttgccatgtttattgcagacgtccccgtcctggtgctggccactcatcttcattacaggttaattctcacaacctccaggtgtggtatgcagtggttttaagg

SEQ ID NO: 10808 - DNA, 2124 bp, Homo sapiens
  CDS (153)..(1547)
gcagagcggcggcttctctcgcgaggacggacgccattatcgcatctccccgacaaacaccacgagaattccgcagcccacacggtgaccaaaagccagccccactgtgagttgaactctttcgtgttgaccggccactctccgtgctctggatgatgtcggaacacgacctggccgatgtggttcagattgcagtggaagacctgagccctgaccacccagttgttttggagaatcatgtagtgacagatgaagacgaacctgctttgaaacgccagcgactagaaatcaattgccaggatccatctataaagtcattcctgtattccatcaaccagacaatctgcttgcggttggatagcattgaagccaaattgcaagccctggaggctacttgtaaatccttagaagaaaggctggatctggtcacgaacaagcagcacagccccatccaggttcccatggtggccggctcccctctcggggcaacccagacgtgcaacgctgtgcctgggcgtcggcagaacaccattgtggtgaaggtgccgggccaagaagacagccaccacgaggacggggagagcggctcggaggccagcgactctgtgtccagctgtgggcaggcgggcagtcagagcatcgggagcaacgtcacgctcatcaccctgaactcggaagaggactaccccaatggcacctggctgggcgacgagaacaaccccgagatgcgggtacgctgcgccatcatcccctccgacatgctgcacatcagcaccaactgccgcacggccgagaagatggcgctcacgctgctggactacctcttccaccgcgaggtgcaggctgtgtccaacctctcggggcagggcaagcacgggaagaagcagctggacccgctcaccatctacggcatccggtgtcaccttttctataaatttggcatcacagaatccgactggtaccgaatcaagcagagcattgactccaagtgccgcacggcgtggcggcgcaagcagcggggccagagcctggcggtcaagagcttctcgcggagaacgcccaactcgtcctcctactgcccttcagagccgatgatgagcaccccacctcctgccagcgagctcccgcagccacagccgcagccgcaggccctgcactacgcgctggccaacgcacagcaggtgcagatccaccagatcggagaagacggacaggtgcaagtaatcccacagggacacctccacatcgcccaggtgccgcagggggagcaagtccagatcacgcaggacagcgagggcaacctccagatccatcacgtggggcaggacggtcaggtgctgcagggtgcacagctgatcgccgtggcctcctcggaccccgcggcggcgggcgtggatgggtcgccactccagggcagcgacatccaggttcagtacgtgcagctggcgccagtgagtgaccacacggccggggcacagacggccgaagccctgcagcccacgctacagccggagatgcagctcgagcacggggccatccagattcagtgagcggtgcccatggcaccaggagcccctcgccggctccgcctacggcccggcccccacgcgccctgctctcacggcctcggcacaggcagcggctgcacgtgttctgctgaagtgcgtctgaaggccgctgcctccgcggggaacagcatcctatcaactgaaagagcagccgccgccgcccccagccggagacccctttcgtttgagtcctgctgttggtgtcggagcacgaggggaggcacggtgcggagagcgtcgcatatgcgcgggaaatcaagaactatgatatttttctgtttaaacagctttttttaatttgctatggtgtttataacaaaaaagaaaatttgaaaaaaaaaatcccaggggagtagcaggagccctttgctgtgtgctctgtccagtgtcatgagacgggagccctttgctgtgtgctctgtccagtgtcatgaggcaggtgtttgcaaagccagctctcggttccgatggggtattgctgacctacttttctaggggaaatgctcttaaacactgtaattatgcatttctaatgaaataaaatgtatttatgacc

SEQ ID NO: 10809 - protein, 465 aa, Homo sapiens [sequence omitted]

SEQ ID NO: 10810 - DNA, 2298 bp, Homo sapiens
  CDS (107)..(1807)
aggggcagagtagcgatcgtcgccaaagcgcgcggttttatttctctccgctttggacggggcaaactagcttttgggagtgaagcgggtacgcagttatccaacaatgtctggtgagtcaggacagcctgaggctggtccctcacatgcagggctagattggccgaaccctgagaggaatcgggctggggccccgggaggggtgatccgaagagctggttcccaagggcccaggtcctggatccaaaaggttcttgagcagattatggactcacctcgccagtgtgtcaccccctcggaggtggtgcctgtaactgtgctggccgtccagaggtacctgttagaggatgagccacgcgacacggtgcccaagcctcccctttattgctatgatgtgacgatctcagatggggtgtaccaggagaagtgctacctggaccccagcttgaactctctcgtatatcaaaatattcttaaagttggcattcaaatgagaatttccagggtctcatgtctttacaatgagaaaaggataggccaggggatcctgtgcatagataacgtccactgtggggagacttcagacagtatttctttagaaactcccttcagaaatagagcgcaccaggagaaaccagagaggcctttaagaggcgggaagagtcattacctggcgctgtggaataacgaagatccctatggagatatctggttaacagacaagcaacctgaggaacacaactttagcgataccaaaataatttccctttctcatcttgaaatgacctggactaacagaagaaattttcctgcattgcttgtgaggatcttacataaatcaaaactgcgatactatggaaaacctgataaaaagatgattgaaccatatcagacctttttggaagttgctgacagttcaggcacagtgtcagtgattatgtggaatgccctgtgtcctgagtggtataaaagtttgcgggttggtttagttcttctgcttcaagactattctgttaaaaagagttatccattcagaatacagcctgtccccgtggatccacagatcaaactaatttctacaatggaaatctgcctgaatcttcgagatcccccaacaaatataattatcattccagaaaagcaggtgaaaccagaatggagactgccaaagctaaatcaccgatttaccacaaggtcagaactggatgatatgccagaaaattgcatctgtgatgttattggccttttagtttttgtaggaagggtccagcggtcaaaaaagaaagaaaaccgtgaagatttttggtcatatcgctggattcacattgctgacggtacttcagaacaaccatttatagtggaactgttttcaacatcgcagccagaaatctttgaaaatatttacccaatggcatattttgtgtgtacacagttgaaagttgtcagaaatgacaatcaagtacctaagctgctttacctcaccactacaaatgagagtggagtgtttattactggtcatagaggccagccgtatacgtatgatgccaaggtaaaaaactttattcaatggattagaacaaagtctgattccggggaacagaagaatatggttattggtggatattacccctatccaccagtgccagagacattttccaagtatagtagttctattaaaggtactaatgtaattgccagtccttctaaatatgtttatattttatatgtatggcttatgctatttcaattagtcatctttattcttttcttttatgggagtgatctaaagtttagcaacattcaccgataatagctttgtcttaatgcagatctaaaaatatatgtcacgtattttctatatagttttccctatatctcgcatggtgctctaaagattaatactttgatttttatcagactggaagaaaagagaaaacacagatgataaccaactggagatataggttgagtattcctaatccaaaaatccgaaatctgaaatgttccaaaacctgaaacttcttttttttttttgagacggagtctcgctctgtcgcccaggctggagtgcagtggcgggatctcggctcactgcaagctccgcctcccgggttcacgccattctcctgcctcggcctcccaaagtgctgggattacaggcgtgagccaccgcgcccggcctaacctgaaacttcttgagtactgaagtgacactcaaagaactactcattggagcagttcagattttggaattttgcattagggaagctgaactgataagtataatacaaatattcc

SEQ ID NO: 10811 - protein, 567 aa, Homo sapiens
MSGESGQPEAGPSHAGLDWPNPERNRAGAPGGVIRRAGSQGPRSWIQKVLEQIMDSPRQCVTPSEVVPVTVLAVQRYLLEDEPRDTVPKPPLYCYDVTISDGVYQEKCYLDPSLNSLVYQNILKVGIQMRISRVSCLYNEKRIGQGILCIDNVHCGETSDSISLETPFRNRAHQEKPERPLRGGKSHYLALWNNEDPYGDIWLTDKQPEEHNFSDTKIISLSHLEMTWTNRRNFPALLVRILHKSKLRYYGKPDKKMIEPYQTFLEVADSSGTVSVIMWNALCPEWYKSLRVGLVLLLQDYSVKKSYPFRIQPVPVDPQIKLISTMEICLNLRDPPTNIIIIPEKQVKPEWRLPKLNHRFTTRSELDDMPENCICDVIGLLVFVGRVQRSKKKENREDFWSYRWIHIADGTSEQPFIVELFSTSQPEIFENIYPMAYFVCTQLKVVRNDNQVPKLLYLTTTNESGVFITGHRGQPYTYDAKVKNFIQWIRTKSDSGEQKNMVIGGYYPYPPVPETFSKYSSSIKGTNVIASPSKYVYILYVWLMLFQLVIFILFFYGSDLKFSNIHR

SEQ ID NO: 10812 - DNA, 1966 bp, Homo sapiens
  CDS (43)..(1599)
tggatgaccatttgatgccagttgggaaagagactgttaaatatgaagaggagcttgatttgcatgatgaagaagagaccagtgttccaggaagaccaggttccacgaaacgaaggcagtgctacccaaaagcagttagtattgattccagagtgtttgagggatagttatcccagacctgatcagccctgttacctgtatgtgataggaatggttttaactacacctttacctgatgaactcaactttagaaggcggaagctctatcctcctgaagataccacaagatgctttggaatactgacggccaaacccatacctcagattccacactttcctgtgtacacacgctctggagaggttaccatatccattgagttgaagaagtctggtttcatgttgtctctacaaatgcttgagttgattacaagacttcaccagtatatattctcacatattcttcggcttgaaaaacctgcactagaatttaaacctacagacgctgattcagcatactgtgttctacctcttaatgttgttaatgactccagcactttggatattgactttaaattcatggaagatattgagaagtctgaagctcgcataggcattcccagtacaaagtatacaaaagaaacaccctttgtttttaaattagaagattaccaagatgccgttatcattccaagatatcgcaattttgatcagcctcatcgattttatgtagctgatgtgtacactgatcttaccccactcagtaaatttccttcccctgagtatgaaacttttgcagaatattataaaacaaagtacaaccttgacctaaccaatctcaaccagccactgctggatgtggaccacacatcttcaagacttaatcttttgacacctcgacatttgaatcagaaggggaaagcgcttcctttaagcagtgctgagaagaggaaagccaaatgggaaagtctgcagaataaacagatactggttccagaactctgtgctatacatccaattccagcatcactgtggagaaaagctgtttgtctccccagcatactttatcgccttcactgccttttgactgcagaggagctaagagcccagactgccagcgatgctggcgtgggagtcagatcacttcctgcggattttagataccctaacttagacttcgggtggaaaaaatctattgacagcaaatctttcatctcaatttctaactcctcttcagctgaaaatgataattactgtaagcacagcacaattgtccctgaaaatgctgcacatcaaggtgctaatagaacctcctctctagaaaatcatgaccaaatgtctgtgaactgcagaacgttgctcagcgagtcccctggtaagctccacgttgaagtttcagcagatcttacagcaattaatggtctttcttacaatcaaaatctcgccaatggcagttatgatttagctaacagagacttttgccaaggaaatcagctaaattactacaagcaggaaatacccgtgcaaccaactacctcatattccattcagaatttatcagttacgagaaccagccccagcccagcgatgaatgtactctcctgagtaataaataccttgatggaaatgctaacaaatctacctcagatggaagtcctgtgatggccgtaatgcctggtacgacagacactattcaagtgctcaagggcaggatggattctgagcagagcccttctattgggtactcctcaaggactcttggccccaatcctggacttattcttcaggctttgactctgtcaaacgctagtgacggatttaacctggagcggcttgaaatgcttggcgactcctttttaaagcatgccatcaccacatatctattttgcacttaccctgatgcgcatgagggccgcctttcatatatgagaagcaaaaaggtcagcaactgtaatctgtatcgccttgg

SEQ ID NO: 10813 - protein, 519 aa, Homo sapiens
MKRSLICMMKKRPVFQEDQVPRNEGSATQKQLVLIPECLRDSYPRPDQPCYLYVIGMVLTTPLPDELNFRRRKLYPPEDTTRCFGILTAKPIPQIPHFPVYTRSGEVTISIELKKSGFMLSLQMLELITRLHQYIFSHILRLEKPALEFKPTDADSAYCVLPLNVVNDSSTLDIDFKFMEDIEKSEARIGIPSTKYTKETPFVFKLEDYQDAVIIPRYRNFDQPHRFYVADVYTDLTPLSKFPSPEYETFAEYYKTKYNLDLTNLNQPLLDVDHTSSRLNLLTPRHLNQKGKALPLSSAEKRKAKWESLQNKQILVPELCAIHPIPASLWRKAVCLPSILYRLHCLLTAEELRAQTASDAGVGVRSLPADFRYPNLDFGWKKSIDSKSFISISNSSSAENDNYCKHSTIVPENAAHQGANRTSSLENHDQMSVNCRTLLSESPGKLHVEVSADLTAINGLSYNQNLANGSYDLANRDFCQGNQLNYYKQEIPVQPTTSYSIQNLSVTRTSPSPAMNVLS

SEQ ID NO: 10814 - DNA, 1892 bp, Homo sapiens
agacaatgctgtaattaggtgaactctaaaactgcaacatctgacaaatagctttaaaaatacaatgattataagtatggaatcagtgaaaatatttagtttgtatttttatgtccaaacttttccattttagattcctttatagacacgtcagcctaaaaatcagcctattcgggtgttcttttgaatatctcctggcatttttgtatctaactttgttcaatctgggaatttcagttttcaatatccttgaaaatggcttaagtgataacttccgtttcagttaaaaggaagcccgaagttgtgtttgtgctgcccacaggacagtgggagttacagttcatatcaggatgaccctacatacccaggtcagattgacgggaccagaagggaacatcgacttctaatccagctttcttgtttaattatgacctaaatctaatttacttccactgaaccatccaagacctctggcaggcagggaaatgggcagtgatgcaaaaaagggagactctttggagcttttatgaatagttcatggtgaggacagaacttttctactttcagacagactgcttgctagttttatgaattcagcacacgaattatgctgtgttgctcacattcaaaccaaaccaacgactatgtttaatgaactcagtattcaaatttattatatatgcgtatatatgtatatatggatcccttatatttagatttaactcgtagttttatttgaaagtagaaaagaactctacaaaaacgggaagaatgtgtctttcttcccttcttgacttctaataggtgtcattgaaatgtaaaatctaagtatgaaattatgaaaggacattctttaattactgcccactcaacacatatttaatatgtgcccagattattctaaaatcttaaaaaaagatgcatatagtgaaattttttaaatggatatacttttaataaagttttataactcactgacaaaacatatttcaatagtatatgagtatgagatttcttatcaattatgagtgaaatattctatctgaatgcattggaaggcatttacagtatttgctttcaacagttactgagtatgacattttagcatgaaatatatcaaacacatcatttgaaggacatatgtaatcttgactatggttatggtttttttgtatgtattccttgttttcatattgatagcatctaattcttttgacaatcttaatatgtagattcatttaaattttaagacagttcagtgcatatatagtagaagccttaagaaaaaagaaaatgagcaagcaaatatttgaagaaatgtataaaaccatagatttctttcagaaaaaaaaaaacaggcataggaacagttttctcttcatatattatgattatgaataataggaaagttgtattaattcagtatttgtcattatgcagtattttaatacctacataagtctattccattattatattttgcgcttggcatatttattcctttatgcttttaatcactaacatattttacttaagagtataaaactatgctaaataaattgtattgtatatggaatatgcttgccattatgaagaacagctgggtataccattatttcaagtaataaatctgaattctattagtttaaaaattgtaaaattcaagttaaatgacgtgtatgatataagctgaacatattttctatagcccttaatttagttgtgttaatttttcgaggtgatgtatcaacagctttttttattttgcatttgttttttcaatgtgtttacattgtatgaattgagctttttgcccacagattcttgatttgtagttgtttggcaggatttttctttgtgatataatcacttctatagaaaatatgatgtac

SEQ ID NO: 10815 - DNA, 1453 bp, Homo sapiens
  CDS (143)..(1318)
actctccctgcaggtgactgacggcgccggccgcccctgcccgtcgcccgcccgctgctgccgcccgcccggggtgtggagcccggccgctgctcgcgggctgagtgtctgtcgctgctgccgcctccacccagcctccgccatggacctcttcggggacctgccggagcccgagcgctcgccgcgcccggctgccgggaaagaagctcagaaaggacccctgctctttgatgacctccctccggccagcagtactgactcaggatcagggggacctttgctttttgatgatctcccacccgctagcagtggcgattcaggttctcttgccacatcaatgtcccagatggtaaagactgaagggaaaggagcaaagagaaaaacctccgaggaagagaagaatggcagtgaagagcttgtggaaaagaaagtttgtaaagcctcttcggtgatctttggtctgaagggctatgtggctgagcggaagggtgagagggaggagatgcaggatgcccacgtcatcctgaacgacatcaccgaggagtgtaggcccccatcgtccctcattactcgggtttcatattttgctgtttttgatggacatggaggaattcgagcctcaaaatttgctgcacagaatttgcatcaaaacttaatcagaaaatttcctaaaggagatgtaatcagtgtagagaaaaccgtgaagagatgccttttggacactttcaagcatactgatgaagagttccttaaacaagcttccagccagaagcctgcctggaaagatgggtccactgccacgtgtgttctggctgtagacaacattctttatattgccaacctcggagatagtcgggcaatcttgtgtcgttataatgaggagagtcaaaaacatgcagccttaagcctcagcaaagagcataatccaactcagtatgaagagcggatgaggatacagaaggctggaggaaacgtcagggatgggcgtgttttgggcgtgctagaggtgtcacgctccattggggacgggcagtacaagcgctgcggtgtcacctctgtgcccgacatcagacgctgccagctgacccccaatgacaggttcattttgttggcctgtgatgggctcttcaaggtctttaccccagaagaagccgtgaacttcatcttgtcctgtctcgaggatgaaaagatccagacccgggaagggaagtccgcagccgacgcccgctacgaagcagcctgcaacaggctggccaacaaggcggtgcagcggggctcagccgacaacgtcactgtgatggtggtgcggatagggcactgaggggtggcgcgcggccaggagcacgcatggtattgacttaaaaggttcattttgtgtgtgtgcacattgtgtgttttgtgtactcctgtgggactcccatggttgtaaataaaggtttctcttttttttcct

SEQ ID NO: 10816 - protein, 392 aa, Homo sapiens [sequence omitted]

SEQ ID NO: 10817 - DNA, 1303 bp, Homo sapiens
tgtcacatgacgaaagggagcaagagagagaatgggaggtcccagacttttataaacaaccagatctcacgtgaactgagtgagaacacacttatcaatcaccatggggactcatgagaggaccaccccctaccccatgattcagtatctcccactaggccccacctctgacattggggatcacatttcaacatgaaatttgcaggggacacacatccaaaccatagcatatggttaaggaagattaagaaattcaatagcacattgcctttattatcatcgaggatgaagatgttacggttttcatatgtcattaagtaaacaaaatgacgtgtgccacacatagtagctcatagttcactgggaacgcagttacttgttcagtctgttttctacaaagtcatgtgagatactgatttttccttcgcattgttgatatctgggtgagaataaggtatttgttaaattggtatttcccttttttgtgttttaagtgatagtggtgtcattcaacttatctttgcagttgaatgaagaatgaatgacattgagcattattgttttgtttatccatgtccattattagtttttctttgcttttgccagcagtgtgactattggccctgcccagagccatttgcaatcttacaatagttaagtgttagcactgaaagatactaatgttaagaacagatgtctactgtctgattattgggaaaatattagtgtttcttagtagaagcaacacagttttttttaatactagatttctcattctgagtctatacacaattttctatgaatcataaaactttgataattatgatagtctaatattttactagttgtaaaaatgaaacttattttgctgtgatgtttcacaattgaaaagcctttttttttttttaaggcgtagtactaattcttaagacagtgtttatctaattgtccagtcccaggattcgttggaatcagagacattttcttagggggtctataagaatttcctttaaaaggcatccgtaggctgcgtgcagtggctcacgcctgtaatcccagcactttgggagtccaaggtgggcggttcacctgaggtcaggagtttgagaccagcctggccaaggtggtgaaaccctgtactaaaaatgtaaaaattagctggacgtggtggcgggtgcctgtaatcccagctactcaggaagctgagtcagaagaatcgcttgaacttgggaggcagaggttgcagtgagctgagattgcaccactgcactccagcctgggagacagagcaaggctctatctc

SEQ ID NO: 10818 - DNA, 1940 bp, Homo sapiens
  CDS (1566)..(1928)
tttttctgatcttggcaaaaatgtttccccacgtacaaactgatgtccttgtgcgggtcaagggacctttgctagctgcctgttcttcagagagccgtgagctctgttttgttgctctttgtcatgtacgccagatcttgcatagtttaccaggtcactttagcagccactacaaaaagtttttttgctcctactcggagccccactacatcaaactacagaaagtggaggtgctgtgtgaactggtgaacgatgagaatgtgcagcaggtgctagaggagcttcgagggtactgcacggatgtgtctgcggactttgcacaggctgccatctttgccataggtggcattgccaggacttacacagatcaatgtgttcagattttaacagagttgctgggtcttcgacaagagcacattaccacagtggtggtgcagactttccgagacctggtttggttgtgtcctcagtgtactgaagctgtatgtcaggccctgcccggctgtgaagagaacattcaagatagtgaggggaagcaagcacttatttggctacttggtgtccatggggaaagaattcctaatgctccttatgtgttagaggactttgttgagaatgtgaagtcggaaacatttccagctgttaagatggagctgctcactgctttgctgcgccttttcctctcccgacctgctgagtgccaggacatgctaggacgtttgttgtattactgcataggtgggtttttcagaaggaaatagtatttgccatgacccatagtaaaaattcttaatagctttcattgtttggtgagtcacgtctgggacccgagaagaaaatgtgaatgcttcctaggttttcctctctccttcatttttttctcctattatggttggcacaagagtaggaggaaagtggttttgtttttaatgaagtcaatctgttgtcttacctcagaggaagaaaaagatatggctgtacgggaccgaggtctcttctattatcgcctcctcttagttggcattgatgaagttaagcggattctgtgtagccctaaatctgaccctactcttggacttttggaggatccggcagaaagacctgtgaatagctgggcctcagacttcaacacactggtgccagtgtatggcaaagcccactgggcaactatctctaaatgccagggggcagagcgttgtgacccagagcttcctaaaacttcatcctttgccgcatcaggtaaaaacagtccttaccttaaatcttgtcatgataaatctttaccttttcaatgattggtggaaagtagagtatcttagcactaaacctcagactgttgcctgaatttgaagcatttgtgagcaagaaagaggttcgtcactggttatttcagccatttgtccaaaaataaaagtcacattgtgtacatttgggaatttggataaaaaacttagctcctacagattaagaacatctttcacacaagttttctgtctcttttaggacccttgattcctgaagagaacaaggagagggtacaagaactccctgattctggagccctcatgctagtccccaatcgccagcttactgctgattattttgagaaaacttggcttagccttaaagttgctcatcggcaagtgttgccttggcggggagaattccatcctgacaccctccagatggctcttcaagtagtgaacatccagaccatcgcaatgagtagggctgggtctcggccatggaaagcatacctcagtgctcaggatgatactggctgtctgttcttaacagaactgctattggagcctggaaactcagaaatgcagatctctgtgaaacaaaatgaagcaagaacggagacgctgaatagttttatttctgtattagaaactgtgattggaacaattgaagaaataaaatcataacagagtctt

SEQ ID NO: 10819 - protein, 121 aa, Homo sapiens
MLVPNRQLTADYFEKTWLSLKVAHRQVLPWRGEFHPDTLQMALQVVNIQTIAMSRAGSRPWKAYLSAQDDTGCLFLTELLLEPGNSEMQISVKQNEARTETLNSFISVLETVIGTIEEIKS

SEQ ID NO: 10820 - DNA, 2082 bp, Homo sapiens
  CDS (39)..(1394)
tgcattatccaacaggtgaagttccatttccaagaggcatgaaagggcaagactttgaaaaatcagatcatggttcttctcaaaataccagcatgtctagcatctatcagaattgtgcaatggaggttttgatgtccagttgttcacagtgtagagcttgtggagctttagtttatgatgaagaaattatggctggatggacagcagatgactcaaatttgaatacagcttgtccattctgtaaaagcaacttcttgcctcttctcaatatagaattcaaagatttgagaggttctgcaagctttttcctgaaaccaagtacctctggtgacagtttacaaagtggaagcattccattggcaaatgaatccttggagcacaaacctgtatccagtttagcagaacctgacttgatcaactttatggacttcccaaaacataaccagatcataactgaagaaacaggctctgcagttgaaccaagtgatgaaataaagagagccagtggagatgtccaaactatgaaaatttcatctgtgcctaatagtttatcaaagcgaaatgtgtctttgactcgaagtcacagtgttggaggcccattgcagaatattgactttacccagcgaccgtttcgtggcatctcaacagttagtcttccaaatagtctgcaggaagttgtggatcctttaggaaaaagacccaatcctccccctgtttctgtgccctacttgagtcctctagtactccgtaaagaacttgaatctttgctagaaaatgaaggtgatcaggtgattcatacatcttctttcatcaatcaacatccaatcattttctggaacctcgtttggtatttcagacgtttggaccttcctagtaacttgccaggacttatcctcacatctgaacattgtaatgaaggtgtacagcttcctctgtcatctctgtcccaggatagcaaacttgtgtatattcagctgttatgggataatatcaaccttcatcaggaaccaagagaacctctgtatgtctcatggaggaattttaattctgaaaagaaatcatctctcctgtcagaggaacaacaagaaacaagcactttagtagaaaccatcaggcagagtattcagcacaataatgttcttaaacccatcaacctactttcacagcaaatgaagccaggcatgaaaagacaaaggagtttatacagagaaatcctcttcttatcattagtgtctctaggaagagagaatattgatattgaggcatttgacaatgaatatggaattgcatacaatagtctgtcttcagagattcttgaaaggttgcagaaaattgatgctccaccaagtgccagtgtcgagtggtgcaggaagtgttttggagcgcctctcatttaaatagagattcactagaatgttgacacacaaggcttggggattagatttcatctggaaacattcaagtttttttttccaaatcgtaagaactggtgaatacggaattgaagtaactcttggggacaatatataatgaattatgattcatattgcattaccttgaaatatgaagtgccatttgaatgtcccagggcttattaatattgaagattttcaacccctgaactgcttttctgcctctgtggaaaactactttgggattcttcagtatttgtagtagtttgatagaaataatgaggaaccatattcattctaggcattgtttatatttgaagttactgagtttgaggaatggcaaattaaatttgcctaacccccaaaacaaatgaaatatctcaattataaaagcaacatggccgggcacggtggctcaggcctgtaatcccagcactttgggaggctgagcaaggtgggtggatcacttgaggccaggagttcgagaccagcctggccaacacggtgagaccctgtctttactaaaaatacaaaaattagccaggcgcaccactgtagtcccagctactcaggctgaggcaggagaatcgcttgaactgaggcagaggctacagtgagtggagatcacgccactgcaactccagcttgggtgacggagtgagaccgtctc

SEQ ID NO: 10821 - protein, 452 aa, Homo sapiens [sequence omitted]

SEQ ID NO: 10822 - DNA, 2033 bp, Homo sapiens
  CDS (3)..(1466)
agatgtccggccggtctaagcgggagtctcgcggttccactcgcgggaagcgagagtctgagtcgcggggcagctccggtcgcgtcaagcgggagcgagatcgggagcgggagcctgaggcggcgagctcccggggcagccctgtgcgcgtgaagcgggagttcgagccggcgagcgcgcgcgaggccccggcttctgttgtcccgtttgtgcgggtgaagcgggagcgcgaggtcgatgaggactcggagcctgagcgggaggtgcgagcaaagaatggccgagtggattctgaggaccggaggagccgccactgcccgtacctggacaccattaacaggagtgtgctggactttgactttgagaaactgtgttctatctccctctcacacatcaatgcttatgcctgtctggtgtgtggcaagtactttcaaggccggggtttgaagtctcacgcctacattcacagtgtccagtttagccaccatgttttcctcaacctccacaccctcaagttttactgccttccagacaactatgagatcatcgattcctcattggaggatatcacgtatgtgttgaagcccactttcacaaagcagcaaattgcaaacttggacaagcaagccaaattgtcccgggcatatgatggtaccacttacctgccgggtattgtgggactgaataacataaaggccaatgattatgccaacgctgtccttcaggctctatctaatgttcctcctctccggaactactttctggaagaagacaattataagaacatcaaacgtcctccaggggatatcatgttcttgttggtccagcgttctggagagccgatgagaaagctctggaaccctcgaaatttcaaggcacatgcgtctccccatgagatgcttcaggcagttgtactttgcagtaagaagacttttcagatcaccaaacaaggagatggcgttgactttctgtcttggtttctgaatgctctgcactcagctctggggggcacaaagaagaaaaagaagactattgtgactgatgttttccaggggtccatgaggatcttcactaaaaagcttccccatcctgatctgccagcagaagaaaaagagcagttgctccataatgacgagtaccaggagacaatggtggagtccacttttatgtacctgacgctggaccttcctactgcccccctctacaaggacgagaaggagcagctcatcattccccaagtgccactcttcaacatcctggctaagttcaatggcatcactgagaaggaatataagacttacaaggagaactttctgaagcgcttccagcttaccaagttgcctccatatctaatcttttgtatcaagagattcactaagaacaacttctttgttgagaagaatccaactattgtcaatttccctattacgggacaggcaaatggtatgaattacaagacctccaggtgactgacatccttccccagatgatcacactgtcagaggcttacattcagatttggaagaggcgagataatgatgaaaccaaccagcagggggcttgaaggaggcgtctagggctttgctcccaagggctgtggctgatgatggtaaataagaacacagaagctgtagctgaacacaggctggctggtgggcttcctaggccagcccagcttgtatgggttctggctacaccagagcaccaagagcccacttgcctgggatggccccacactgtcactcagctgttctttgatcatttttttctagattgatgctcctttctcccatgcattgagctcccatctagcttcagcagggcagaacccttctccagatgtgtgtaacttatgtcttgagtatctgggagtagttgaagaacagataattccttccaaacatcaagccttgggattcttggagcaagcagaaagccagtaacttcgctctgttagaggtggaggattttcctatggttccccccatttcctgatttgtatttttagatggattaaatagtctcctgttttt

SEQ ID NO: 10823 - protein, 488 aa, Homo sapiens [sequence omitted]

SEQ ID NO: 10824 - DNA, 1445 bp, Homo sapiens
  CDS (215)..(694)
ccgcgttggggagcagagccaggctggggacccaggcttggtgtcagcctacggtcctgggctcgagggaggcactaccggtgtgtcatcagagttcatcgtgaacaccctgaatgccggctcgggggccttgtctgtcaccattgatggcccctccaaggtgcagctggactgtcgggagtgtcctgagggccatgtggtcacttatactcccatggcccctggcaactacctcattgccatcaagtacggtggcccccagcacatcgtgggcagccccttcaaggccaaggtcactggtccgaggctgtccggaggccacagccttcacgaaacatccacggttctggtggagactgtgaccaagtcctcctcaagccggggctccagctacagctccatccccaagttctcctcagatgccagcaaggtggtgactcggggccctgggctgtcccaggccttcgtgggccagaagaactccttcaccgtggactgcagcaaagcaggcaccaacatgatgatggtgggcgtgcacggccccaagaccccctgtgaggaggtgtacgtgaagcacatggggaaccgggtgtacaatgtcacctacactgtcaaggagaaaggggactacatcctcattgtcaagtggggtgacgaaagtgtccctggaagccccttcaaagtcaaggtcccttgaatcccaaaagtgcctccccagcctcagcccccacctccagccacacacacattacacacacacacacacacacacaaatgtgccacacccagacacgcacagaatcagacactacaaacacctgccttgggggtgaagtgaaggcccagcctccccaccccaccgcgccccaggggttggagaaccttgtctgtgtcaggacagtgtccctccctgggaatgtgacatgagggccgactggggccaggctcaggggcagaggctgggacacaaggggctggcgagggctgcgaggccagggaagccctgagtttctggcggggctgagcagtgggggagcattgtgttgtgggtgtctgtgtgtgaggtcaccctcaaactgcaccgccggccagataccctcctgaccccgaggacttggtctggtctctctggtggctacaaccccagagttttaaggacttggaaaggaaagcacaatcagagaagaaaacagcccccaaaccagcaggagtggcctggcacatggaccggcctgagcgatgtgcactccacccaagccaggctcccagggggcctgatttctctctcactgtctctttttttaaaatggttgcacggctctgccccatggggggccttttttacacactgcgaggcccagctttctaggggacttttgcacatgtcatgcagctcagctgggagctgcttaggtggaaaactccaaataaagtgcggctgtcgc

SEQ ID NO: 10825 - protein, 160 aa, Homo sapiens
MAPGNYLIAIKYGGPQHIVGSPFKAKVTGPRLSGGHSLHETSTVLVETVTKSSSSRGSSYSSIPKFSSDASKVVTRGPGLSQAFVGQKNSFTVDCSKAGTNMMMVGVHGPKTPCEEVYVKHMGNRVYNVTYTVKEKGDYILIVKWGDESVPGSPFKVKVP

SEQ ID NO: 10826 - DNA, 1501 bp, Homo sapiens
  CDS (220)..(1500)
agaagttaggggctgcagcggcgctggctttaggtgaacgacgtggtgaggagtgggtttcgggcatgagaagtcacagggccgtttcctagtctctcttcacttctttgggtcttctcagagaaagaaggctgccgtgggtaggctgggggcggagactatcgggaagagaaaattacttttcccactgaaacacacccaagtatatgcccagccttcatgaaagtgaacagagaaacgaagcgcctttatgtgggtggccttagccaggacatttctgaggcagacctacaaaatcagttcagcagatttggagaagtttcggatgtggagatcatcacacggaaagatgaccaaggaaacccacagaaagtttttgcatatatcaacatcagtgtagcagaagcggacctgaaaaaatgtatatctgttttaaataaaacaaaatggaaaggtggaacattacaaattcaactagcaaaagaaagctttctgcacagattggcccaagagagagaagcagcaaaagctaagaaagaagaatcaacaacaggtaacgccaacttgttagaaaagacaggaggagtggatttccatatgaaagctgtgccagggacagaagtgccagggcataagaattgggttgtgagcaaatttggaagagtcttacctgttcttcaccttaaaaatcaacataaacgtaaaatcatcaaatatgatccctcaaagtactgccacaacctgaagaagataggggaggatttctcaaacaccattcctatatccagcctgacttgggaattagaaggagggaatgaccctatgagtaagaaacggcgaggagagttctctgactttcatggccctcccaagaagataataaaagtgcagaaggatgagagttccactgggtctctggccatgagtacaaggcccaggagggtaatagagagaccacccttaacacagcaacaggctgcacaaaaaagaacttgtgattccattactccttctaaatcatctcctgtacctgtttctgatactcagaaacttaaaaatctaccttttaagacttctggcttggaaactgccaagaagagaaacagcatttctgatgatgatactgattctgaagatgaattgagaatgatgattgcgaaagaggaaaacttacagagaactacacaaccctcaataaatgaatctgaaagtgatccttttgaagttgtaagggatgatttcaaatcaggcgttcacaaactgcattctttaataggtttaggtatcaaaaatcgtgtctcttgccatgatagtgatgatgatattatgagaaatgatcgtgagtatgactcaggagatacagatgaaattattgcgatgaaaaaaaatgttgctaaggtcaaaaacagtacagaattttcacaaatggaaaaatctacgaagaaaacttctttcaaaaatagagaaaactgtgagctttctgatcactgtattaaactac

SEQ ID NO: 10827 - protein, 427 aa, Homo sapiens
MKVNRETKRLYVGGLSQDISEADLQNQFSRFGEVSDVEIITRKDDQGNPQKVFAYINISVAEADLKKCISVLNKTKWKGGTLQIQLAKESFLHRLAQEREAAKAKKEESTTGNANLLEKTGGVDFHMKAVPGTEVPGHKNWVVSKFGRVLPVLHLKNQHKRKIIKYDPSKYCHNLKKIGEDFSNTIPISSLTWELEGGNDPMSKKRRGEFSDFHGPPKKIIKVQKDESSTGSLAMSTRPRRVIERPPLTQQQAAQKRTCDSITPSKSSPVPVSDTQKLKNLPFKTSGLETAKKRNSISDDDTDSEDELRMMIAKEENLQRTTQPSINESESDPFEVVRDDFKSGVHKLHSLIGLGIKNRVSCHDSDDDIMRNDREYDSGDTDEIIAMKKNVAKVKNSTEFSQMEKSTKKTSFKNRENCELSDHCIKL

SEQ ID NO: 10828 - DNA, 1155 bp, Homo sapiens
  CDS (49)..(855)
attaaagtttcctgtagtgaaagtcagttacaaagccagtgtggacaaatgaaacagacaaatattaatttggaaagtaggttgttgaaagaggaagaactgcgaaaagaggaagtccaaactctgcaagctgaactcgcttgtagacaaacagaagttaaagcattgagtacccaggtagaagaattaaaagatgagttagtaactcagagacgtaaacatgcctctagtatcaaggatctcaccaaacaacttcagcaagcacgaagaaaattagatcaggttgagagtggaagctatgacaaagaagtcagcagcatgggaagtcgttctagttcatcagggtccctgaatgctcgaagcagtgcagaagatcgatctccagaaaatactgggtcctcagtagctgtggataactttccacaagtagataaggccatgttgattgagagaatagttaggctgcaaaaagcacatgcccggaaaaatgaaaagatagaatttatggaggaccacatcaaacaactggtggaagaaattaggaaaaaaacaaaaataattcaaagttatattttacgagaagaatcaggcacactttcttcagaggcatctgattttaacaaagttcatttaagtagacggggtggcatcatggcatctttatatacatcccatccagctgacaatggattaacattggagctctctttggaaatcaaccgaaaattacaggctgttttggaggatacgttactaaaaaatattactttgaaggaaaatctacaaacacttggaacagaaatagaacgtcttattaaacaccagcatgaactagaacagaggacaaagaaaacctaaaacaagcctcttgctcagtaaagagacaaaagccacacaggagtaggtgccactgacctctattgttggagactttgttccactttttgtttcagccagtaaaaatattgttttgcttcatctgtacacaaaaaaatacccttttacaatatgaatgcattgctgtatatactgtaagactgaaagctttgatgaaatttgtttttgtatggtgcaatatgacagcctgtcattgaatctaaacaacttaatttgcttgtattcataagaagtgttgaacattacaagggcttttat

SEQ ID NO: 10829 - protein, 269 aa, Homo sapiens
MKQTNINLESRLLKEEELRKEEVQTLQAELACRQTEVKALSTQVEELKDELVTQRRKHASSIKDLTKQLQQARRKLDQVESGSYDKEVSSMGSRSSSSGSLNARSSAEDRSPENTGSSVAVDNFPQVDKAMLIERIVRLQKAHARKNEKIEFMEDHIKQLVEEIRKKTKIIQSYILREESGTLSSEASDFNKVHLSRRGGIMASLYTSHPADNGLTLELSLEINRKLQAVLEDTLLKNITLKENLQTLGTEIERLIKHQHELEQRTKKT

SEQ ID NO: 10830 - DNA, 1159 bp, Homo sapiens
taaaaaatgtttacagtaatggggtctcactacgtttcccagcctggtcttgaacccctggcctcaagcaatcctctttcctcagcctcccaaagtgatgggattacaggcataagccactgcgcccagctccccgttaattgtatgctgaacaaaccttccattccaggaacaaatcccacttggtcgtggcttataatccttttcatatgctgaatttgatttgctagtattttgttgaggatttttgcatcaatattcatcggagataatggtctgaagttttctttttttgtggtgtctttgtctggctttggaatcagggtaaagctggcctcatggaatgagcttggaaatgttccctcctcttcatttttttggaagagtttcaggaggattggcgataattcttctttaaatgtttggtagcattctccgatgaagccatctggtcctgggcttttctgtgttgggaggtttttgattactgattcaatctctctcattattggtctgatcagactttccatttcttcatgattcaatcttggtaggttgtgtgtttcctctagaaattggtccatttcttctaggttattaaatttgtaggcatacaattcttcataatattctcttataatcctttttatctctgtcgtattggtagtaatgttccctctttcatttctgattgtagttattgaatgttctttttttttcttaatctagctaaggatttgtcagtttggttgatcttttcaaagaaccaactcttagttttgttggttgtatttgtttatctctgctctgatttttattattgccgtttttatgctggttttgggtttagttcttttcaagttgaaataaaaggatggggccgggtgaagtggctcatgcctataaatcccaacactttgggaggccgaggtgggtggatcacaaggtcaggagttgaagatcagcctggccaacatggtgaaacctcatctctactaaaaatacaaaattagccgggtgtggtggcacacacctgtaatcccagctactcaggaggctgaggcaggagaatcactttagcctgggaggtggaggttacagtgagctgagatcatgccattgcactccagcctgggcaaaaagagtgaaactccatctc

SEQ ID NO: 10831 - DNA, 1318 bp, Homo sapiens
ttctaatgaggacataagtgagggacactggaaagaccaaaagagaatggaaagtactgacatggtagttgcagggtgctagtgagcagtcatgcccccaaatcagccaccttacatagaactccccaagttcagggccactggatggggttgtgacgcagtcaagcagggcccagaaagcatacaagcagttggtttcatctcctgtaagaaagtggcatcatccctgctttgtaaacggagaacctgacacacaccaagagcactcctagccgtggaaaaaagccgctagaacccgaggttagtctgatttttggttcctctgaaaattagcttttgctggatgctagattcagttctggacttactgagtagtctctgggtttttgacattgttaggcactgtgggaaaattataacaggtacgtctgcgctgagttgcttgctaattcctaggagagacttggacattttggacaattaagaagcaatacaggccaggcacggtggctcacgtctgtaatcccagcactttgggaggctgaggcgggtggctcatctgaggtcaggagttcgagaccagcctgaccagcatggtgaaaccccatctctactaaaaatacaaaattagccaggcgtggtggcacatgcctgtaataatcccagctactcgggaggctgaggcaggagaattgcttgaactggggaggcaaaggatgcagtgatccgagatcacgccattgcactccagcctgggcaacaagagtgaaattctgtctcaaaaaaacaaacaaacaaaaagaagcaatacagctctttgagaaagatgcagtcataagtggtgcagagttgcagtctgcccattcctgctcctcactcatcgctgttccgaacaagtcagccaggaagccgcactgcaccaaggcttttaaagataccagaaaacacctgtgaagctggaggtgaccattcaccaaattcgaatccctctaatgatccgcagcgtaaaatccctggagaaggtgtgtgctgactggattcagaggaggaaaggaaaagaatgtctaagtgaagggaccagtttgaatgcctgccaagactttgagaatcactataagaaaatctccttgtggtgaaggttcagagacatgggatcgtttccagatgagaatccacaagctacccactgacttgcacagtccttctgagattgttaagcagttgacttccatcagtgttgagccaggaattgaggtggaagtcaccattgcagatgctcaaagtcaactattttaataaactgattagcggttgttat

SEQ ID NO: 10832 - DNA, 1729 bp, Homo sapiens
  CDS (276)..(1052)
gcagcgcctggagcatgagccgggtggtggcgtgcacggaggatcgcgggaggctgccgcctcgggacaccccactcacacagggcaaaaggatgtatacactccatcttcatttaaaacactggaggattggaaaggagaaaaggaacaggacagaaaaaaaaacagagtgttctgaacatcaacacaaagtggaagaaccttaagctgaaggtacagtatattatttacactgaaggggcttgtgtgtggacaagaaagcgctgacagctcaaatggatcccatggaactgagaaatgtcaacatcgaaccagatgatgagagcagcagtggagaaagtgctccagatagctacatcgggataagaaattcagaaaaggcagcaatgagcagtcaatttgctaatgaagacactgaaagtcagaaattcctgacaaatggatttttggggaaaaagaagctggcagattatgctgatgaacaccatcccggaacgacttcctttggaatgtcttcatttaacctgagtaatgccatcatgggcagtgggatcctgggcttgtcctatgccatggccaacacagggatcatactttttataatcatgctgcttgctgtggcaatattatcactgtattcagttcaccttttattaaaaacagccaaggaaggagggtctttgatttatgaaaaattaggagaaaaggcatttggatggccgggaaaaattggagcttttgtttccattacaatgcagaacattggagcaatgtcaagctacctctttatcattaaatatgaactacctgaagtaatcagagcattcatgggacttgaagaaaatactggagaatggtacctcaatggcaactacctcatcatatttgtgtctgttggaattattcttccactttcgctccttaaaaatttaggttatcttggctataccagtggattttctcttacctgcatggtgttttttgttagtgtggtgatctacaagaaaataagtttctttttgcaaatttttatcatactaaagttgttcttttaatttagcatatctaaaataggaattagttcagtttagctcacacaggtgtttgctgacattcattggccatttaatacagtgttgagtggttctccgtaaaagtataagtgctaacactacgaagaaatgcacacgatcattcttgctcacttctataacaaacttacataaaatggatttaaaaattcctactcacagcctaaaacttctggagttcactacctttttttcaaatcatagtaagatcacttgtgtattttatattttagtaaagccaattatgaagtacaagtatcatacacgtacttttgagctactattatttgaaaaaaatctgccaaatagcatctttaggatatatttacattttcactcatctaaaaagtatacaaaaataaaaagtggaaaaaggtatcttctgaatgttcaagagcatcctatagtgccaaataataaagcaccatttttttcttcataaccaggattaaaattcatatatactgcagggcagacatacatatgatagcttgtgctgattaatttaaccccatttgtaaacagatgaaaattttattttcttatttcatttataagatggctcaatgtattgggaggcttcttttttattacagaaagtgtatattggtatataataaatgaacttttcaaatgac

SEQ ID NO: 10833 - protein, 259 aa, Homo sapiens
MDPMELRNVNIEPDDESSSGESAPDSYIGIRNSEKAAMSSQFANEDTESQKFLTNGFLGKKKLADYADEHHPGTTSFGMSSFNLSNAIMGSGILGLSYAMANTGIILFIIMLLAVAILSLYSVHLLLKTAKEGGSLIYEKLGEKAFGWPGKIGAFVSITMQNIGAMSSYLFIIKYELPEVIRAFMGLEENTGEWYLNGNYLIIFVSVGIILPLSLLKNLGYLGYTSGFSLTCMVFFVSVVIYKKISFFLQIFIILKLFF

SEQ ID NO: 10834 - DNA, 1648 bp, Homo sapiens
  CDS (234)..(1241)
acgtgggccggagtcggagactgagtttagctttactgaggagctctaaatttaggcgggtatgagtgatttcagtgaagaattaaaagggcctgtgacagatgatgaagaagtggaaacatctgtgctcagtggtgcaggaatgcattttccttggcttcaaacatacgtagaaactgtggattatttggaagctcggaagtgaaattctattttatcatcccaaaagcaacatggagagtttcaatacttttgctaaccggatgaaaaatattggcgtcatgaattatttaaagatctccttacaacatgcattataccttctgcatcatggaatgcttaaagatgctaagagaaatctgagtgaggcagagacatggagacatggtgaaaatacgtcttcccgggaaatattaatcaaccttattcaggcctataaagggcttttacagtattatacctggtctgaaaagaagatggaattgtcaaagcttgataaggatgattatgcttacaatgcagtagcccaggatgtgttcaaccacagctggaagacatctgcaaatatttctgcattgattaaaattcctggagtttgggacccttttgtgaagagttatgtagaaatgctggaattctatggggatcgagatggagcccaagaggtactcaccaattatgcatatgatgaaaagtttccatcaaatccaaatgcccatatctacttatacaactttctaaagagacagaaggcaccaagatcaaaattgataagtgtgcttaagattttgtatcagattgtaccatctcataaattgatgttggaattccatacattacttagaaaatcagaaaaagaagaacaccgtaaactggggttggaggtattatttggagtcttagattttgccggatgcactaagaatataactgcttggaaatacttggcaaaatatctgaaaaatatcttaatgggaaaccaccttgcgtgggttcaagaagagtggaactccaggaaaaactggtggccaggctttcatttcagctacttttgggcaaaaagtgattggaaggaagatacagctttggcctgtgagaaagcttttgtggctggtttactgttaggaaaaggttgtagatatttccggtatattttaaagcaagatcaccaaatcttagggaagaaaattaagcggatgaagagatctgtgaaaaaatacagtattgtaaatccaagactctgatactgaattttagttatttcacagttgtagctacacagtataccaccatgaagaaatatattggtgatgagttctattgaggaattttgaaaagagagaaggatttagaaaaaagactctttctcggccgggcgcagtggctcacacttctaatcccagcacttgggaggccgaggtgggtggatcatgaggtcaggagttcaagaccagcctggccaacacagtgaaaccctgtctctactaaaaatacaaaaagtagctgggcgcagtggcgggcatttgtaatcccagatactcgggaggctgaagcaggagaattgcttgaacccgggaggtggaggttgcagtgagccgagattgcaccaccgtactcctgcctgggcgacagaactagactctgtctc

SEQ ID NO: 10835 - protein, 336 aa, Homo sapiens
MESFNTFANRMKNIGVMNYLKISLQHALYLLHHGMLKDAKRNLSEAETWRHGENTSSREILINLIQAYKGLLQYYTWSEKKMELSKLDKDDYAYNAVAQDVFNHSWKTSANISALIKIPGVWDPFVKSYVEMLEFYGDRDGAQEVLTNYAYDEKFPSNPNAHIYLYNFLKRQKAPRSKLISVLKILYQIVPSHKLMLEFHTLLRKSEKEEHRKLGLEVLFGVLDFAGCTKNITAWKYLAKYLKNILMGNHLAWVQEEWNSRKNWWPGFHFSYFWAKSDWKEDTALACEKAFVAGLLLGKGCRYFRYILKQDHQILGKKIKRMKRSVKKYSIVNPRL

SEQ ID NO: 10836 - DNA, 2222 bp, Homo sapiens
  CDS (57)..(494)
gtagagtgcgcgacgcttttggcgacccgacctctggctaacctacccccggagccatggcctctgctggggtggcagccgggcgacaggcggaggatgtattgccgccaacgtccgaccagccgctgcctgacaccaagccgctgccgcctcctcagccgccgccggtccctgcgcctcaaccgcagcagtcgccggcgccacggcctcagtcacctgcccgcgcgagggaggaagagaactactcctttttacctttggttcacaacatcatcaaatgcatggacaaggacagcccagaggtccaccaggacctgaacgccctcaaaagcaagttccaggagatgcgcaagctcatcagcaccatgcccggcatccacctgagccccgaacagcagcagcagcagctgcagagcctccgggagcaagtcaggaccaagaatgagcttctgcaaaagtacaagagcctctgcatgttcgaaatccccaaggagtagagtgaggctgacttccttagaaagagggggaagccaatggcctgtctccccactaccatccccaaacgctccttggggcgtggttcctgtggaccccagctcagctcgtcaagctgcaggggcggggctcctgtgctgctgcgcgcgcttcgcctgtgcgggagccagcgcagagcttggctgcgccgggggttcctcgtgtagatccatatgtctagatgcataataactggagtgcctgctggtggaagtcagaatgctcctggaggctgcagagggggtggaggactctcccctgcctctggggagggggccatctgctgcgcccggccccactgacagatctgaagagcacagtaggaagggaggcggctcctctttgcttccttccctctctctcctcccacccccataggatcagtgtgtaccaggtacacattgttcctgttaacagcagcttcttgaaacatttgcatagaattcactggacgaattaagcctgcactcatatggcatagaattgtgagagaatgttttgaaaggccagagggtggcctttttccccaaacagtttggttccttttatgtttgagccagtgaagggaactacgctttgggggcttcagcctagagccctgccaggcagcccctggctccaggttccctgcctcctagcgctctcctcgccttcagctcttgctcccttcctcgttcatcaccctcagtcagtgcccaagagtggccaaaccgcttcacatctgcagtgcttccccagggttgacaaggggccgtcctttccacacaggccagaagaggtcttcaggcgaaccgaccttcccccttctggcatttcagattccccttgctctggttaaaaggtctttccctcgtggcctttgcacttgcggcagcaacgtgtactacactgcagaagggttcagtatgcaccttgtgttgagagagaggcaaccctgggggccagttcaggtggtccccaaccataggctaggtctgaaagttacacagccaagtttgagctcttaaaagttgatgaacagcctcatttccccagcttccctgatttcttccagatgggacgttttatttgtgtgctctcccttgactgtcagattgaagtaagagcagttctctccgttgcctctcgaggaggaggtgcgaagtcctggagtattgtttgggtctcggaatgggcgcataacctgcgctgaccagtttaggggcttagcagatgcctgccagctgacctcgttggcaggagggttgggtggagatgtttttagcagagcttccattagtgtagacctgtagccacctgtcagaaggtgggtggcatattggggacctgggaatgtgtgaaggaggagatcaaatttcagtggctttggacagaaaagaaggctctggatttaagcgggtggtcacctgtgagaccaggtctaccttgggactgttatttaactgaatcagttatttccttgaaatttcacagtagtgggtgggcctgttttaaggctctgacagataccacgaaacatgaagcacgtggaactacaagacccccggggtctttctgagtgcaaggctgaaatggacaagggctcctcacgggggtggagggagccggagcctgccttgtgttccttttttgacttgtgacatttttcaaacacataattaaaaggacttatgctctgctgtctcagg

SEQ ID NO: 10837 - protein, 146 aa, Homo sapiens
MASAGVAAGRQAEDVLPPTSDQPLPDTKPLPPPQPPPVPAPQPQQSPAPRPQSPARAREEENYSFLPLVHNIIKCMDKDSPEVHQDLNALKSKFQEMRKLISTMPGIHLSPEQQQQQLQSLREQVRTKNELLQKYKSLCMFEIPKE

SEQ ID NO: 10838 - DNA, 1346 bp, Homo sapiens
  CDS (367)..(732)
aaaaaaaaaaaaaaaacaataatgagctctgaaattaaatcagtaataaataacctaccaactaaaaaagcacaggaccaaatgaattcacagccaaattctaccagatgtacaaagaagagctggtagcatccttactgaaactatcccaaaaagctgagaaggagggactcctccccaactcattctatgaggcaagcaacatatttataccaaaacctggcagagctcacaaaaaaagaaaacatcagactaatattcttgatgaacattgatgccaaatttctaaactaaatagtgagaaaccaaattcagcagcacataaaaaagctaatccaccgtgatcaaataggctttctccctgggatgcaagtttggttctacatatgcaaatcaataaatgtgattcatcatacaaacagaaataaagataaaaatcacctgattatctcaatagatgcaggaaagtcttttgataaaactcaacatcgcttcatgttaaaaatgctcaataaactaagtattgaagcaacgtacctcaaaataataagagccatctgtgaaaaatccagagccgatatcatactgaatgggcaaaagctggaagcatatcccttgaaaaccagcagatggcaaggatgccctctctcaacactcctatttagcatagtagtggaagtcctggacagagcaatcaggcaagagaaagaaataaagggcatccaaataggatgagagggagtcaaactatccctgtttgcagacagcatgattttatatctagaaaacccccatagcacgtcccaaaagctccttgtgctgataaaaaaaaactttagcgaagtttcagaatacaaaatcaacataaaaaaatctctagcattcctatctaccaacaacagtcaagctgagagtcaaaccaggaacacaatcccattcacaattgccacaaaagaataaaatacctagcaatacagctaaccagggaggtgaaagatctttacaatgagaattgcaaaacactgttcaaagaaatcagaggtgacacaaacaaatggaaaactattccatgctcatggaaaggaagaatcagtatcattacaatggccatactgccaaagcaatttacagattcaatgttattcctaccaaactaccaacgacattcttcacaaaactagaaatcaggatcctagaaactaggatcagaacaaataactattgggtaccaggcttagtacctgggtgacaaaatatctgtataacaaacctctgtgacacaagtttacatatataacaaacttgcatttgcaccctgtaacctaaaataaaagtttaaaaaaatt

SEQ ID NO: 10839 - protein, 122 aa, Homo sapiens
MQVWFYICKSINVIHHTNRNKDKNHLIISIDAGKSFDKTQHRFMLKMLNKLSIEATYLKIIRAICEKSRADIILNGQKLEAYPLKTSRWQGCPLSTLLFSIVVEVLDRAIRQEKEIKGIQIG

SEQ ID NO: 10840 - DNA, 1424 bp, Homo sapiens
tagtgtagacggaagctcctttggtgccagattataaaggtagaaatttgtggaggacatcgaggagacagaagacatgctttatacatgtttctttttattttaaaaagctttgaaatacatttgaatgaaaaactaagcagttgcttatgctgtcagtacctgtctctgctctttaaaaagtaagccactgcctcttacctaaaggtcagcatgggctccatcatacagcggtcaggtccatcatacagcggtcaggtccatcatacagcggtcaggtccatcatacggcggtcaggtccatcatacagcggtcaggtccatcatacggcgctcaggtccatcatacagcggtcaggtccatcatacggtggtcaggtccatcatacggcggtcaggtccatcatacggcggtcaggtccatcatacggcgctcaggtctgtaactcttgacaggaaggtgcagtagcagaatggcgagatgcactgagggtaaccagatgatctcatgggacttacccagtgttagcaccaaagtcccatgaactgaggtgttaaaacagaaaggcctgtgtcctcagaacccctccaagtcactggccaactatgactcatgtttggtgatgttggatgccagttaataaagtccagaacttaagcccaagaagagagctcagaagtgtttgtgttactctttatttattgaggaataatttacagatagtaaaatttaccccttatatctgtacagttttgtgaattatgacaaacttactcaggttgtgtaaccaccagtgcagtcaaggcatagattatttccatccttccagagaagtctctgggaccttttgtagtcagtcccctcatggaatgttttgatcaacgtagaaatgcctggaggctgctgggtgggaggctgaccactcagccatcagagcgtcctgtgtctctgagccgtgcaccccattgtggcatggcactggttgctggacattcttctgcgggcccactcacacatctgcctgcctgcggcctgtctgtgtttgtcttactcatgctcttggagccgtagcgaatgtgtctaatattccttccacgtggtagattgaaacttcaccaaaatagccctgtgcgcctactttgctcctgaacatctctgatttctccggctgtccctgtgtggagttctggcagatctcaccagtctacatgacctattggaaatgccagtgggtcattgtggcattcagacacataattcaaaactgcaaatggtgggaccgcactaaagaatttttagtaattaaagtacaggaggctgaggtgggaggatcacttcagcccaggaggtcaggtcaaggctgcagtgagccatggttgcaccactacactgtagcctgggtgacaaagtgagaccctgtctc

SEQ ID NO: 10841 - DNA, 1631 bp, Homo sapiens
atttactaatgaggcagtttgcaaagactgtccctgaagtgtagtgtagtctttcagggggattcatttagtaagctagattgatttaacctggtactgtactagcatagggtcaaatacgtgtcatcagagacctgggtatgaccaggcttacaaaactcaggaacaaactcagattcctactgacctcaaccaactaaactaggccaaatttctccgtgtacaaaatggaccacgttatttacaatccacgtggtggagaagatggtagacatgtggagagagtttggccaggtgctccattctaggtctttttccagtttctcaaaggcagaacattggctcctaattatttgccatggatatttgcttcctgttctggagctatgttgtaagacagctgtgtgatgtccatcattcttgactccagaatgaagacagggcttgctgttttctgtcctgttggtatcatctgttgccttggcgatcactcagtgatgagtcgtcagtattttgacatgtcccagtgcttgctgtacaagaggggactcagatcaacaggaagactctgaagacaggaacctgcatggtatcttacatctttgatacttgggtgctgatatgaagcagagttgttgatttactttatctaggcccttctttcatctcacctggatcaagcaactgagaagtgtatcaggagacactggatacatatctctatgaaatagagagggccatcgcagggcctggtacttaactacattaacgttctaaaacccagtttggtttacgttgtctttcacagtagtatatttagctcttctctggaaagttgtgggttaatataattcttaaacatgaaaatgtaattaaacacaccacgagagaacaatattccaggagacttaatagtgattactttcttcaatcaggaaatcgtttcagtgcctcctttgtaggaatgctttgttttgtgatgggttttcttaaagaagagcacacctccgtccaatctcctgagacagccacgtctccgctgacatcccactgtgatgctttcagatagtcagtgaatgtttctgataaccttcatccagtatctgaaacacaatgtgagagattatattgttttagataataacatcccatttagttgactaaaatcttccaaactctgaaagctgcacactgctactccagagagtgcaggtcttagctcttctcctttctgacttcaagatgaatctttgggacgatgtttctggtgcttggtccacagtgattcacttttgaaggagaggccacatgacatgaactgcctggtgttacaacctagctaacatatttgatgctactcctgttgtctgtactgcttattcaagtagtattctaagttatgttactaaaaaacatggtgggtaaagcacaatcctacccatcattgtcctccaaaataattgtatgacatacacggcccagcccattgccctccctgcatctctgtgctgctttgccatttccccttctacccagcctcctcaaggggtaccttggtggatatttcagtacttaaaaccagactgtaatcataacctccctctgtgtggcatcaataaatagccaaactc

SEQ ID NO: 10842 - DNA, 1540 bp, Homo sapiens
  CDS (539)..(1540)
gatacatacacctgcaaaggttcagctttccctatacacatatttgtctgctgaatttattggaactgctaccatctacaccaccatacgcagagtaggaacagtattacagctaatgcacaccttaaaatattactactgggttattaatcctgctgacagtagtggcattacacctaaaggattagatggtccccggccatcacaaaaagaaattatatcactgagggcatttatgctactttttctgaaacagctgatactaaaggatcgaggggtcaaggaagatgaacttcagagtatattaaattacctacttacgatgcatgaggatgaaaatattcatgatgtgctacagttactggtggctttaatgtcggaacacccagcctcaatgataccagcatttgatcaaagaaatggaataagggtgatctacaaattattggcttctaaaagtgaaagtatttgagttcaagctttgaaggttctgggatactttctgaagcatttaggtcacaagagaaaagttgaaattatgcacacccatagtcttttcactcttcttggagaaaggctgatgttgcatacaaacactgtgactgtcaccacatacaacacactttatgagatcttgacagaacaagtatgtactcaggtcgtacacaaaccacatccagagccagattctacagtgaaaattcagaatccaatgattcttaaagtggtggcaactttgttaaaaaactctacaccaagtgcagagctgatggaagttcgtcgtttatttttatctgatatgataaaacttttcagtaacagccgtgaaaatagaagatgcttattgcagtgttcagtgtggcaggattggatgttttctcttggctatatcaatcctaaaaattctgaggaacagaagattaccgaaatggtctacaatatcttccggattcttttgtatcatgcaataaaatatgaatggggaggctggagagtctgggtggataccctctcaatagcccattccaaggtcacttatgaagctcataaggaatacctagccaaaatgtatgaggaatatcaaagacaagaggaggaaaacattaaaaagggaaagaaagggaatgtgagcaccatctctggtctttcatcacagacaacaggagcaaaaggtggaatggaaattcgagagatagaagatctttcacaaagccagagcccagaaagtgagaccgattaccctgtcagcacagatactcgagacttactcatgtcaacaaaagtgtcagatgatattcttggaaattcagatagaccaggaagtggtgtacatgtggaagtacatgatcttttagtagatataaaagcagagaaagtggaagcaacagaagtaaagctcgatgatatggatttatcaccggagactttagtaggtggagagaatggtgcccttgtggaggttgaatctctgttggataatgtatatagtgctgctgttgagaaactccagaacaatgtacatggaagtgttggtatcatt

SEQ ID NO: 10843 - protein, 334 aa, Homo sapiens
MHTHSLFTLLGERLMLHTNTVTVTTYNTLYEILTEQVCTQVVHKPHPEPDSTVKIQNPMILKVVATLLKNSTPSAELMEVRRLFLSDMIKLFSNSRENRRCLLQCSVWQDWMFSLGYINPKNSEEQKITEMVYNIFRILLYHAIKYEWGGWRVWVDTLSIAHSKVTYEAHKEYLAKMYEEYQRQEEENIKKGKKGNVSTISGLSSQTTGAKGGMEIREIEDLSQSQSPESETDYPVSTDTRDLLMSTKVSDDILGNSDRPGSGVHVEVHDLLVDIKAEKVEATEVKLDDMDLSPETLVGGENGALVEVESLLDNVYSAAVEKLQNNVHGSVGII

SEQ ID NO: 10844 - DNA, 1432 bp, Homo sapiens
catttcacttaccatttcaggcaaagttggctaagaacatgaggctgtttctgatatttccttttatttttatgtattaatgagaataataggtataggccatatacttattagagactctcaatgacttatacttattattctcaattcatattatatcatattatactcattgaaaataagccatatacttattagagacttatttagagtcttattagagacttattaagagtctctaataagtatatgggttgtcaagctagacacaaaatagtaccatctctctccacctctctaaagaggaccacatcatctccaaatgtaaatagacaagaacaaaaaaaattgtgcatttactaggcaattgaatgttctccaaaccaatattcctttgaacaaaatgagtttgtttgatttgagaacaatgaagtatttggctattttataatcataagtgattcatacccccacacacttagccctctagaaatggtgccagaagatgaaacacatttaattttgccatatagaagcattgcaaataactactggtttctaataatgtaccttataatgcaaataatgttttaatttttaaaaatatcagaaaaagtacaaccttttaaattatgtagttgcttcttcttcataatcatttttcttgaactggtgaaaaattttgtcagaagttaccacttgggacatattgtactacagcttctcgcttggctggagaaactggttttccagaagcagaccttatacaagaggtaaatgaaccattagacttctcccatgaaatcaacccagaaaaataaattaggactattttgtagaggaacagacagaatgctagaggctcagttgcctttatcatttatgtctggctctgcagcagcaggggtgtgaggtgctcctcattcagagtttcgaatgcaccaaaagggtgtttccaaaacatgatatgggaaggaggctgtgcacagagtatgaccactggattgcctaaattgacattgggtaggagtggagtatgggtgatcttcagatgaagcaagagtaatgctcaatgtgacctggttaaacaagtctcctgaatccaggggttaaagatggagaggaggaagagagggagtcaagaaggtcaaagggagcgtctgtctccctgacctgaatgacaactaacatagcccttgtttccttcttggtccccaggagggagagagaggcagctgtgtgggatcaaggcattttgtgagattgcagctgtgattcattttcctttggaagaacatccctagctccaggggatatggtgggaattggttagctaaaatatcaattccctgggtaaaagaggaaaaccatgagaccctctaatcttaacttttctccttcaaaagagtggaaaaagattacatagttcctc

SEQ ID NO: 10845 - DNA, 1233 bp, Homo sapiens
  CDS (52)..(1032)
atccgctattgtgcatataatattggggaccagtcagccatcaatgaactcatgcagatgagattgaggtctgggggcactgagggtctcttggctgaaaaattggaggctttgatcactcagactcgagccaaacaggcagctaccatgagtgaagtggagtggagagggagaacggttccagtgaagattgacaaagtgcgcattttcttattaggactggctgataacgaagcagctattgtccaggctgaaagcgaagaaactaaggagcgcctgtttgaatcaatgctcagcgagtgtcgggacgccatccaggtggttcgggaggagctcaagccagatcagaaacagagagattatatccttgaaggagagccagggaaggtgtctaatcttcaatacttgcatagctacctgacttacatcaagctatcaacggcaatcaagcgtaatgagaacatggccaaaggtctgcagagggctctgctgcagcagcagccagaggatgacagcaagcgctcaccccggccccaggacctgatccgactctatgacatcatcttacagaatctggtggaattgctccagcttcctggtttagaggaagacaaagccttccagaaagagataggcctcaagactctggtgttcaaagcttacaggtgttttttcattgctcagtcctatgtgctggtgaagaagtggagcgaagcccttgtcctgtatgacagagtcctgaaatatgcaaatgaagtaaattctgatgctggcgccttcaagaacagcctaaaggacctgcctgatgtgcaagagctcatcactcaagtgcggtcagagaagtgctccctgcaggccgcagccatccttgatgcaaacgacgctcatcaaacagagacctcctcctcccaagtcaaggacaataagcctctggttgaacggtttgagtccacaccaggcacagatggggccttgaaacgctttgtcatgcttcttcagtaccatggatttgaaatgaactcatccttgctgtgagcatccaggagcccttgagaagtttatctatgactatgaaactggcaacgtcaccccagaattacggtcagccttattccccttcacctcccagtgaacgcgaagtttcagacaagcagagagctctatttttagaagaaatatgttacactcagaaatgatgaaaccaaatcttatattaaaaggcaaagatgacgg

SEQ ID NO: 10846 - protein, 327 aa, Homo sapiens
MQMRLRSGGTEGLLAEKLEALITQTRAKQAATMSEVEWRGRTVPVKIDKVRIFLLGLADNEAAIVQAESEETKERLFESMLSECRDAIQVVREELKPDQKQRDYILEGEPGKVSNLQYLHSYLTYIKLSTAIKRNENMAKGLQRALLQQQPEDDSKRSPRPQDLIRLYDIILQNLVELLQLPGLEEDKAFQKEIGLKTLVFKAYRCFFIAQSYVLVKKWSEALVLYDRVLKYANEVNSDAGAFKNSLKDLPDVQELITQVRSEKCSLQAAAILDANDAHQTETSSSQVKDNKPLVERFESTPGTDGALKRFVMLLQYHGFEMNSSLL

SEQ ID NO: 10847 - DNA, 1809 bp, Homo sapiens
  CDS (416)..(1174)
acgccggcgctcccaggccgcgcttcctgcgtccccaacccggtccctgagagggcactgcgccctctccaccactgcgttccctcggctaagaatcccccgaaccccagccccgcgatcgcggcgcccaccgaggaggccgcccgggtggggcgcgggggtcgcgaagcccgcagccccggaccgcccagccgagacggagccggacccgccgcctcccgggcccttccaccgcagctatccgcacgggaggcctcgcgattgctcggaaccatcccgcaggagttcagctgatattttctagtgtggggcgagagattttgtggagcgcatttaaggggtttttgttgtgactgctgccttgtatatatttattttctttcttggaactgggcctcgccctcctcccactgacatgatggcccagtccaaggccaatggctcgcactatgcgctgaccgccatcggcctggggatgctggtccttggggtgatcatggccatgtggaacctggtacccggcttcagcgcggccgagaagccaacagctcagggcagcaacaagaccgaggtgggtggcggcatcctcaagagcaagaccttctctgtggcctacgtgctggtcggggccggggtgatgctgctgctgctttctatctgcctgagtatcagggataagaggaagcagcggcagggcgaggacctggcccatgtccagcacccgacaggcgctgggcctcacgcccaggaggaagacagccaggaggaagaagaggaggatgaggaggctgcctcaaggtactatgttcccagctacgaggaagtgatgaacacaaactactcagaagcaaggggagaggagcagaacccgaggttgagcatctctctcccgtcctatgagtcactgacggggctcgacgagaccacccccacatccaccagggctgacgtggaggccagccctgggaacccccctgacaggcagaactctaagttggccaaacgactgaaaccgctgaaagttcgaaggattaaatctgaaaagcttcacctcaaagactttaggatcaacctcccagacaaaaacgtccctcctccctcgatagagcctttgactcctccaccgcagtatgatgaagtccaggagaaggcccccgacacccggccgcccgactgaatggccccacttgagccacgctccctcctgtctctcacacctttcacccccaagactctaacaaagccacatgagccacagttgagaagcggaggggccagctgtgcatggagccatttggatggcggcgggcgggggggattctctgtatcaggagtgactttgttgccccacacagcctcctgctgcaggtgctttggaaagagatgctgccttggagctggtgaatctgtggaccacattcaagggtgtggcacaggcatcttcccatccttttcactccgaatcgctggcgacacattctcctttccagctaggaaagggttcctcgcggctggtttagattgtggttgtttgttttgcttctactaagactgttttgtttcaaaaaggaaacaaattttgtgtttgctgtctacgctggagtcctgaactgtgggtagaaaacacgacctggctttgtagaaaggacacagggctgttttatgaactaagcggtgaggctcaggtggcggctctcacagagcccctgatgctgttgttctttgagggcttaaggcctgatgaacgtaggcacgtgatgcgtaatagtcttcaatggtacacttaactagtctcttctgtgtaacagc

SEQ ID NO: 10848 - protein, 253 aa, Homo sapiens
MMAQSKANGSHYALTAIGLGMLVLGVIMAMWNLVPGFSAAEKPTAQGSNKTEVGGGILKSKTFSVAYVLVGAGVMLLLLSICLSIRDKRKQRQGEDLAHVQHPTGAGPHAQEEDSQEEEEEDEEAASRYYVPSYEEVMNTNYSEARGEEQNPRLSISLPSYESLTGLDETTPTSTRADVEASPGNPPDRQNSKLAKRLKPLKVRRIKSEKLHLKDFRINLPDKNVPPPSIEPLTPPPQYDEVQEKAPDTRPPD

SEQ ID NO: 10849 - DNA, 1443 bp, Homo sapiens
gaatgtaccgccactctgttagctcacaaggaaaataaggaaaagccaggcctcccacctcttgactcttgtgagagtgaagacaacatggggcatttagaaaatatatttttagtgtatgataatgtgggctggcccacacagcaatgagcccaaagaccccctcgctttgggaattattcatggccctgctcatcacagcctctgatatgcatgactgtaacctaggctgagccaagaatggagctcatgccagaaatggtcctaagcatgcacatggccccctggaatatcaaaatcctggggagaaagaaatcatctttgccttgggcagtgaagctggaatggcacatatctatctgttgccacatctcctgcctagtggagaagccttggaaggcaacagacactgagcaagcagcagggaggagaatgtcctggaagggcaggactctacccaagtccctaacatccccagactcttctcttccataaactctctaattactctgctgtttaaatcctggttttggtcaagccagtcaggttgcataaagaatatgaatacagtatgcatcaaagttgcttcccagaacaggaagcaaaacaaacaaacaaacaaacaaaatactgatatcagtacccagggtgcccaattaggtcacacccagtggctgcattgcagcccctgagctcctgctgcaccgtgtgtcctgctgcccgagtgggccccaccctgggttctgaagatgcccttcttaatggagagctcccgatggagggctccaggactgatgctctccctaaggaagggaggcctcagatttggagagggacaccaacaggaccagaggaggactgaggggcactggcaccaataagtggaagggaacagcgtggtaacaaaaaagagccatgccacttgcatgctggagggagtctttttgtgtcagcctaaagcttaggctggtgtccatgtggaacatgacatctttccagtatccctgatccaggaaactgcagtgagacccaggtgacccagctctgtgtcatttggagcccattaaaaagtgaggcagccacatggcggggacattgaccccactccagaccacactcccatctccatacataggatagaaactgttcatcaggaaggaaaaccaaacagaaatttgtggtctaggggaggggtctgcattcagcatggccatgctgggctggagtggctgtggggtgtccagatagatgggcatgtagactagtgctttctcaacctttaatgcatgcacaaatcatcgagatcttgttaaaatgtagatcctgggtgggcacggtggctcacgcctgtaatcccagcactttgggaggctgaggcgggcggatcatgaggtcaggagatcgagaccatcctggctaacacggtgaaaccctgtctctact

SEQ ID NO: 10850 - DNA, 1448 bp, Homo sapiens
  CDS (166)..(597)
gtatagtaaccactgaactagagaagtaatcttttttaaatggtatggcatttactaagtagtcattaacacctaatagatgatatttagtgtgtgtgctgtgtggccgtcaccgccgtcagtcatcactctgctttcttcctgaactgtgttgtttcggaccccatgggtgagcagtctgagggaatggctcccgtgtcttcatctacggtcagttctgtaacgaaaacttctgggcagcagcaagtgtgtgtgagccaggccaccgtgggaacctgcaaggctgccacccccaccgtcgtcagcaccacgtccctcgtgcctacaccaaaccccatctctgggaaagccacagtatccggtgagttgcattgtgatattatttctctctcttttctctcattgggctggaatatttttgtttgtttgtttgagatagcgtctcactctgtcgcccaagctagagtgcaatatcacaatctcgactcactgcaacctctgccttccaggctcaagccatcctcccacctcagcctcttgattatcagggaccacaggcacatgtcaccacacccagctaattttttgtgtttttggtagagatggggtttcaccacgttgcccaggctggtgttgaactcctcaggtcaagcagtccacccacctcagcctcccaaagtgctgggattacaggcgtgagccactgtgcccagctatttttttggagggtcttaagcaatattttgtatggtaaattgttaaaagtaattaacccagcagcattttctgaacagttgctttttagatgaattatttttgtttaaaatctacgtatcagattttgtctgagactttaaattatcatttgaaagttactatttgaatttttgaatgatataataaacccttagccacgcagaaccctactgggtattttagctttttttataacgtaattttggggagagccaagagtttgctttccttaaagtactaatttcttttttcctataatcagtgtcgaatagaattcactataaaatgtatacctttctttgcttttataaagtatataaaatatatcttagccttgttgactccaagtcataatttttaacattagttattatcttggctagtgttagagtgataggctggagatccagtaagagctatggtgtctttgtgcctgcactagagggcctcagaaaagtgtaccttttgtttctgagtaacagagagcacacatcctgagaccacattgccttagttgaagtgatttgcttcagtttctcagctgtaaatgagattgataataatacctacttcataaggttgagaggtttaaatgagtttgtaatatatcagtgcttagaatactgtctggtgtgtagtggccattatataaacaattgccactgccattatcatgtgtgatcatttttgtt

SEQ ID NO: 10851 - protein, 144 aa, Homo sapiens
MGEQSEGMAPVSSSTVSSVTKTSGQQQVCVSQATVGTCKAATPTVVSTTSLVPTPNPISGKATVSGELHCDIISLSFLSLGWNIFVCLFEIASHSVAQARVQYHNLDSLQPLPSRLKPSSHLSLLIIRDHRHMSPHPANFLCFW

SEQ ID NO: 10852 - DNA, 1713 bp, Homo sapiens
  CDS (1040)..(1507)
atgatcttatttaatttaattgttatttgtattctatgaagtaagctatacacacactgttcagatgatgaacctgaggcttaaggtagttaattgctccagatcactcagctagtaagtactgaagctgatatttggacagatgcctgactccaaagtcatgctcttaaaatgcaaatgatgaatatacatttgcattctttattccaaaaaagattttgttctttagtgataaaaatcatgaaaaccacttggtctattgctccataaatctgcttaatcagatattattattgcctcactaactctcctttttaaaagaagatccaaagatgataaaatataaggacaaaactaagtaagcttctcttaatggaaagtaaaaatgtttcaattttctcccttgtgttttaagctgaagaaagcccttgatgaagctaacttcagatcagtggaagtgtcccggaccaaccgagagctgcgacagaaacttgcagagctagaaaaaatactagaaagtaacaaggagaaaataaagaatcaaaagacccaaattaagctccacttgtcagctaaggcgaataatgctcagaatatagaaaggatgaaggttgtatgggaaacctcttctcacttcctggataccctgtgaggatgtagtcagtcaatggtgtctagggaagacaggttttagaaccctaccagccccatgtattctctgggaattatagccagttgtctttggggagactttttcagtggagtcactgctgtgtaaatgtttgatttctcatttgctgccagtgtcacattccggctccctatctgtcccttccgtgttgattgtactggactttgctcttttgggatcagtgggctagatgggaaagaaagctcagcaggaactggtaactttgggtctcatattggattctttctgtcatcctataggcaaaaagagcaagccagtttttccactgatcatctttttatgttattttccaattacttttagcaaatagaaaaagaattgaagcaaatggagctaattaaggatcaatatcagaaaaagaactatgaacagtctttgagtatccagagatttgtgtgtgaaatgactaacctgcagaaagagatgcagatgttggctaagagccaatatgatgcctcagtgcggaataaacagcaagagctgcacctagaagcagagcggaaaataaggcaggagctagagaatcggtgccaggaattggaagaaactgtcagacacctgaagaaatgtaaagaggcaacagagaatacgctgaaagaagccagtgtggaatcagaacagataacagctaatctggaagaagctcatcgctggtttaagcacaggtttgatggtctacaacttgagctgacaaaaaaccggttgcagaggccttctggggaagacaggtggcaggaaaaggaccaagatgtaaaacatgatgtcatgtccttgacaagggagcttctttatgtgtagctacactccatgattccaagagcccagcagccggggctggcctgtttctagagtcataagaacatgaagtctttgatgtgggctgaagattttggacctgagtttatcactttatgaactcttatatcagtacaaaactacccctttttttgtcccttttcacattttccacccaataaatttgtgttaatttgttgtatgat

SEQ ID NO: 10853 - protein, 156 aa, Homo sapiens
MELIKDQYQKKNYEQSLSIQRFVCEMTNLQKEMQMLAKSQYDASVRNKQQELHLEAERKIRQELENRCQELEETVRHLKKCKEATENTLKEASVESEQITANLEEAHRWFKHRFDGLQLELTKNRLQRPSGEDRWQEKDQDVKHDVMSLTRELLYV

SEQ ID NO: 10854 - DNA, 2373 bp, Homo sapiens
  CDS (956)..(1267)
aaaaactgatgaaggaaattgaagaagacacaaataaatggaaaggtatcctatgttcatggattggaaggattaatattattaaaatgttcatgctgcccaaagcactatatagattcagtgcattccctccaaaatttttaaatttaatgacatttttcacgaaagcagaaaaaataatttttaaatatacatatttcagaatacattgttcacaataaagatatatgattttttgtcagttaaaagttaatttttttaaaaagatacctatagcctcttattgaggtggaatctgttgctcttggagctacgtactgttgactttggttttctggaaacatcagtgctatttagaacattaggatatttttctttttgaatatcaacaaaaacataaataaaaatactagtaatgacatttacagtatgtttcacagattaatcacatctctgagtgggagtctttatctgttgtaggatctactcttgccattctattctgggttttggttgattagtctttcttgaacacttccagaaattggagatgtatgcctgccttaggtagcctagcttattttattaatgaacatatccatttaaaaatttcttcctggtaatgagtctaaacttgccttcctgtaatttgtatccactggtcctttttctttgttctccctcttgcatatgccagtacttcaatagctggtcccagctccattgacgccctctctcaggatcacacatcacaggtccttcagaatctcctaatggtctctctgatctccaggcaacacactactctaacctttctatgcttttctggcctgcagttcatttctgttcctgtgaagtcatagagcccgcaattcatgctgtcttgttcccctattaaaatatatttttgtaaatctctttaggattcgtgaagttttttggaaacctggctgtcatggatagtcctcaacagatctgtgagcgttatcctatctttgtggaaaaagtctttgaaatgatagaaagtcaggaccccactatgattggtgtagctgtagacacagttggaatcttgggatccaatgttgaaggaaaacaggttttacagaaaacaggttggtatgacttggccctgttcagggatatcttaatctttgacaggggttcaatatgtaagttcatttgctggtgggttaactacattgtagaaactattttatgggtggcagtcttgttaaccatgaccttgtactcatgtctgaaaatctaataattattacggaaaaccttttttttttttttttgacttttcactggtttaggttttcattggtttaggtttctaccaatcgatttcaaccaaacattgtttcctgtttcccctctatgatgtcttctttgactagatttcatggtacaaagaccacgggctagagtcagaaaggtctggattcatgtccttgggttttctattctttttttttttttttttttaagagattgagagtgtctctctgttacccaggctggccccgaactcccgggctcaagcaatcctcctgcctcatcctcttgattggctgggtctacaggtccacaccattgtatccagccctgactttgctttttgaacttcatttactcacttcacttttctaggcctcattttcttcatttataaaaatggcataacaactgcttctcagggttgttgtgaatatttatgaaattttgagaaaggaaaataaaagtttgttataagatttcatgttaagagatacttttggcatgttaagagatacaatggttcatgcctgtaatccagcactttgggaggctaaggtgggtgggttgcctgagctcaggagttcaagaccaggctgggcaacatggcaaaatcctatctctactcaagaatacaaaaattaaccaggcatggtactgcacaactgtagtcccagctacttgagaagctgaggaaggagaatctcttgaacctggcaggtggaggttgcagtgagctgagatcatgccactacactccagcctgggtgacagagtgaaattctatctcaaaaaaaaaaaaaaaaaagaggccaggtatggtggctcatgcctgtaatcccagcattttgggaggccaaagcaggtggatcacttgaggtcaggagctcgagaccagcctggccaacatggtgaaaccctgtctctactaaaagtacaaaaatcagccaagcgtggtggtgcatgcctgcagtcccagctactcgggaggctgaggcaggagaatggcatgaacacaggaggtaaaggttgcagtgagccgagatcacaccactgcactccagcctgggcgacagtgcgagactctgt

SEQ ID NO: 10855 - protein, 104 aa, Homo sapiens [sequence omitted]

SEQ ID NO: 10856 - DNA, 1348 bp, Homo sapiens
  CDS (126)..(740)
cctctccccccgggctccgcccaccccacgccgggaacccacgcgggccactacaagcccgccctttcctacgtctggtccagtcggtcttcctccggcccgggccctggcccagctagccggccatggaaggtaatggccccgctgctgtccactaccagccggccagccccccgcgggacgcctgcgtctacagcagctgctactgtgaagaaaatatttggaagctctgtgaatacatcaaaaaccatgaccagtatcctttagaagaatgttatgctgtcttcatatctaatgagaggaagatgatacctatctggaaacaacaggcgagacctggagatggacctgtgatctgggattaccatgttgttttgcttcatgtttcaagtggaggacagaacttcatttatgatctcgatactgtcttgccatttccctgcctctttgacacttatgtagaagatgcctttaagtctgatgatgacattcacccacagtttaggaggaaatttagagtgatccgtgcagattcatatttgaagaactttgcttctgaccgatctcacatgaaagactccagtgggaattggagagagcctccgccgccatatccctgcattgagactggagattccaaaatgaacctgaacgatttcatcagtatggatcccaaggtaggatggggcgccgtctacacactatccgaatttacacatcggtttggcagtaaaaactgctgaacttggtctcaagatgtggaactgtggagaaattctaggacatgaacaagctatcctttcatcgaggacagcaaacattatggtacagttggcttggaattatgtctttctcttttaatttgattgagtggaaatctgagtgaatacaaatataaatgaacaacataaaaacttttgttttgacatgtcaaattgaaacttgataaagtgcgtacttgctaagatattcctgtggctcatgcgttacaacacgaggacttaagccagtaatcgtttttgttcagatagaggtgtggaggtagagccagcccctcatgtctgttttggatgttttgtgtctctccagctacattgtaagttccttgagggcagggccatggcccattgctctgtgaatctcaaatgcccataaaaggtgcccataaaatgttttcttgaacatttgaatgtgctgttgtctggaaaggggtaatattgtgagctgaatcagcaataagtattagtctttttggactatggtattgttaaaaagactgcagccctctcagacttgagcgttaattggcttatttatttatggctttaaataaaatcgatttaacgtt

SEQ ID NO: 10857 - protein, 205 aa, Homo sapiens
MEGNGPAAVHYQPASPPRDACVYSSCYCEENIWKLCEYIKNHDQYPLEECYAVFISNERKMIPIWKQQARPGDGPVIWDYHVVLLHVSSGGQNFIYDLDTVLPFPCLFDTYVEDAFKSDDDIHPQFRRKFRVIRADSYLKNFASDRSHMKDSSGNWREPPPPYPCIETGDSKMNLNDFISMDPKVGWGAVYTLSEFTHRFGSKNC

SEQ ID NO: 10858 - DNA, 1587 bp, Homo sapiens
ataaaatgggtacattatgggcagtgtaatacaagctttcttttcattgcctagtactttaccagcagaccacagttttgccctggctagaccaaccctcagaacaaaatcatcattccttgtatttatatttgtatctgagatagtaaacaagatggctggccaggtcaacatggcaccttaacttatttttttaataggtaaaacttcttcaaaagtagcttgcttgtataagaactaagctatcagtatagatatagctatccttggagcttatgtttcagacaggaattatttactaaaataaataataaacaagataatgcattatacaatttgggcatttctcgtttctcaagtgtatgcatcatggtaaatataaactaaccacaagataggtagattgattcatttcattttaatctccttgtgtaattcagtacctccataattgttctaatcttcttcccactgtttacaaattaccagttaattaactcgtgaaagaaaaattcacatatcagaataaaaataaatgtatactcactttataaaaatcaccactgctgtctttccttaatactagcagtggaaatgtaagtggcttactctacaaattttggtgctggcaaatacataggcaaactgttgggagctgctctagttacattcctcccttcttattccctttttctcttcctcactttattgcataacatattcctgtacccaaagcattctaccacagttctatttgactcccacttgtaataactcctttaaaaaattccatgtttaaccatatgaccctgcttgcttactcatattctccctccctctccccttcctttctctctcttccagaagtcatttgcctggtttgaaatattttgtagggattgcttattatattattttagctgatgaacctcaggacaacgtctacacacacacacatacatacacgcacacaaaatctcagctgttgaagagtgggcttggaatcagacttctgtgtccagtaaaaaactcctgcactgaagtcattgtgacttgagtagttacagactgattccagtgaacttgatctaatttcttttgatctaatgaatgtgtctgcttaccttgtttccttttaattgataagctccaagtagttgctaattttttgacaactttaaatgagtttcattcacttcttttacttaatgttttaagtatagtaccaataatttcattaacctgttctcaagtggtttagctaccattctgccatttttaatttttatttaattttatttgcttgagcacactgatcaaccactgaactgccttcttccattgtcctgcaatgatataagggttacatttttgtgtatatggctttcatagttgggatttcagagcactgataccagatattttcagtttgttctctgggggaatttcatttgcatctatgtttttagctatctgtgataacttgttaaatattaaaaagatattttgcttctattggaacatttgtatactcgcaactatatttctgtaaacagctgcagtcaaaaataaaacactgaaagtttt

SEQ ID NO: 10859 - DNA, 1743 bp, Homo sapiens
  CDS (46)..(1494)
gtgttagaatttctgtcccaaaaagacaaagagagaatcaaagaaatgaagcaggcaactgacctgaaagcagctcagctcaaggccaggagtctggcccagaacgctcagagcagcagagcccagctctcccctgcagcggctgctgggtactgctcttggaacatggcattaggtggtgggacggccaccttaaaagccagcaacttcaagcctttcgccaaagatccggaaaagcaaaagcgatacgacgagttcttagtacacatgaaacagggtcagaaagatgctctggaacgctgtctggaccccagcatgacggagtgggagcgaggccgtgagcgggatgagtttgcccgggcggccctgctgtacgcatcttcccattcgaccttgtcctccaggttcactcacgccaaggaggaggatgactcagatcaggttgaagtccctcgagaccaagagaatgatgtcggggataagcagtcggctgtgaagatgaagatgtttgggaagctcacccgagacacgtttgagtggcaccctgacaagcttctatgtaagagatttaatgtccctgacccttatccagattcaactttagttggcttaccaagagtgaagcgtgacaagtactcagtcttcaactttctgacgctcccagagacagcttccttgcccaccactcaagcatcaagtgaaaaagtatcacagcaccgaggtcccgacaaatcaagaaaaccatccagatgggatacctctaaacacgaaaagaaagaagattccattagtgaatttttaagtttggctagatcaaaagccgagccacctaaacaacagtccagccccttagtaaacaaagaggaagagcatgcaccagaatcatccgcaaatcagacagtcaacaaagatgtggacgcacaggctgaaggagaagggagccgcccatccatggacttattcagggccatctttgccagttcctcagatgaaaagtcctcatcctccgaggatgagcaaggtgacagtgaagatgatcaggcaggctctggggaggccaacttccaaagctcccaagacactgacttgggggaaacatcatctgtggctcacgctcttgtgccagcaccccaggagccgccaccttccttcccgatacaaaagatgcagatagatgaaagagaagagttcggcccgcggctgcctcccgtcttctgccccaatgctcgtcagacacttgaggttcctcaaaaagagaaacataaaaagaacaaagacaagcacaaggccaagaaagagcacaggcggaagaaagagaagaaaaagaaacacaggaagcacaaacacaaaggcaagcaaaagaataaaaaaccagagaaaagtagtagctccgagagttccgacagcagcgacagccagagtgacgaggaaaccgcagacgtgtcgccccaggagctgctgagacggctgaaaagtcttccactaagaaggcagtaattgaatgctgccctggctcgtcctagaatcatttctcctccatgatggaagcccagtgattgttcagttaacgcattgtacagagtgtatttatatgtaaattcctgctgtaaaataatttttaaaaccttgacatttcaaagactgccttgaaaggtcgcagaaattgatttctatttttaatttcagttagtatcgggggaaaaaaatccagattgaacagtttaattaaagtggaatttttct

SEQ ID NO: 10860 - protein, 483 aa, Homo sapiens
MKQATDLKAAQLKARSLAQNAQSSRAQLSPAAAAGYCSWNMALGGGTATLKASNFKPFAKDPEKQKRYDEFLVHMKQGQKDALERCLDPSMTEWERGRERDEFARAALLYASSHSTLSSRFTHAKEEDDSDQVEVPRDQENDVGDKQSAVKMKMFGKLTRDTFEWHPDKLLCKRFNVPDPYPDSTLVGLPRVKRDKYSVFNFLTLPETASLPTTQASSEKVSQHRGPDKSRKPSRWDTSKHEKKEDSISEFLSLARSKAEPPKQQSSPLVNKEEEHAPESSANQTVNKDVDAQAEGEGSRPSMDLFRAIFASSSDEKSSSSEDEQGDSEDDQAGSGEANFQSSQDTDLGETSSVAHALVPAPQEPPPSFPIQKMQIDEREEFGPRLPPVFCPNARQTLEVPQKEKHKKNKDKHKAKKEHRRKKEKKKKHRKHKHKGKQKNKKPEKSSSSESSDSSDSQSDEETADVSPQELLRRLKSLPLRRQ

SEQ ID NO: 10861 - DNA, 1649 bp, Homo sapiens
atagaaaattagaaaagcagagaattcgagaagagaagcgagaagaacggaggaggagagagttagaaaagaaacgtttgcgggaagaggaaaaaagaagaagaagagaagaagaaggatgcaaaaaaaaagagacagataaacagaagaaaattgcagagaaagaagtaaggattaagcttcttaagaaaccagaaaagggagaggaaccaaccacagagaaaccaaaagaaagaggagaggagattgatactggaggtggcaagcaggaatcctgtgcccccggtgcagtcgtaaaagccaggcccatggaaggctcgctggaggagccccaggagacgtcacacagcggcagtgataaagagcacagggatgtggagagatctcaagaacaagaatctgaagcacaaagataccatgtggatgacggcaggaggcacagagctcaccacgagcctgaacggctttccagaaggagtgaggatgagcagagatgggggaaaggacctggccaagacagagggaagaaggggagccaggacagcggggctccgggggaggccatggagagactgggaagagcgcagaggtgtgacgacagtccagcacccagaaaagagcgactggcaaacaaggaccggccagccttgcagctgtatgatccaggagttcgcttccgagcgcgagagtgtggcggaaacaggaggatctgcaaggcagaaggttcggggactggtcctgagaagagggaagaggcagagtgagtcactgcacgcacctggcctccatggacgagcaagggcatcccagaaacgtgtaaatgaccccgagtgtgactgggaaggagaacttattccttaccaggaaactggaagctaaaaatacagagggtgacgtagaaacacgcagaaaccattctaaagaaagtagtgatcttgtattaaattgagcagaattctcacagattttaccattcctgttataaactagtatttgttgtttagccaaaacagaaaatgatttccactggacagtagaaaaatatgtgtaaaatagggaagaaagttagtattggatcagtgtgagtcctgaagcactttcagtgctgtgagaacgacatccactttgggtttcattcgtttgtaagcagaggagctgtcagtcactcgtgcttctcggtggcctctgagccatggtgtcgagtgaagagtagttcttgtttgttacaacctttgtgagtcagccatgcccgcaaagcgtgctgtgttttagtcctggtaggaatatttatcagagttcacactatataaaacccaacagcttcaactattgccctttcaacagttttgccactgaccggatagaaacggtttcagtctctggatggatgtgtttgtggtttgtaaccattacggtttaaaccatggtttaagaatttgcccaaataacagaaattttgttcgggaagggataaactagatatagcatacagagcctgtttttgagttttagatactttatttgtaaataacttaaaatagctttctgaaaccgtgcattctgtagtttcttcctttcagtgaaattgctaaatgtcaatgtatttttggcactgcgattttaaccatttattaaataaaaattttgtt

SEQ ID NO: 10862 - DNA, 1721 bp, Homo sapiens
  CDS (323)..(1561)
taattctacatgtgtcgatggcattaataactacacatgcctttgcccacctgagtatacaggtgagttgtgtgaggagaagctggacttctgtgcccaggacctgaacccctgccagcacgattcaaagtgcatcctaactccaaagggattcaaatgtgactgcacaccagggtacgtaggtgaacactgcgacatcgattttgacgactgccaagacaacaagtgtaaaaacggagcccactgcacagatgcagtgaacggctatacgtgcatatgccccgaaggttacagtggcttgttctgtgagttttctccacccatggtcctccctcgtaccagcccctgtgataattttgattgtcagaatggagctcagtgtatcgtcagaataaatgagccaatatgtcagtgtttgcctggctatcagggagaaaagtgtgaaaaattggttagtgtgaattttataaacaaagagtcttatcttcagattccttcagccaaggttcggcctcagacgaacataacacttcagattgccacagatgaagacagcggaatcctcctgtataagggtgacaaagaccatatcgcggtagaactctatcgggggcgtgttcgtgccagctatgacaccggctctcatccagcttctgccatttacagtgtggagacaatcaatgatggaaacttccacattgtggaactacttgccttggatcagagtctctctttgtccgtggatggtgggaaccccaaaatcatcactaacttgtcaaagcagtccactctgaattttgactctccactctatgtaggaggcatgccagggaagagtaacgtggcatctctgcgccaggcccctgggcagaacggaaccagcttccacggctgcatccggaacctttacatcaacagtgagctgcaggacttccagaaggtgccgatgcaaacaggcattttgcctggctgtgagccatgccacaagaaggtgtgtgcccatggcacatgccagcccagcagccaggcaggcttcacctgcgagtgccaggaaggatggatggggcccctctgtgaccaacggaccaatgacccttgccttggaaataaatgcgtacatggcacctgcttgcccatcaatgcgttctcctacagctgtaagtgcttggagggccatggaggtgtcctctgtgatgaagaggaggatctgtttaacccatgccaggcgatcaagtgcaagcatgggaagtgcaggctttcaggtctggggcagccctactgtgaatgcagcagtggatacacgggggacagctgtgatcgagaaatctcttgtcgaggggaaaggataagagattattaccaaaagcagcagggctatgctgcttgccaaacaaccaagaaggtgtcccgattagagtgcagaggtgggtgtgcaggagggcagtgctgtggaccgctgaggagcaagcggcggaaatactctttcgaatgcactgacggctcctcctttgtggacgaggttgagaaagtggtgaagtgcggctgtacgaggtgtgtgtcctaaacacactcccggcagctctgtctttggaaaaggttgtatacttcttgaccatgtgggactaatgaatgcttcatagtggaaatatttgaaatatattgtaaaatacagaacagacttatttttattatgagaataaagactttttttctgcatttgg

SEQ ID NO: 10863 - protein, 413 aa, Homo sapiens
MVLPRTSPCDNFDCQNGAQCIVRINEPICQCLPGYQGEKCEKLVSVNFINKESYLQIPSAKVRPQTNITLQIATDEDSGILLYKGDKDHIAVELYRGRVRASYDTGSHPASAIYSVETINDGNFHIVELLALDQSLSLSVDGGNPKIITNLSKQSTLNFDSPLYVGGMPGKSNVASLRQAPGQNGTSFHGCIRNLYINSELQDFQKVPMQTGILPGCEPCHKKVCAHGTCQPSSQAGFTCECQEGWMGPLCDQRTNDPCLGNKCVHGTCLPINAFSYSCKCLEGHGGVLCDEEEDLFNPCQAIKCKHGKCRLSGLGQPYCECSSGYTGDSCDREISCRGERIRDYYQKQQGYAACQTTKKVSRLECRGGCAGGQCCGPLRSKRRKYSFECTDGSSFVDEVEKVVKCGCTRCVS

SEQ ID NO: 10864 - DNA, 1391 bp, Homo sapiens
  CDS (144)..(1184)
cttcttcttaaaagagaaacgctgcgcgcgcgaggtgggcccctgtcttccagcagctccgggcctgctcgctaggcccgggaggcgcaggcgcaggcgcagtgggggtgagggcgcgtgggggcgcacagcctctggtgcacatggcttcctccccggcggtggacgtgtcctgcaggcggcgggagaagcggcggcagctggacgcgcgccgcagcaagtgccgcatccgcctgggcggccacatggagcagtggtgcctcctcaaggagcggctgggcttctccctgcactcgcagctcgccaagttcctgttggaccggtacacttcttcaggctgtgtcctctgtgcaggtcctgagcctttgcctccaaaaggtctgcagtatctggtgctcttgtcagcatcctcattgagttccagagctcctccacctgcagaagtcagggtgcagccacagctcagcaggacccctcaagcggcccagcagactgaggccctggccagcactgggagtcaggcccagtctgctccaaccccggcctgggatgaggacactgcacaaattggccccaagagaattaggaaagctgccaaaagagagctgatgccttgtgacttccctggctgtggaaggatcttctccaaccggcagtatttgaatcaccacaaaaagtaccagcacatccaccagaagtctttctcctgcccagagccagcctgtgggaagtctttcaactttaggaaacacctgaaggagcacatgaagctgcacagtgacacccgggactacatctgtgagttctgcgcccggtctttccgcactagcagcaaccttgtcatccacagacgtatccacactggagaaaaacccctgcagtgtgagatatgcgggtttacctgccgccagaaggcttccctgaactggcgccagcgcaagcatgcagagacggtggctgccttgcgcttcccctgtgaattctgcggcaagcgctttgagaagccagacagtgttgcagcccaccgtagcaaaagtcacccagccctgcttctagcccctcaagagtcacccagtggtcccctagagccctgtcccagcatctctgcccctgggcctctgggatccagcgaggggtccaggccctctgcatctcctcaggctccaaccctgcttcctcagcaatgagctctcctccagctttggcttttgggaagccagactccagggactgaaaaggagcaacaaggagagggtctgcttgagaaatgccagttgcttggtccccaggaactaaggcgacagagtgcagggtgggggcaagactgggctgtaggggagctggactactttagtcttcctaaaggacaaaataaacagtattttatgcag

SEQ ID NO: 10865 - protein, 347 aa, Homo sapiens [sequence omitted]

SEQ ID NO: 10866 - DNA, 1634 bp, Homo sapiens
  CDS (297)..(1463)
ccctaagtgagaggaccaacagttccgacagcgagcgctccccagatctgggccacagcacgcagattccaagaaaggtggtgtatgaccagctcaatcagatcctggtgtcagatgcagccctcccagaaaatgtcattctggtgaacaccactgactggcagggccagtatgtggctgagctgctccaggaccagcggaagcctgtggtgtgcacctgctccaccgtggaggtccaggccgtgctgtccgccctgctcacccggatccagcgctactgcaactgcaactcttccatgccgaggccagtgaaggtggctgctgtgggaggccagagctacctgagctccatcctcaggttctttgtcaagtccctggccaacatgacctccgactggcttggctacatgcgcttcctcatcatccccctcggttctcaccctgtggccaaatacttggggtcagtcgacagtaaatacagtagttccttcctggattctggttggagagatctgttcagtcgctcggagccaccagtgtcagagcaactggacgtggcagggcgggtgatgcagtacgtcaacggggcagccacgacacaccagcttcccgtggccgaagccatgctgacttgccggcataagttccctgatgaagactcctatcagaagtttattcccttcattggcgtggtgaaggtgggtctggttgaagactctccctccacagcaggcgatggggacgattctcctgtggtcagccttactgtgccctccacatcaccaccctccagctcgggcctgagccgagacgccacggccacccctccctcctccccatctatgagcagcgccctggccatcgtggggagccctaatagcccatatggggacgtgattggcctccaggtggactactggctgggccaccccggggagcggaggagggaaggcgacaagagggacgccagctcgaagaacaccctcaagagtgtcttccgctcagtgcaggtgtcccgcctgccccatagtggggaggcccagctttctggcaccatggccatgactgtggtcaccaaagaaaagaacaagaaagttcccaccatcttcctgagcaagaaaccccgagaaaaggaggtggattctaagagccaggtcattgaaggcatcagccgcctcatctgttcttccccctccttaggccccagcctgggcccagacccatcctcccagccaggtttccctccagcaggctccttccctccctgtcacctccctctcaccaacccggggtctgagcccctcattcctgaccgtccgtgttctcaggagtggttgaggacacagggccccagcccagccctctgcaccccccagcccggccatctgcgccccacagcccctttggagcttttctcttgtcctctcactccttcccagaagtttttgcacagaacttcattttgaaagtgtttttctcattctccatacctcccccaagctctcctccagcccttcccagggctcagccctgctgtcctgagcgtctcctgggccagagagaggagatgggggtgggagggactgagttgatgttgggtttttcattcaataaattggtgatttcttaccgac

SEQ ID NO: 10867 - protein, 389 aa, Homo sapiens
MPRPVKVAAVGGQSYLSSILRFFVKSLANMTSDWLGYMRFLIIPLGSHPVAKYLGSVDSKYSSSFLDSGWRDLFSRSEPPVSEQLDVAGRVMQYVNGAATTHQLPVAEAMLTCRHKFPDEDSYQKFIPFIGVVKVGLVEDSPSTAGDGDDSPVVSLTVPSTSPPSSSGLSRDATATPPSSPSMSSALAIVGSPNSPYGDVIGLQVDYWLGHPGERRREGDKRDASSKNTLKSVFRSVQVSRLPHSGEAQLSGTMAMTVVTKEKNKKVPTIFLSKKPREKEVDSKSQVIEGISRLICSSPSLGPSLGPDPSSQPGFPPAGSFPPCHLPLTNPGSEPLIPDRPCSQEWLRTQGPSPALCTPQPGHLRPTAPLELFSCPLTPSQKFLHRTSF

SEQ ID NO: 10868 - DNA, 1749 bp, Homo sapiens
  CDS (390)..(1739)
tctgcagccacgagaagcaaagttgacatttctggatcactctccccagacgcgtcacttgcccacaagcgggacacggcagtctcgctgagccagctgtgcagagggacagatggaagaaagctagagatgctgcttcgtgggcgctgaagttgcagaacttgggctggttttctttcttcccatcccccctcctcctgacaaaccacatcttgactcagatggtcgaaagaaaaactctttcagttatttgatatttgggaaccctccaggagaccataacttatttttgagggaggctccttctctccctttgctgggaacacacacacacacacacacacacacacacacacacacacacacacacacacacacagctgtacaccatggtggttcaggctgcagtggctccgaatagatcccaaagacttttactgaaaattccttatggatctctgagaaggcgcagcgttgaaaggatgacggagggccgccgatgtcaagtacatcttcttgatgacaggaagctggaactcctagtacagcccaagctgttggccaaggagcttcttgaccttgtggcttctcacttcaatctgaaggaaaaggagtactttggaatagcattcacagatgaaacgggacacttaaactggcttcagctagatcgaagagtattggaacatgacttccctaaaaagtcaggacccgtggttttatacttttgtgtcaggttctatatagaaagcatttcatacctgaaggataatgctaccattgagcttttctttctgaacgcgaagtcctgcatctacaaggagcttattgacgttgacagcgaagtggtgtttgaattagcttcctatattttacaggaggcaaagggagatttttctagcaatgaagttgtgaggagtgacttgaagaagctgccagcccttcccacccaagccctgaaggagcacccttccctggcctactgtgaagacagagtcattgagcactacaagaaactgaacggtcagacaagaggtcaagcaatcgtaaactacatgagcatcgtggggtctctcccaacctacggggttcactattatgcagtgaaggacaagcagggcataccatggtggctgggcctgagctacaaagggatcttccagtatgactaccatgataaagtgaagccaagaaagatattccaatggagacagttggaaaacctgtacttcagagaaaagaagttttccgtggaagttcatgacccacgcagggcttcagtgacaaggaggacgtttgggcacagcggcattgcagtgcacacgtggtatgcatgtccggcattgatcaagtccatctgggctatggccataagccaacaccagttctatctggacagaaagcagagtaagtccaaaatccatgcagcacgcagcctgagtgagatcgccatcgacctgaccgagacggggacgctgaagacctcgaagctggccaacatgggtagcaaggggaagatcatcagcggcagcagcggcagcctgctgtcttcaggtaggcagaggccagctggagggacgccccctgagcatggctgggaccccagaggggacccaggaaggtggggagagctgcagctggggagactgcagggcaagctgctccaaagctggctttgctttccagaccaaggttgggatccaaatgcgaatctgagaaaactgctcccaggaatcaaatagtggaagg

SEQ ID NO: 10869 - protein, 450 aa, Homo sapiens
MVVQAAVAPNRSQRLLLKIPYGSLRRRSVERMTEGRRCQVHLLDDRKLELLVQPKLLAKELLDLVASHFNLKEKEYFGIAFTDETGHLNWLQLDRRVLEHDFPKKSGPVVLYFCVRFYIESISYLKDNATIELFFLNAKSCIYKELIDVDSEVVFELASYILQEAKGDFSSNEVVRSDLKKLPALPTQALKEHPSLAYCEDRVIEHYKKLNGQTRGQAIVNYMSIVGSLPTYGVHYYAVKDKQGIPWWLGLSYKGIFQYDYHDKVKPRKIFQWRQLENLYFREKKFSVEVHDPRRASVTRRTFGHSGIAVHTWYACPALIKSIWAMAISQHQFYLDRKQSKSKIHAARSLSEIAIDLTETGTLKTSKLANMGSKGKIISGSSGSLLSSGRQRPAGGTPPEHGWDPRGDPGRWGELQLGRLQGKLLQSWLCFPDQGWDPNANLRKLLPGIK

SEQ ID NO: 10870 - DNA, 1693 bp, Homo sapiens
  CDS (596)..(1570)
tttttgtatgcaccacgggcggcggtggtcggtgcgggaggagggaggggagcttgcgggcccgagagggggcgacggcggcggcggtggcctgaggaggcccgagcggcggcggtggcggcgaaggccgaggcgtctaggtgtttttggaagagctgcagccctcttctcacagatgagctacgaggagatgatgacactgactgagcagcacctggagtctcagaacgtcaccaaaggtgcccgccacaagatagccctgagcatccagaagctgcgtgagagacagagcgtcctcaagtccctagagaaggatgtgctggaaggcgggaacctacgaaacgctctgcaggagctgcagcagatcatcatcactcccatcaaggcctacagtgtcctccaggccaccgtggctgccgccaccaccacccctactgccaaggatggggccccgggggaaccaccgctgccaggtgctgagcctcccctagcccaccccggcacagacaaaggcaccgaggccagagccgggaccatgtgacggcgctggccctcgccaccgccgtcccccgaccctggccccaggcccggcaccatgatgttccgagaccaggtgggcatcctcgctggctggttcaaaggctggaatgagtgtgagcagacagtggccctcctgtcacttccgaaacgggtcacccgtacccaggcccgcttcctgcagctctgcctggagcactcactggcggactgcaatgacatccacctgctggagtcggaggccaacagtgctgccatcgtcagccagtggcagcaggagtccaaagagaaggtggtgtccctcctgctgtcccaccttcccctgcttcagccaggcaacacagaggccaagtcggagtacatgaggctactgcagaaagtgctggcctactcaatcgagagcaatgctttcatcgaggagagtcgccagctgctttcctatgccctcatccacccagccaccacactggaggaccgcaacgcactggccctctggctgagccacctggaagagcggttggctagtggcttccgctcccggccagagccctcctaccattcacgtcaaggctcagatgagtgggggggccctgcagagctaggccctggggaggcagggtcaggctggcaggacaagccaccccgggaaagtggacacgtgcccttccacccatccagctcagtgccgccagccatcaacagtattgggagcaatgcaaacacaggtctcccctgccaaatccaccctagcccactgaagcgctccatgtcactcatccctacaagcccccaggtccctggtgagtggccgagtccagaggagcttggggcccgggctgcttttaccacgcccgatcacgcacctctctcgccccagagcagcgtggcctcctctggcagtgagcagacagaggagcagggctccagccggaacaccttccaggaggatggcagtggcatgaaagatgtgccctcatggctcaagagcctccgtttgcacaagtatgcagccctcttctcacagaatcagctttgagtaactgtacagtttttctcgctgttggagaagacttatttgttggagtttcacttgtttaatggtctgggcttattttggaaaaaaaaaaaacaaacaaaaaaaacgaattctgacctt

SEQ ID NO: 10871 - protein, 325 aa, Homo sapiens
MMFRDQVGILAGWFKGWNECEQTVALLSLPKRVTRTQARFLQLCLEHSLADCNDIHLLESEANSAAIVSQWQQESKEKVVSLLLSHLPLLQPGNTEAKSEYMRLLQKVLAYSIESNAFIEESRQLLSYALIHPATTLEDRNALALWLSHLEERLASGFRSRPEPSYHSRQGSDEWGGPAELGPGEAGSGWQDKPPRESGHVPFHPSSSVPPAINSIGSNANTGLPCQIHPSPLKRSMSLIPTSPQVPGEWPSPEELGARAAFTTPDHAPLSPQSSVASSGSEQTEEQGSSRNTFQEDGSGMKDVPSWLKSLRLHKYAALFSQNQL

SEQ ID NO: 10872 - DNA, 1679 bp, Homo sapiens
cactccatgccctgtgaatgaaacagatggctttcctgacctctaatcaaagcctacccatattgatctgttccttctagtccttagtatgtgctacctcttcttttctgtgccgaagtggtgagtagccaatagttatttcctctaccagtggtattttactaggcaattattggaaatagaatgctgccacccggtagtgataaatctaacatttctcgtagaagatataggtggattagttactccctggggcaatatggattagttcctgtgtccttcaaattgcactcaccaagcctgagccatgctttactgctgaaacatcctagcagagagaagtaagtggctcagggtggccctcttgtggtggacaagcattcccaggactctgctggtcactaaagaaaaggtagccctcaaacagtcctttttattatttttgattttattgtcatcattatcagtatcctccaagtcaagaatccgtaaataatacaatgagatgctaaaaacaagtttgaaaaatgtgagcaaggtctgtttctagttttaaaatagcccacatttctcaaatatgttactgtttggttcagaatttggaccactacctaaaaagaacagatcattcaaacgtgtcttttgaatatttctgtcatctggaaatgcctgcgcataagccccatgacggatgtgcttggctaaaaaacctgttgacgtgtcctcagccttcagaatagaagagacagccagtttcccatgattctaaggataaacatcccccactggaaaaatattacattagctggcaagtaataatccaaacatgtacatggatagtaaatattctgtgtgtgatcctcataattttatactccaaaacagtattttaggaggatcaaaattatatttattaacacacagttgaaattgccattctagaactcaaataacacaggaccaaatttgacagaatcagctgtggaactttatcaaaagtctgaagccaggacctcaccactggatggtctgagtcagaagtctggggagagttccagcattactatttttctttttcattctctgtgtgattatagtatgcagctaggactgagtgagagtaacactaaaccgtgatctccttggtggaatgctgtgggtactcctaggagagactctccaaatttgtgaatttataccagtgtagtgggctactcagaatgcaaacagtcacgctacatgtcacatttcagggaatcttcagagctgaccagacctgttgaagacaaggatttcttcctcttctttgagtcctcttggtctaacctggcacagaattggtattcacaaatatttgttaaatggaatgttaattgaagtacccaagaccttaggaattgaagataatttaagatttaagagttctgctaaacaactgagatctcatgatcttaaagtactttgaaaattgcaaggggcagacattattcaagaaggaaggatttcttaaaatacgtcctttatagtagcctttgaactttaacatgcagaagaatgagtttaggcggggcacagtgtttcaggcctataatctcagcactttgggaggcaaaggagggaggatcatttgagctcagaagttcaaaaccagcctgagcaacatagcaagaccttatctc

SEQ ID NO: 10873 - DNA, 1047 bp, Homo sapiens
  CDS (3)..(626)
caatggacaggagtgggctccctgaccttcaaggaagatttgagctatctgggaaaaacagacagtatccactggatgcattggaaccccaacccagcattggggatattaaggacattaaaaaagcagccaagtctatgctagacccagcacataaatctcatttccaccctgtgaccccaagtttagtattcttgtgtttcatatttgatgggttacaccaggcattactgagtgttggtgtgagcaagaggtctaatactgtggttgggaatgagaacgaggaaaggggtactccttatgctagcagattcaaagatatgcctaactttattgcccttgagaagtcatcagttctccgccactgctgtgaccttttgataggcattgcggctggatcaagtgataagatttgcaccagcagtctccaagttcagagacgattcaaggcaatgatggcatctattggaagactttcacatggtgagagtgctgatctgctaatcagctgcaatgcagaatcagccataggttggatcagctcaagaccatgggttggagaattaatgttcacacttctatttggagactttgaatcccctctacacaagctacgcaagtcaagttagttgccaagaaagcacagatgacaacctattaatgctgtgagaatgtttctagatcagtgcatggatggctccattgctctacgggccattgtgtctgagatcccagtctttgaggagaaaaaaaacaatggttaaaaaggcattggggaaatattttgagtttgggggtgtactttgccaccccattattggggagctgtcaccacgaatgttcccaaacttagcaacagcggcaaactactgggccaagatgagcaaccccacatttttgggatttaaagctcctgatgttataccaggatcaaccatcacactccctttgcttcaaatggcgtctaccccgtaagatcttgaggggggagtgttgggtggaatcatagatccatgcactcctaacatgaactaattctcattattt

SEQ ID NO: 10874 - protein, 208 aa, Homo sapiens
MDRSGLPDLQGRFELSGKNRQYPLDALEPQPSIGDIKDIKKAAKSMLDPAHKSHFHPVTPSLVFLCFIFDGLHQALLSVGVSKRSNTVVGNENEERGTPYASRFKDMPNFIALEKSSVLRHCCDLLIGIAAGSSDKICTSSLQVQRRFKAMMASIGRLSHGESADLLISCNAESAIGWISSRPWVGELMFTLLFGDFESPLHKLRKSS

SEQ ID NO: 10875 - DNA, 1632 bp, Homo sapiens
tcatcaatggatgaatggattttttaaaatgtgatacatacatatatatatacatacatacatatatatatatgcacaatggaataatattcagccataaaaaataatgaaatcttgtcatttgcaacaacatgaataaacctagagacactatgttaagtgaaataaactgagcataggacaaataccacattatctcattcatatgaggaattttaaaaaattgatgtcatagaagtagggagtagaatactggttgccagaggttggagaaagcagagcggcaggggagatagagataaacggttggtcaacaggtacaaagtaagctacacttagataggaggaacaagttctgttgttctattgcacagtaggacgactatagttagtgataatgtatatttcaaaatagctagaagagaggatttttaatgttttcaccacaatgaaatgataatgtttgaggtgaggaatttgctaattaccctgatttgatcattacacaatgtatacatgcattgaaacagtatactccttaagtacatatgattgttatgtcaattaaaaacaaaataaaactaaagaagaaattgctaagggagtaaattccaaatgttctcaccacaaaaataagtatttgaggtgatggatatgacaattagctggattccattattccacattgtattcataaatcataacatcctgtaccccataaatatatacaattataatttgtcaatttacaatttaaaataaaaattaaaaaagaattgatgtttctgtaaataaattagttaattcaaaacatttttaaaattttttctagtcatttaaatatgttaaatgttactgaaattaaaaatttaaatagagttggaagttgaggaagtttaggaaataaaaaacataaagagataaaagacaggagaaactattaacaaagagaagaggagattaagtctaagaggctcactttgtaactaatagaagatttagagaaggccacagagagaactgaggggaggaaactaccaaaaattaattgaagaaaatctcccagaatggaagaatattagtcttcagattgaaagtaccaacagagtccatgcgaaaagttgagaaaatgcccacaccaagttaccttgttgtgaaatcttggaacgctagagataaagagaatctttttttaagtttgtggagaaaaaggagagagaagcatggaagtgggtgaagggagatgaagaaaacagtacacattgaaagaagaggaaaagaagacgatcacagtgacgtcaggctttttaacattatcattgcaagctagaagaaatgagaaaatgccttcaaaattctggaaagtaatattcaatccaaaccaacatgcagtgaatgacatcccctagagcttttcggttttggttcgcatttttaaaacactttgaataaaaatgaccccctagggttttgcagtgcataatctttacaaccatatgcggcaactctactcaattcagtcaaatttgcagtcacatttgaagacagaatacagacatagaaggactcaaaatgtacacatccattcttttctcaggaaggatatgctctagaaaagtgaacagataatcc

SEQ ID NO: 10876 - DNA, 1537 bp, Homo sapiens
  CDS (22)..(504)
tatagcacagaaggtctttccatggcactggcgtctttacgaaatctctacactccaaatataaaggtcagccgactgctgattttgggaggtgccaatattaattaccggacagaggttttaaataatgctccaattctatgtgttcagtcccatcttggttacacagaaatggtagccctgctgctggagttcggggccaacgtggatgcctcttctgaaagtggcctgactcccctgggatatgctgcagcagcagggtacctgagcattgtggtgctgctgtgcaagaaacgggccaaggtggatcatttggataagaacgggcagtgtgctttggttcatgctgcactccgaggtcatctggaggttgtcaagtttttgattcagtgtgactggacgatggccggccagcagcaaggagtatttaagaagagccatgccatccaacaggccctcattgctgcagccagcatgggttatactgaggtaagaagtaggcaataggattgttttttcaagctctgtattgaaggacccaggaaaccaggagaaaagattgcacgaagacaaaattgccaaccaaattaatgtgaattcgtgatcgctgctctgaataataaggagattaaactccatgaagcactttactcaaatgccaaagtccctcaaattataggtatagaaaggtgcgagttggaaaggaccgtggaaatgatataattattctccatgttttcctccctgtttaacagacagtggcaccaaggctcaaagagatgaattattgaggtgtagtcacatggttagataatgtggcacaggaacagcataacatttagaatctcagaaggaccagatttgagtcccagcctcgctattcattaactctagcccttgaacaatttacctatctcttagaagtttagtttcccatcagcaaagtgaagctaataaactcctttatacaaggctgttgtaagggatgcttggtaaactgttaaacattatacagtttatttattaatgataataacaataatagtggcaaatgtagggaattggtagtgtgctaggaaatgtttaacaaccaactgtgaagaggggtgtggggtggaacaggggtgtgtgtttgtgtgtgcatacgtttattataaattttactgatagaatgtgttgccgtggaatactacacagccgtaagaagaacaaaatcatgtcctttgcagcaacatagatgcaactgaaggccagtatcctaagtgagttaacacaggaacagaaaaccaaataccacatgttctcattgataagtgggagctaaacattgagtacctatggacataaagaggcaacagtagacactggggactactgggaggggaaaggaaggggaaagggttgaaaaaaactgttgttatcctcactaccaggtgatgggaacttttgtgtcccaaacctcggcatcatccagtacaccatgaaacaaacctgtacattcactgcccttgaatctacaataaaatttgaaataatt

SEQ ID NO: 10877 - protein, 161 aa, Homo sapiens
MALASLRNLYTPNIKVSRLLILGGANINYRTEVLNNAPILCVQSHLGYTEMVALLLEFGANVDASSESGLTPLGYAAAAGYLSIVVLLCKKRAKVDHLDKNGQCALVHAALRGHLEVVKFLIQCDWTMAGQQQGVFKKSHAIQQALIAAASMGYTEVRSRQ

SEQ ID NO: 10878 - DNA, 1513 bp, Homo sapiens
aaggatatggaaaaactgaacaatgccatcagacttgctaattgacatttataaagtgttcctccctcaaatagcagaatatacattcctttaaaatcctcagggagcattcagaaaaatagatgacagccagagacataaaacaaacctaaaaatgattaaaagaattgaaataatcaaaagtagttatcttaccataatgagatttaactagaaatcaacaaaagaaagataattgataaatctctaaatactaggaaattaaacaacctacttctaagtgatctgtgaatcaaagtctcagagaaagcagaaaatattttgaagtgaacaaaattgaaaatgcaatatatcataattcatatgaagtagctaaatcagggcttagagggaaatatggaggattaaaccctcatattagaaaagaaaaaaagaactgcaatgagcaatctaagcttctacctaaagaaactagaaaaagaagagcaaaacaagtctaaagcaagcagaaagaaggaattttataaagataagagtagatatcaatgaatttgaaaacaatagtggagaaaaccaataaaattaaaaatctggttttttaagtatatcaagagctgataaacctctagccagattgacaaggaaatatgacataaattaccattgtaaggcatgaaagagggcatatcactatagtccccacaaaaatataataagcaaacaccatcaagagctctgtgcacataaattcaacaatatagatgaaatggaccaaatcctagaaagaagaggctgccaaaactcaccccaaaatatccctttatatctcaataaattcaatgtataattagatctttaccaaaaactcaaaaatcaaaacctaaaaaactacaggtttggatggtttcactggtagaattctctgccaaacatttgtggaagaaatgacatcaattctgtaagatctttttcaaaaaacaaaagaggaggcaacatttcccaactcgttttgtgaagccagcattatcctggttaccaaaccagacaaagttagtacagtaaaagaaaactgcagaccaatgtctcttaggaacatagatgcagaaatccttcacaaaatattagtacattgaattaggcaataataaaaataataacaagtcatgaccgagtggatttaggcttggaatataaggcagcatttgaaaatcagtcaatgtagggctgggcacagtggctcacagctgtaatcccagcactttgggaggccaaggcaggcagatcatgaagtcaagaaatcgagaacatcctggccaacatggtgaaaccttgtctctactaaaaaatacaaaaattagctgagcgtggtggcacatgcctgtagtcccagctacgcaggaggctgaggcaggagaattgttttaacccaggaggtggaggttgcagtgagccaagattgcgccactgcactccagcctgggcaacagagcgagactgcgtctcaaaaacaaac

SEQ ID NO: 10879 - DNA, 1228 bp, Homo sapiens
  CDS (398)..(1228)
gcgggtctgcggccgagccatcggctcgcctcggctcgactggaggggaggaggaggagcaggccgagcgcattcgcgctggagcttgcgaggagcgcagggtggagcgcgccagccggggtcctcggatctggcccaggtgaggaattttaaattggaacaagagcaagaaaaaaacaaaatcttgtcagaagcactggagacgctggccactgaacatcatgaattagagcagtctctggtgaaaggctctccacccgccagcatccttagcgaggacgagttctatgatgcgctgtcagattccgagtccgaaaggtccctgagtagattggaagcagtgacagcacgctcctttgaagaggaaggagagcatttgggcagtagaaaacacagaatgtccgaagaaaaagactgtggtggcggagatgctctctccaatggcatcaagaaacacagaacaagtttgccttctcctatgttttccagaaatgacttcagtatctggagcatcctcagaaaatgtattggaatggaactatccaagatcacgatgccagttatatttaatgagcctctgagcttcctacagcgcctaactgaatacatggagcatacttacctcatccacaaggccagttcactctctgatcctgtggaaaggatgcagtgtgtagctgcgtttgctgtatctgctgttgcttctcagtgggaacggactggaaaacctttcaacccactgctgggagagacttatgaattagtgcgagatgaccttggatttagactcatctccgaacaggtcagccatcacccaccaatcagtgcatttcatgctgaaggattaaacaatgacttcatctttcatggctctatctatcccaaactgaaattctgggggaagagtgtagaagcagaacccaaaggaaccatcaccttggagctccttgaacacaatgaggcatatacatggacaaatcccacctgctgtgtgcataatatcattgtgggtaaactgtggatcgaacagtacggcaatgtggaaattataaaccacaaggctggggacaaatgtgtgttgaattttaagccatgtggcctttttggtaaggaattacacaaagttgaaggctacattcaagataaaagcaaaaagaagctctgtgccctctatgggaagtggactgaatgtttatacagtgttgaccctgccacgtttgacgcttac

SEQ ID NO: 10880 - protein, 277 aa, Homo sapiens
MSEEKDCGGGDALSNGIKKHRTSLPSPMFSRNDFSIWSILRKCIGMELSKITMPVIFNEPLSFLQRLTEYMEHTYLIHKASSLSDPVERMQCVAAFAVSAVASQWERTGKPFNPLLGETYELVRDDLGFRLISEQVSHHPPISAFHAEGLNNDFIFHGSIYPKLKFWGKSVEAEPKGTITLELLEHNEAYTWTNPTCCVHNIIVGKLWIEQYGNVEIINHKAGDKCVLNFKPCGLFGKELHKVEGYIQDKSKKKLCALYGKWTECLYSVDPATFDAY

SEQ ID NO: 10881 - DNA, 746 bp, Homo sapiens
  CDS (40)..(687)
cttcttagccgtggctgcctcagcacctcgaggatcgacatggacgctctcgaggactacgtttggccgcgggcaacctcggagcttatactcctcccagtgacgggtctggagtgcgtgggggaccggctgttggcgggtgagggtcccgatgtcctggtgtacagcttggactttggtgggcatctgcggatgataaagcgagtgcagaacctgcttggccactatcttatccatggcttccgggtacggccagagcctaatggagaccttgacttggaggccatggtggctgtgtttggaagcaagggactccgagttgtgaaaattagctggggacagggccacttctgggagctttggcgctctggcctgtggaacatgtctgactggatttgggatgcacgctggcttgagggaaatatagccttggccctgggccacaactcagtggtgctatatgaccctgtagtagggtgcatcctgcaagaggtgccctgcacagacaggtgcaccctctcttcagcctgcctgattggagacgcctggaaggagctgaccatagtggcaggtgctgtttccaaccagctcttggtctggtacccagcaactgcctttaccctatacctctctgcacgtcccaccccgttttgctgtgtgctcacccccaggatgtgtacccggttgtagtaggagctgaaatccatgctgagctgtaccagaataaagaatagagtgtagagtgt

SEQ ID NO: 10882 - protein, 216 aa, Homo sapiens
MDALEDYVWPRATSELILLPVTGLECVGDRLLAGEGPDVLVYSLDFGGHLRMIKRVQNLLGHYLIHGFRVRPEPNGDLDLEAMVAVFGSKGLRVVKISWGQGHFWELWRSGLWNMSDWIWDARWLEGNIALALGHNSVVLYDPVVGCILQEVPCTDRCTLSSACLIGDAWKELTIVAGAVSNQLLVWYPATAFTLYLSARPTPFCCVLTPRMCTRL

SEQ ID NO: 10883 - DNA, 1215 bp, Homo sapiens
  CDS (39)..(1169)
tttcactggatgccgtatctctgaaggatactctagttatgctggttgttgacatgtcaaagccttggactgctttggattctttacagaaatgggcaagtgttgttagagaacatgttgacaaactgaaaatccctcctgaagaaatgaaacaaatggaacaaaagttgattagagacttccaagaatatgtagagccaggagaagacttcccggcttctccccagagaagaaatactgcgtcacaagaagacaaagatgacagtgtagttttacctctgggtgcggatacacttacacataacttgggcattccagtactagtagtttgcacaaagtgtgatgccattagtgtattggagaaagaacatgactacagagatgaacattttgattttattcagtcacatatccggaagttttgtttacagtatggtgcagcacttatttacacttcagtaaaagaaaacaaaaatatagacttagtatataaatacatcgttcagaaactatatggatttccctataagattcctgctgttgttgtggaaaaggatgcagtatttattccagcagggtgggataatgataagaaaataggaatattacatgaaaattttcaaacattaaaagcagaagataattttgaagacatcataactaaaccacctgttcgaaagtttgtacatgagaaggaaattatggcagaagatgatcaggtgtttcttatgaagctacagtcccttttagcaaagcaaccaccaactgcagctggaaggcctgtggatgcctcaccaagagtcccaggaggctccccacgaacaccaaatagatctgtatcatctaatgttgccagcgtgtcacccattcctgctgggtcaaaaaaaattgatccaaacatgaaagctggagctacaagtgaaggcgttctggcaaatttcttcaacagtttgttgagtaaaaagactggctctccaggaggccctggtgtgagtggtggtagccctgcaggtggggctggaggtggaagcagtggtttaccaccatccaccaaaaagtcaggccagaagcctgtcttagatgttcatgcagaactagacagaattacacgaaaaccagttacagtttctcccacaacacctacatctcctacggaaggagaagcttcttgaagataccaaataaagccatttattctgttttctgggataatgt

SEQ ID NO: 10884 - protein, 377 aa, Homo sapiens
MLVVDMSKPWTALDSLQKWASVVREHVDKLKIPPEEMKQMEQKLIRDFQEYVEPGEDFPASPQRRNTASQEDKDDSVVLPLGADTLTHNLGIPVLVVCTKCDAISVLEKEHDYRDEHFDFIQSHIRKFCLQYGAALIYTSVKENKNIDLVYKYIVQKLYGFPYKIPAVVVEKDAVFIPAGWDNDKKIGILHENFQTLKAEDNFEDIITKPPVRKFVHEKEIMAEDDQVFLMKLQSLLAKQPPTAAGRPVDASPRVPGGSPRTPNRSVSSNVASVSPIPAGSKKIDPNMKAGATSEGVLANFFNSLLSKKTGSPGGPGVSGGSPAGGAGGGSSGLPPSTKKSGQKPVLDVHAELDRITRKPVTVSPTTPTSPTEGEAS

SEQ ID NO: 10885 - DNA, 1140 bp, Homo sapiens
caaaatcatgtggatatattttaaaagatccagcttacttctgtttctgtccatgaaagattaactaccacaagaattgccctctaacagcaggtgattagagaactggacaaaaatctaggaaacagctgttttcagacttcaggtaacagtagaagactgtaattcttaactgaaaggaaacagatgaagtgagccctgggattgcactgtttgcagtatgaggagaaggacccaaacatagtctagtggtgtgcatgagttgatgagacagaagagaaaagttcattggcggagaagtggctaggatatataggaaataccagagagaagggagctacagagatagaagagagcaagagcaggcaagtgccagtctagagatttctagtagggtctcctcaaatctttgactgaatactgattgagtagccatggtacacaataccatgaggctggagaaagaaagtgatagggcagttctcagagctcacatagggctgggaatagtttgtgtttccatcagccagcatagagacatagaaccttgaacagaaacatcagaagggtaatgccatagtagtgggaccaaattagtctgaggctagtgctgcattggacttcttctaacaaaaattgaaagcaaacattgaaaggatcaaattgatttaaaataatttatttgtgtgctagaacaaagtccaggatcctttaagataatacagtaaaatccagcaccaagaatgtaaaattcacaatggccagtatctagtcagaatttttcatgtgtattggggatgagagtagtgtggaggggcaaaagagggcttaccaagagggcatcaggaaacctttgggagtgttgggtatattctaaaagtgtattgacagttacatgtgtatatacatgtgtcaacacttatgtatgtagtttaaacatattcactttattatatgctagttatacatcaataaagctgttaagaatgatcaggtatgcaaagaagcaaggaaatatgatccacaacaaaaagaagaaatgacaggacaatttaattagcagacaaacatgttaaaacatgttatacatatgctcaagaatgtaaaggaaaatgtgaaaatggggagaaaaaatatatt

SEQ ID NO: 10886 - DNA, 1758 bp, Homo sapiens
  CDS (176)..(475)
gatgataggagttaagagaggactatagaaaactgggtctctaagctgatgtgtcaagtcacactgtcctctgcttatcctaagcttaccttgctcaaatttcttttttttttctttttctttgtttttggtttttattttttcttaaatttcaaggatattccttcttttgtaaatgtcacagagtatcatggctctgtcgccgaggctggagtgcaatggtgcagtctcaggtcactgcaacccctgccttccaggttcaagcgattctcctccctcagcctcccaagtagctgggattacaggcacatgccatcatgcccggctaatttttgtatttttggtagagatggggtttcaccatgttggccaggctggtctggaactcctgacctcaggtgatttgcccacctcagcctcccaaagtgctgggattacaggtgtgagccaccgtgcccgtcccaaccaggcttcttaaatgaattctaagatagaaacaacaggagctgccaggactctcttaagggctgaacctaggactgtcacagtgacatttctgccatattctgctggtcacaaggcaagcccaaattcaaaaggagagaaatagacctcttagagtttcctaataaaaggtaatttcattaaaaatacaattcataaattagccctatgtttactactgtcttttcagctctttttttattccatgcattaattgattcgtcaccacttggattgtgccaccaatgtttctatgacatgatctaaaaaaaaaaaaaaaaaaaaaaagggctcagtagttttcacttaaaagacaaagaggcccactgagctattacagatgttagttaggattcatttactttaatatggtagaaagaatgctatgataccactttagtgatgaacaaaataagcttaatcacatcctaggagctaagtattctgacattataatctcttctctcagagtcccatcacagcagtcttaggattcaagatctattcttgggaaacattatagaaccagtgtgtcatgtacatacaaatgagggaaaatataatggctttggtaatcctgtagttatctttcttgtcatatactctttttttcatttttaaaaattggggcaaaatttatataacataaagttaaccattctgaagtgtacaatttaatggcatttaatacattcacagtgttgtacgacttttttttttttgaggaaaagcatatttttaggataatgtcaaaacagattaataagatgctaataagatggccagacattcactcagaagtgttttttgttttgttttggtgaaatggtatgagagatatgttgccctacacttaggccactgcattcccgcttaagtgccaggattgtgtcagcaacaggatggcctaaacaatctcagtcttgtctcctgccagccccctaaatcttccagaattgcaagaataggccaggtgtggtggctcacacctgtaatcccaacactttggaaggccaaggcaggcggatcacttgaggccaggagtttgagaccagcctggccaacatggcaaacccccatctctactaaaaatacaaaaattagccaggcaggtgtggtggtgcatgccggtaatctcagtttcttgggaggttcgggtgggatgatcgcttgaacctgggaggcggaggctgcagtgagccgagatcacgccactgcactccagcctgggcgacagaatgaggctttttcttt

SEQ ID NO: 10887 - protein, 100 aa, Homo sapiens
MSQSIMALSPRLECNGAVSGHCNPCLPGSSDSPPSASQVAGITGTCHHARLIFVFLVEMGFHHVGQAGLELLTSGDLPTSASQSAGITGVSHRARPNQAS

SEQ ID NO: 10888 - DNA, 2879 bp, Homo sapiens
tagtgcgtgtgctggggcgagcgggagcgggcgaggatgggcacaggatagaggcagagccacccacgccgccgcggccccacgctgggcgacagagcctccagttccccttcaatggtggcgggtcgccggagctctgatcgccgggaacccttgccgctgctgtcctgcgaccccaagcaggtatagacacgtgtggccgtttacgctgtaggatcctcattcccactggctttgaacattttggggacttacaatgccgccacccgcggacatcgtcaaggtggccatagaatggccgggcgcctaccccaaactcatggaaattgatcagaaaaaaccactgtctgcaataataaaggaagtctgtgatgggtggtctcttgccaaccatgaatattttgcactccagcatgccgatagttcaaacttctatatcacagaaaagaaccgcaatgagataaaaaatggcactatccttcgattaaccacatctccagtaagttgatcttagcttctgacttccagcaaactctttgctctgcgtttctgctatatgtgattgtgggatattaatttttgaggttgactttagtgcaaagcaaaaggcttccagaatgtcctgacatgcagattctggattagcaggaatgcccctccgtagatttcccactgcagaggaggaagaccttattccaggcgaagggcaagcttgtctaacctgcggcccaggatagctttgaattcacaaattcgtaaactttctcaaaacattatgagttgttctgtattttatttagttcatcagctatcgttagcgtattttatgtgtggcccaagacattcttcttcttcctgtggcccagggaagccaaaagattggacacttctgctttaagatttgagtttggaggtcatcttaacaacttccgtgttacagctgggatcactcacctgtaccaattggttttacccacctactcacacatccacctaatgccatctgagcaaattcagacaacaaacaaagcaaacaaaaccaaagtcagttactttcctttaaagtcggttactttcctttaaagtcagtgtggctgggcgcggtggctcatgcctgtaatcccagcactttgggaggccgaggcaggtggatcaggaggtcaggagatcaagaccatcttggctaacacagtgaaaccctgtctctactaaaaatacaaaaaattagccgggcgtggtggtggacgcctgtagtcccagctactcgggaggctaaggcaggagaatggcgtgaaacctaataggtggagcttgcagtgagcagaggtagtgccactgcactccagcctgggtgagagagtgagactccatctcaaaaaaaaaaaagaaaaaaaaagaaaaagtcagtgtgtgtgtgtgtgtgtgtgtctgtgtgtgtgtgtgtgtgtgagagagagagagagagtttaagtattttgtagctttaatgggttattatgacaattcataaaaataatttagaaatattgaccacttcactgatccattgacagctgattctacataagaactttagagtcttctgaattaaagctgctaaacaagacgctacagtatatttagactattgtagctgatgatgtctctcttcttggtctttcctacttgcttggagatactttaggtagtaacattagcatatttaactatattattttacagtgcatttcattgctttcctaaaaaattatctgccccaaatacaccaagtgttactattttcactctgcatatgtgatgaaaactgtgtctaactatcattttcagtttccactgaagccatgtggtagactaaaaataaatttaaaaattgggaaaagcatctggctaaaattaagctgtgggtactgtaactaccataaatccttattgttgaaaattacattagtgtggcttagaaactcctaaacattttgcccaataacatcctgaacctaaaaacagtgatgagctcaatggagtgagtcgctacagttggctgaactgtctttgatgcctgctttgctacttaatggagattataatctactcatttttcagtggctacatgatgagctgaggcgttttcgtctgactttgcattggtcttcttactcaagtcagcatgaatgaatgttaatttgacctttacaccattgttttatgtgttttttgtagtttctgattatcctgctaaaagtcatcatctgcttgctggacagaaaaagtagaccttgccttttatttcattttagagtctaaaagacagctttttaatcaaagccttctctaagccaaagaaggagttagtttcatttttttactgctgtggatttatgaacaaaaattccgcaatctaagtcactccttgagagaaggcttagatgttaggcagagtgaagtttttcagcatcccaaaagaaacttagcgtgacttgtcatcaggaagaatggaatttgtgttcttgagataatgatcctcacattcccagctcagtgaatggaaagatgtgaaagccagtgtaagaggcactattaaaagatgggagcagccgggtgcagtggctcacgcctgtaatcccagcactttgggaggccgaggcaggcggatcacgaggtcaggagatcaagaccatcctggctaacacggtgtaaaccccgtctctactaaaaatacaaaaaaaattagccaggcgtggtggcaggcgcctgtagtcccagctactcgggaggctgacgcaggagaatggcgtgaacccaggaggtggagcttacagtgagcagagatgacgccactgcactccagcctgggcaacagagtgagactatgtctctgtctc

SEQ ID NO: 10889 - DNA, 1953 bp, Homo sapiens
gctttaatgatttatggcaaactcatactagccttgatcagagaggtgaccctggcagttattgagcattaactctggaggactgacgccactgagtctttctacacactgtaatttagtgttcctatccaagatggccactaaattgcacttcttctattttcaccctctggagaatggtaaaaagcatgatttgcaaatattgtcaagtccaaagtgtgtttctaaactactaagctagccaaatgcatctctatatgttacaatgttctgcagatgtgaaaaaatccttcccgggtttatgaaagtgagaatgatatgcatctttagctgcctctggcatccggcacgtcacacagtgtggtcagtccagtcaggctgcccgagccacagattcccagcggcttcatttgtcagacaagctgacaggtgttggtcaggaaaatactgatcaagttgtttttgttgttgttgttttgagacagggtctcactctgtcacccaggctggagtgcagtggtgcgatcttggctcactacaacctctgcctcccaggttcaagcgattctcctccctcagcctcccgagtagctgggattacaggtgcccacgacgacacccagataatgtttgtatttttgtagagacggtttcaccatgttggccaggctggtctcgaactcaagtgatccacccgcctcggcctcccaaagtgctgggattacaggcatgagccactgcactggccttcaagatgttaaaagaaagtattattgtcaatgactgagtatttataaggacagaaattcctgaaattactccgttgatgctcctggtcctgaggcctcctttagagtacgggggagccttgatattgaaggccatggagggaagaatcagcagagcagcatctccaagcatcagcatctgggttccaggaaaaggtgcacgcactttgtgctggtagcacctgcgtcagattcccaagatgctctgaaacagaagcatttactggagtaaaatactgccttacaggctgtgcacagtggttcacgcctgtaatcccagcatttagggaggccaaggcgggcagatcacctgaggtcgggagttcgagaccatcctggccaacatggtgaaaccccatctctactaaaactacaaaattcagctgggcgtggtggcacacgccaggagtcccagctactcaggagtctgaggcacaagaatcgcttgaacccgggtggcagaggttgcagtgagctgagatggtaccactgcactccagcctgggtgacagagcaagactttgtctcaaaaaaataaatactgccttacaaaggagagggcaaaatagagtatttctgatgctgactgacaatgcaagtgacatgaaaatagcccccatgattcaactctaggccagcaactcttattactatgcctgtgaactctttgggaaacttacaaatataaattcctacatcctactctggtagtcagctttgtttggtctagggtgggtccaggactcctcacttttagtaattgtccctgccgattcttttttttaaataatggctttattgggatataattcacttaccataaaattgactctcataaagcatataatttagtggtttctagtatactgactgtgttgtgtaacaaccaccactctataattttagaacatttccatcatcctgcccccaaaatccatacctattagcagcctggccaacgtggcaaaaccccaaaaccccatctctacaaaaaaatacaaaaaaaaaaatagccggacagggtggtgcgctcttgcctcagtcacagctagctgaggggctgaggcaggattgcttgaaccaggaaggttgagactgcagtcagccaagattgtgccactgcactctggcctgggcgacagagcgaggctccgtctcaaaaaag

SEQ ID NO: 10890 - DNA, 2719 bp, Homo sapiens
agatagcatgtgtaattaatttttaatgcagtgctggatgcagcgctttcaagcagttagtggatgtgaagaagcagcactggccaaggacatcagagacctcagagcaaggcagccccgttctcctttaaagggactcggaaagtggcagaggaggcttgcattgccctctgtgtggagcggactggcccagaaatgggttcttctcgggtgacctgaggtcaagtcagtctataacaatctaagaccagggatcccaagagatcatctcctccaacctcttcattatataaatggggaaaccaaggcagagagtggggatgaagccatgacacatgggtggcagagctgactcatacctgggtctgcccactaggccatactacctctcttgagtttttattgaaaaccagaaaaggaagttcgtcgcccagtggaagccacttaaagattgatttctgcctgaccatgaggcttggtgtgaaccctgcaatgagattggtagcaggtagagctctgatgttgaggagccccacgttgggtgccttggacttcagctctgctatctgcagtgggagcccaccagacacatcctgggtttgagactctggggttgtgctttgacagctggctgccctgtccctgtggggctctgtggcatggatgtgtgtttgaagttaaatgtcattgtggacccgtgttagactgcaggcattgtgggaagctctcgagatggggccatcctcggtccttcccttgcagtgaatgggagtgagtatgtgatcccaggctagccacttacttcctctctccaatcttcagtgtccccacctgtaaaatggggacactgaagtacttgcttaccatccctctactggcaggtcccatgaacagctaccatctgggcgtggccacagcccatgaccagcacctgggggaatcagagggaaaaggccggtgggaagggaaggagggagaaagctgagatgccggaaagccttttgagactctggccttgggtaatcggcaccccagtgacgacttagctcttggaaagccacttgcctgggagagtttcttagtgtgaatgaaggcagaggaagggccaacatcatcagtgttcctggggcttgccactgtttgctaaagggccggctcagtcctaggcatgacatctcatcgttgtaacgctcccaagaagaggcactcccccacccttttgcttatgaggatattggggctcagagaggccacacaacccaccaggggtcacacagcacacaaatagcagaacttggacagagagtctcaaaacagagattcagactcaggtctggccagcctcccagctgtacttggggctctcccgtctggcttcccactgggctgtagtggacaacagagaaggagctgctggtagaaaaccaaatcaaactctgatatggtacctgggagggtcctgaaggtcttccttcatgcactggtcatccttgtgccagaccctgggctggactgagggatccggaaatgggcatgacggggtccttgccctagaggaactcaccgtggtgggggtgcccatggagggccttctcactcagtggatgtgaaatgcatgtccccatggcgcctttctctgtttgaaaaaaatgaatcaattggctgctgctcgggtgctccctcacttattgccatggtgcagctcaagagcagatctcaggatggagaggtgtcccacctgaggacagcttgtccttgtggtcgcattgctgagaggtggggggtaccttctgtgaggatttttacctgaatgaagcacaagtggtgcctgactgcattggaatccacgtgattattggcgtgtttttgactctcattttatccagtggtgcattgggcccatggctggtccataaccgcatgttatgtggaagaagcgagagagtaatgggttttccatgaaaggtggtgctgtttctggaaatggggcatacatatgctcatcctcatggagcagcgccgtattaaacagaattgtgtgaattgaaggtcacctggaccactcttggaaaatgctcccgacccccatggggttccttccagagaatttgtgttctctgtacctgagatcaaatgtgtgtctaagcaattctggcccctggctcccaccaccctaccctctccacaaaataatagacattaggggaggtaagggaacagaagaggtctctttgcagatattatatttttaaaaaatggttctatgtaataagcagcagctaaggagacagaaagacagtagatgaagagagtgccaatatcttccatggggaaaaatgaatgaactgaaagagaatattatttttctagaatacagaaagctgtcctctcacagatcagctggaattccaaggtggattatggacttcttctaactcccattgatagtgcttcttaccaggtgaagggaagggctactttttcctaaaggagaaaaaagctttcagacaaagctcgtaccaacccctgaactgcaaatttgctcaagtgaccgtgcatacttatattcctaatttaaatgattatttatgtcaaacgctcattgtgaaacttgaaaatgttgtattacattacatcaaataaagtttacttgtagcagacagaaagagagaaagagaaagaaagaaaggaaagaaaggaaggaaagaaggaaagaaag

SEQ ID NO: 10891 - DNA, 1692 bp, Homo sapiens
  CDS (137)..(1543)
agtgttccgcgtccgggggtttgtgggagttgccttgacctgcagctccgccaccgcggacccgccttctgccctcagcagcagacgctctgtcccgcccgggcagctctgcgaggcagcggctggagagggaaccatggggactgtgcacgcccggagtttggagcctcttccatcaagtggacctgattttggaggattaggagaagaagctgaatttgttgaagttgagcctgaagctaaacaggaaattcttgaaaacaaagatgtggttgttcaacatgttcattttgatggacttggaaggactaaagatgatatcatcatttgtgaaattggagatgttttcaaggccaaaaacctaattgaggtaatgcggaaatctcatgaagcccgtgaaaaattgctccgtcttggaatttttagacaagtggatgttttgattgacacatgtcaaggtgatggcgcacttccaaatgggttagacgttacctttgaagtaactgaattgaggagattaacgggcagttataacaccatggttgggaacaatgaaggcagtatggtacttggcctcaagcttcctaatcttcttggtcgtgcagaaaaggtgacctttcagttttcctatggaacaaaagaaacttcgtatggcctgtccttcttcaaaccacggcccggaaacttcgaaagaaatttctctgtaaacttatataaagttactggacagttcccttggagctcactgcgggagacggacagaggaatgtcagctgagtacagttttcccatatggaagaccagccacactgtcaagtgggaaggcgtatggcgagaactgggctgcctctcaaggacggcgtcatttgctgttcgaaaagaaagcggacattcactgaaatcatctctttcgcatgccatggtcatcgattctcggaattcttccatcttaccaaggagaggtgctttgctgaaagttaaccaggaactggcaggctacactggcggggatgtgagcttcatcaaagaagattttgaacttcagttgaacaagcaactcatatttgattcagttttttcagcgtctttctggggcggaatgttggtacccattggtgataagccgtcaagcattgctgataggttttacctcgggggacccacaagcgtccgcggattcagcatgcacagcatcgggccacagagcgaaggggactacctaggtggagaagcgtactgggccggcggcctgcacctctacaccccattacctttccggccaggccagggtggctttggagaacttttccgaacacacttctttctcaacgcaggaaacctctgcaacctcaactatggggagggccccaaagctcatattcgtaagctggctgagtgcatccgctggtcgtacggggccgggattgtcctcaggcttggcaacatcgctcggttggaacttaattactgcgtccccatgggagtacagacaggcgacaggatatgtgatggcgtccagtttggagctgggataaggttcctgtagccgacacccctacaggagaagctctgggactggggcagcagcaaggcgcccatgccacacaccgtctctcgaggaaacgcggttcagcgattctttgactgcggaccctgtgggaaaccccgtcaataaatgttaaagacacactc

SEQ ID NO: 10892 - protein, 469 aa, Homo sapiens [sequence omitted]

SEQ ID NO: 10893 - DNA, 2148 bp, Homo sapiens
  CDS (24)..(1211)
gctaatgttttggccgcttcaagatggcggtgcaggagtcggcggctcagttgtccatgaccctgaaggtccaggagtacccgaccctcaaggtgccctacgagacgctgaacaaacgctttcgcgccgctcagaagaacattgaccgggagaccagccacgtcaccatggtggtggccgagctggagaagacgttgagcggctgccccgccgtggactccgtggtcagcctgctggacggcgtggtggagaagctcagcgtcctcaagaggaaggcggtggaatccatccaggccgaggacgagagcgccaagctgtgcaagcgccggatcgagcacctcaaagagcatagcagcgaccagcccgcggcggccagcgtgtggaagaggaggcgcatggatcgcatgatggtggagcacctgctgcgttgcggctactacaacacggctgtcaagctggcgcgccagagcggcatcgaggacctagtgaatattgagatgttcctgacggccaaagaggtggaggagtccctggagaggcgtgagacggccacctgcctggcctggtgccatgacaacaagtcccggctccggaagatgaagagctgcctggagttcagcctcagaatccaggagttcattgaactcatccggcagaataagagactggacgctgtgagacatgcaagaaagcacttcagccaagcagaagggagccagctggacgaggtgcgccaggccatgggcatgctggccttcccgcccgacacgcacatctccccgtacaaggaccttctggaccctgcacggtggcggatgctgatccagcagttccggtacgacaactaccgactacaccagctgggaaacaattctgtgttcaccctcaccctgcaggctggcctctcagccatcaagacaccacagtgctacaaggaggacggcagctccaagagccctgactgccctgtgtgcagccgctccctgaacaagctggcgcagcccctgcccatggcccactgtgccaactcccgcctggtctgcaagatttctggcgacgtgatgaacgagaacaatccgcccatgatgctgcccaacggctacgtctacggctacaattctctgctttctatccgtcaagatgataaagtcgtgtgcccgagaaccaaagaagtcttccacttctcacaagccgagaaggtgtacatcatgtaggccccacgtcgtgaagcgcacgcctcggggacgggctgcagtgggcggggaggccacgccttcctcctgtcccacgctccagcctgccgcggcgtttctgtttcttgcgaccaaagatccgtgagcaacgataaatactcttaggaagagagaaaataaggtttcataagtttgtacttgaaaacatttggattggtaggattttgtaacacgtcaaccatttgatgcttctgaaaagtactttcaacttgcgaaggaaactcttctttaaagactgacctaaacaccgagggaaacttaagaacgtttaaaatataggagtccgtgatttccctgtgttttcagtttctttccttctgtgaacgatgagacttggagaacgggctggtccttcaccacttcctgttggccctggcctggccggggaaggtggcagcggcaccggactgacctgcagtgacccgcgatgccgcgccacgagggacacttatggcttcattcgagagctgctgccgaaacgcctggcgccgccaccgtcgggggctggcttcgaggacgcccgcctgcctcgcgggtcgtgtccgcgggactgtgttcgtacgtgcatagtttcgatatcacatcgcggggctgtgttcgtagctgcgtcgtttcgatatcacaccctctgtgtgccgccttacttcctgcttcgagaatgtataacgtggaaatccacgggaccaaatttctgcagaggccttgccggatggttccataactgtagagtctaattgctatccattacagaaattaatcgttcagttgaaagaagtactgatgacttttcaaaacaaatgaaccaccgtagctgacagagaaccgtatcgtagaggtttgtagttagtgcttatttttgcatgttgatgttgactagctaataaactgtaaatgt

SEQ ID NO: 10894 - protein, 396 aa, Homo sapiens [sequence omitted]

SEQ ID NO: 10895 - DNA, 2127 bp, Homo sapiens
  CDS (231)..(1751)
aaaatgctctggctccggtggtgacaggttgtccagcttcttacagccatcttcactgaaactaaggttaactcctcactctctatggacggctactctctatttccaagggcgtgaagaatttccctcttctcctgtgctttcatctaaaagttctccctggataattatcattgcagtggagtgcctggattggacatcctcatctgggtcaactaaaaaaagaaagcatgcaagacgacagcatagaagcttctacttccatatctcagcttctaagagagagctatttagctgaaaccagacatcggggaaacaatgagaggagtcgagcggagccctcctccaacccttgccatttcggcagtccttctggggccgctgaaggaggcggaggccaagatgaccttccagatctttcagcctttctgagccaagaagaattagacgaaagtgtcaatttggcaagactggccatcaattacgaccctttggagaaggcagatgaaactcaagctagaaaacgactttctcctgatcagatgaaacactcacctaatttaagttttgagcctaacttctgccaggataaccctcgaagtcccaccagctctaaagaaagcccccaggaggcaaaaaggccacagtattgttctgaaacccagtccaaaaaagtatttttaaataaggctgccgacttcattgaagagctatcctcccttttcaaatcccacagctccaaaaggattagacctcgtgcctgcaaaaaccacaagagtaaactggaatctcaaaacaaagttatgcaggaaaacagctccagtttctcagatctgtcagaaagacgagaaagatcttctgttcccatccctatccctgcggataccagggataatgaagtgaatcacgccctggaacagcaggaagccaagaggcgtgaagcggagcaggctgccagtgaggcggctggtggagacactacaccagggtcttccccttcatctctgtactatgaagaacctctggggcaacctccccggttcactcaaaagttacggagcagagaagttccagaaggaactcgagtacagttggattgcatagtggtaggaattccaccacctcaagtaaggtggtactgtgaaggcaaggagcttgaaaattccccagatattcacatcgtccaggcaggaaatctgcactcactgaccattgcggaagcctttgaagaggacacaggacgctattcctgctttgcttctaacatctatgggacagattcgacttctgctgagatttatatagaaggggtttcttcttctgactcagaaggcgaccctaacaaggaagagatgaatcgaatccagaagccaaatgaggtgtcatctcctcccactacctctgcagtcattcctccagcagtaccccaagcccagcatttggtggcccaacctcgtgtggcaaccatccagcagtgtcagagccccaccaattacttgcagggattggatggaaaacctatcattgcagctcctgtgtttacaaagatgctacaaaatttgtcagcttctgagggtcagctggttgtctttgaatgcagagtaaaaggagctccatctcctaaggttgagtggtatagagaagggactttaatagaagattctccagattttaggattttacagaaaaaacctcgatccatggcagagccaggtaaggatgatttcaactttaatttattagtatatgagtgattttatatatacaagaatacataatgaagttacactgagatgaataaaaagtgaaaaataaagttttaggaaaaaaagatccaaatgggccgggtgcagtggctcatgtctgtaattccagcactttgcgaggccgaggcgggcggattacttgagatcagaagttcaagaccagcctggccaacatgacaaaatgaaaccccatctctactaaaaatataaaaattagccaggcatagtggcgcacgtctgtaatcccagctacctgggaggctgaggcaggagaatcacttgagcctgggaggtggaggttgcagtgagccgagatcgtgacactacagtccagctgcgcaacaaaacaagaatctgtctc

SEQ ID NO: 10896 - protein, 507 aa, Homo sapiens
MQDDSIEASTSISQLLRESYLAETRHRGNNERSRAEPSSNPCHFGSPSGAAEGGGGQDDLPDLSAFLSQEELDESVNLARLAINYDPLEKADETQARKRLSPDQMKHSPNLSFEPNFCQDNPRSPTSSKESPQEAKRPQYCSETQSKKVFLNKAADFIEELSSLFKSHSSKRIRPRACKNHKSKLESQNKVMQENSSSFSDLSERRERSSVPIPIPADTRDNEVNHALEQQEAKRREAEQAASEAAGGDTTPGSSPSSLYYEEPLGQPPRFTQKLRSREVPEGTRVQLDCIVVGIPPPQVRWYCEGKELENSPDIHIVQAGNLHSLTIAEAFEEDTGRYSCFASNIYGTDSTSAEIYIEGVSSSDSEGDPNKEEMNRIQKPNEVSSPPTTSAVIPPAVPQAQHLVAQPRVATIQQCQSPTNYLQGLDGKPIIAAPVFTKMLQNLSASEGQLVVFECRVKGAPSPKVEWYREGTLIEDSPDFRILQKKPRSMAEPGKDDFNFNLLVYE

SEQ ID NO: 10897 - DNA, 2005 bp, Homo sapiens
tcaagatgagatttgtatggtgacaaagagccagaccatatcaagtacctaactcattactatcctataactatgagtattactggtattcttattggccacttgacaccaacacaagtggggggccttatatcacttaagaagaggaaatatatagaaaaaagtggcctggagagaaacttgctccctgaatttccaatatatgtccaaactgatgactggggtgagaaagatctattctggcttttgcatactgactcagataaaaaacaaagctcatattattacaaagtcaaaaacaaaagatactggtagggctgcagagaaaagggaatgcttatacactgttggtgggaatataaattagttcagccactatgaaaagcagtttggagatttctcaaaggacttaaaacggaatcgctgttcaacccagtaatctaattagtgggtatatatgcaaaagaaaacaaatcgttctaccaaatagacacatgcactcacatgtttactgcaacactattcacaacagcaaagagatggaatctacctaggtgcccatccatggtggattggataagtaaaatgtggtacatatatactatggaatattacacagccacaaaaaggaatgaagtcatgtcctttgtagcaacatgcatggtgctggaggtcactatcctaagtgaattaacacaagaacagaaaaccaagtatcacatgttctcacttgtaagtgggaggtaaacattgggtacacatggacctaaagatagtaatggtagacaccagggacaactagagggggcagtcagggaggggagcaaggaatgaaaatctaactattgggtattgtgctcagtatgtggatgacaggatcagtcacatccctaacctcatcatcattacaatatactcgggtaataaacctacacatgtaccccctgaatctaaaataaaagttaaagttattttttaaaaaaaaactaaaaatgtctggtacacctgagtaatcctcttggtgagagcttcagccagaaaccaggctccttcaatcctaagactgacccatggatatggatggggcactggggcattcctgttctgggagcaaaggaggtgttttttggtgaagatatttgtgaaactgaacccttctggtggagctgaagtctcagctcactgagaagtaagccatgcaagccagagggctcagaggtgggtagcccagacaagacaaggagctcttttccttgattgacacttatttcactccattggtttgtctccctcttacatagtgtcactgtcactagagttggggatggacaaaggattcctggttggtcttaaagccagcacagtgggaggtgggctgttggatggctaagacagattagagtaagagtgtctggtggatggtgatgatgagagatctcacctccaaagccaggtcctacctgcacagcatctttggtttgacatagctttgtcaagcagagcccgagaaataagaggctctcagtttccactagaccaggccaccctagtcattggcaagtcaaagctctggtcctgatgttcattcttcaactgaaggggcaagggaaatctgtttcctcctccagaagcttctgccatgggactgcgtaatacagaggtatctcctagtgtgggaaatggacagatggtggtgatgctttagtgcaccagctcactttccagttatgttctctttctctgggagagagagacagggagaaagagagagggagttgagggagaaaaaagaggtggatgacatgcagcatgagctgtgcactagttgtggagaatacgactgcctgttggtccacggcaaattctaaattaaaaaacaaactgggccgggtatggggacccacgcctgtaattccagcactttggggggctgaagtgggaggatcacttgaggccaggagtttgtgaccagtcttggcaacaaaatgagaccccatctctattt

SEQ ID NO: 10898 - DNA, 2027 bp, Homo sapiens
  CDS (34)..(1896)
aagtgcggacgcccggctcccggcgtggacgccatggtgctgtgcccggtgattgggaagctgctgcacaagcgcgtggtgctggccagcgcctccccacgccgtcaggagatcctcagcaacgcgggtctcaggtttgaggtggtcccctccaagtttaaagagaagctggacaaagcctccttcgctactccgtatgggtacgccatggagaccgccaagcagaaggccctggaggtggccaaccggctgtaccagaaagacctgcgggcccccgacgtggtcattggagcggacacgatcgtgacagtcggggggctgattctggagaagccggtggacaagcaggacgcctacaggatgctgtcccggttgagtgggagagaacacagcgtgttcacaggtgtcgcgatcgtccactgctccagcaaagaccatcagctggacaccagggtctcggaattctacggggaaacgaaggtgaagttctcggagctgtccgaggagctgctctgggaatacgtccacagcggggagcccatggacaaagctggcggctacgggatccaggccctgggcggcatgctggtggagtccgtacacggggactttctgaacgtggtgggattcccgctgaaccacttctgcaagcagctggtgaagctctactacccgccccgcccggaggacctgcggcggagtgtcaagcacgactccatcccggccgcggacaccttcgaagacctcagtgacgtggaggggggtggctcggagcccactcagagggacgcgggcagccgcgatgagaaggccgaggcgggagaggcgggacaggccacggcagaggctgagtgtcacaggactcgggagaccctgcctccgttcccgacacgcctcctggagctgattgagggctttatgctatccaagggcctgctcaccgcttgcaaactgaaggtgttcgatttgttaaaagatgaagcaccccagaaggctgcggatattgccagcaaagtggacgcctctgcgtgtggaatggagaggcttctggacatctgtgctgccatggggctcctggagaagacagagcaaggttacagtaacacagagacagcgaacgtctacctggcatcggatggcgaatactctctgcacggcttcatcatgcacaataatgacctcacatggaacctctttacatacctggagtttgccatccgagagggaacaaaccagcaccacagggcgttggggaagaaggcggaagatctgttccaggatgcgtactaccagagcccggagacgcggctgaggttcatgcgggccatgcacggcatgacgaagctgactgcgtgccaggtggccacggccttcaatctgtcccgcttctcctccgcctgcgacatgggaggctgcaccggtgcactggcccgagagctggcccatgagtaccctcgtatgcaggtgactgtgtttgacctcccagacattatcgagctggccgcccacttccaaccccccggaccgcaggcagtgcagatccacttcgcagcaggtgactttttcagggaccccctccccagcgctgagctgtacgtcctgtgccggatcctgcatgactggccagacgacaaagtccacaagttactcagcagggtcgccgagagctgcaagccaggggccggcctgctgctggtggagacgctcctggatgaggagaagagggtggcgcagcgcgccctgatgcagtcactgaacatgctggtgcagactgaaggcaaggagcggagcctgggcgagtatcagtgcttgctggagctgcacggcttccaccaggtgcaggtggtgcacttggggggtgtcctggatgccatcttggccaccaaagtggccccctgaagcccaggcagcatgttcattatagggatgtcctcccccaggctgcaggtggaccgcccggtccccaagtaccataggacagtcacataggagcgtgtagtcgtgactgaataaagaaagcaaaagcc

SEQ ID NO: 10899 - protein, 621 aa, Homo sapiens [sequence omitted]

SEQ ID NO: 10900 - DNA, 1737 bp, Homo sapiens
cagaattcaaaatatgaaaatttattttgcataggaaacaataatctctggtaaacatcattactgcatctaacaaaacaatgccttcaattaaagggggaaagtgagtttttaaacattaggggttaatttagaagaaaatacagtatataataatctcaacatcatgtttagggtaaaaatgctataatgtgaaaaaagtccctaagaactggacagaacctacctaacaacaccatttaccgtgtatgttttcaatagacaaaacatattttgtaccaaattccaacagtggtaattctatagttgtggccctttaaaaaatggcagcattgtacttgaatcagaaagcttactgggatttcctcatcgaaagtagagattgcagctaatcctagtaccttttgttagtaattacttaaggcacagtgcaaagttgaaggactgttttggtacaaactcaagccagctacatgtatgcttgccttggtatccttgctagagcacatgcaggtataataccgtattatatacaacaaggccaccctgttgtatctgtgttacaattaaacatcagtcccagaaagtgaaccctagtcatttattataggtgcccacctctgacttggaacaaaatgccactccattcatgttcatttttgtcctggagaggatttatttcctaaaagattctgaaagccaacaaatcaatgtagttcttcatagagaacttaagagtaaggctcaaaatggcctcaaaatgggcttcttggatgacttccaacagtgactggccttctcaacactgcagatgtctgagcactaccataacctaacgaagtgaggaaggaggaggcaaattggtatttttaaacaagaatttaagtggctctttctttcaagtctaaaaaaacctttggctttaaagattataaactgatttactaaatttataaaagaccttaatttagcaaagagcttctttttcctttggttcagttactcaaaatccactgtgtgaaggaataatgtatccatcattcagcctttatagcggtcttccggtagcgaagtactgtcactgttacccatatatttaaagccagcatgatcacaaaacgtagaagaattgtaaaatcattggtggtcattaaggttgtgattattcttgttgcacaggtataggaagagaggctccaagtcagcgcactcacagttcctgagtctctcgtcttccacagacactggagctgtgcaaacttactggccgcgctgatgaaagtacatagattcatggccaggtctatgatccacttctgcagggcaaggatgaaccaagaagacaccaatacagcgatgtaaggagtggcctgcttcacgttcccgttaaaatgaaagatacagagcaggaggatgacatcttgcgcgatgaggatggggtactccaggtaggtcagcggcggatacccatagtaacactggtaccgcagaaacaccaggaatcctgccagctccagaagtaaactcggaaggctgaggccccgcgcgctgcgcgccgctagcacagcggagatctgcggcagcttcagcgcggcgcacacgcccagcgtgctccagttacacagccccagcagcgccgcctccatagcgccacgggcgcgggcacctgggcggccgcagcgagaagggaccgctcagcctcggcggcgcagctctgccgaagccttccgccttccc

SEQ ID NO: 10901 - DNA, 1941 bp, Homo sapiens
acatattcatgaaaagattggaggagggaattaatttaatcttatttgggtttgggagagatgactggatttgagggtaggcaaatgggaggcagaggagctaaagaccagtggggtggcaagtgcaagctgaaccgagggtactgtggtgggagcagagagggctggataagaaagacatgacagggccgggcgcggtggctcacgcctgtaatcccagcacttggggaggccgagtggggtggatcacaaggtcaggagttcaagaccagcctggccaagatggtgaaaccccacctttttcaaatgatgtatctcaggggagaaaaaagagactccatgttttcaaagtttttgctttttattatttatttatttatttttgctttttaaaagcctctcaacaaactctccttattcccatgtgactgaggatgaaacagtctcagattaaacagacttctcaaggtcacgcattgtcagtgccaacattcaaaagaaggctaggtcaggttcttgaacatccttgtgaaattattcttcccttaagtctgggttaaattataaattatgatctgcatttaaattcccaaatttaaaacaaaccaaacaaaacaacgcacttcagactcttttggaaacctttgaaaggaacttgatttctgtgtgctttgaaagtatatattgcaatcaaggtattggtggtaagtgtgtttttgaggtttgtcacaaattaacaaaattatatgcctaaagagttttgcagagaaatgcaaatcattgtaagcgccttgtcataataagtagtgtgctttggttcctgtttatgtatccctaaaacacataatacactattacattgacacgaaggaaaccattctcattgatggtttctttatatctggcccccaaattagtttgtggtatcaatcagtataatttctagagagcctattaagcctatgtttgtacctgtctttcaggtataagccttgtcttctgcagatgattcttgagcacctactatatgccaggccccagggtttccatggccttaaggaattcccaggctggtgaaagtggaacaggcttttgcctaatgacaaacactatataagtgatgactttggagccttaagggagggcctactctagcagcacagtgaagagtgatgaagcttgcctgagggtgtggagctgggtcttgcaagataaataatagctcacaagccaggaagggggagaaggtattgcagcagagtgaagcacaggtgctgagacttggaagcagggacctatttgggaagagtgagtagctggaggctggaatgtcaatattgtgtgtttgcactgtgcgggggaagaaaggaggacattggagatgaggctggagagataggttagagctagattatgaaaggggactgggtatggcaggcagctaaggaatttgagttttattttggtgaacgaggagagcaaatgaagttttctttttgtttttctttttatttttatcttggaagatttcatagagaaacctactacctaggagtgaaattgctgggtcctatggtaactccacatttacctttttgaggaactgccaaactgtttttcatagtggctgcaccattttagaaatatctaaaggcggctgggtgcagtggctcacacctgtaatcccagcactttgggaggctgaggcgggcagatcacctgaggtcaggagttcgagaccaacctggccaacatggtgaaaccctgtctctaataaaaatacaaaaattagccgggtgcggttgcgggtgcctgtaatcccagctactcgggaggctgaggcaggagaatcgcttgagcctgggaggcagaggttgcagtgagccgagactgtgccactgcactccagtctgggcaacagagggagactctgtatcattt

SEQ ID NO: 10902 - DNA, 1451 bp, Homo sapiens
  CDS (72)..(1046)
tgtcgacgccgctgccaccgcctgcctgagagaagtcgtcgcggccgaccccgtcgcctccgccggctaccatgtccgcccaggcgcagatgcgggccctgctggaccagctcatgggcacggctcgggacggagacgaaaccagacaaagggtcaagtttacagatgaccgtgtctgcaagagtcaccttctggactgctgcccccatgacatcctggctgggacgcgcatggatttaggagaatgtaccaaaatccacgacttggccctccgagcagattatgagattgcaagtaaagaaagagacctgttttttgaattagatgcaatggatcacttggagtcctttattgctgaatgtgatcggagaactgagctcgccaagaagcggctggcagaaacacaggaggaaatcagtgcggaagtttctgcaaaggcagaaaaagtacatgagttaaatgaagaaataggaaaactccttgctaaagccgaacagctaggggctgaaggtaatgtggatgaatcccagaagattcttatggaagtggaaaaagttcgtgcgaagaaaaaagaagctgaggaagaatacagaaattccatgcctgcatccagttttcagcagcaaaagctgcgtgtctgcgaggtctgttcagcctaccttggtctccatgacaatgaccgtcgcctggcagaccacttcggtggcaagttacacttggggttcattcagatccgagagaagcttgatcagttgaggaaaactgtcgctgaaaagcaggagaagagaaatcaggatcgcttgaggaggagagaggagagggaacgggaggagcgtctgagcaggaggtcgggatcaagaaccagagatcgcaggaggtcacgctcccgggatcggcgtcggaggcggtcaagatctacctcccgagagcgacggaaattgtcccggtcccggtcccgagatagacatcggcgccaccgcagccgttcccggagccacagccggggacatcgtcgggcttcccgggaccgaagtgcgaaatacaagtaactactctgactccttcggtagctgcaaccaggggttctccagagagcgggcatccagagaggagtcctgggagagcgggcggagcgagcgagggcccccggactggaggcttgagagctccaacgggaagatggcttcacggaggtcagaagagaaggaggccggcgagatctgaacccgtctcccgggtgctgtaaatagtctgataaacgttcacacagtctaaaattaccctttatatttgctgaatacaactcatcttttgtagtttaaaatttctattgttttggagctagctgtgagtttctagaagtgtacagagttgctcctgtgttcccgggtcatgttgagtaggaataaataaatctgatgctgcctcctgaggctgcggggggtttctgc

SEQ ID NO: 10903 - protein, 325 aa, Homo sapiens
MSAQAQMRALLDQLMGTARDGDETRQRVKFTDDRVCKSHLLDCCPHDILAGTRMDLGECTKIHDLALRADYEIASKERDLFFELDAMDHLESFIAECDRRTELAKKRLAETQEEISAEVSAKAEKVHELNEEIGKLLAKAEQLGAEGNVDESQKILMEVEKVRAKKKEAEEEYRNSMPASSFQQQKLRVCEVCSAYLGLHDNDRRLADHFGGKLHLGFIQIREKLDQLRKTVAEKQEKRNQDRLRRREEREREERLSRRSGSRTRDRRRSRSRDRRRRRSRSTSRERRKLSRSRSRDRHRRHRSRSRSHSRGHRRASRDRSAKYK

SEQ ID NO: 10904 - DNA, 1654 bp, Homo sapiens
  CDS (128)..(583)
tttttttttttttttttttcggagatggggttttgctatgttgcccaggctggtcttgaactcccgggctcaagcagtcctccagtcccagtctcttgagtagctgagattacaggtacgcaccaccatgcccagcttgtgtggggtttcccttgaagatcagtctcaaggttgctgcttgaccggtgagcagcaggattcagacctagatgtgtctgactctgggatcctttcacctaaccctgacgctttcccagcaagcctggatgacctggcttccctccaccctgtgcccatgccctgccccttttccatcttggagtttctgaagccccagtgggctgtccactctgtgcttctttgggtcacttatgatgccagcctccctcccggcccacccgccaatcccaggccactgctaataggggtgtctttggcaggggaacaaagagcgttttggggctgccaggtggctgctctgagtgctccagtgttggccagagtggcttggcttccagaaacttcttgctgcctccttgcaggaggaggtcctggccatgctaggactgtgagctgctccccctgaacccctggcaggagccagacgctgctgtgctgccacgctggctcttcagcccctggacggacgccttggctggtccccagggcaggctcctcccaggcggctgtattctcttctcttcggggaagcacaaggcagatgttgtcgatttaaattgtttccttattagactctcgctctctggcctgggctgggtttcatcagccgggaactctgattgcatcactttgccgctcactcctccaggaaccaggccaagggctgggagagcaggcagggtgggagtgagcgtggctgagggaggggcagacggatggcaggcaagggacttaagtgatggacttaagtgatggggccctgttctgggggaccagcactgtcaggaacccaggagcacagctggaacctggagttccacacgcctgtcagagcgctactgtctcttagctgggtgcccagctccctgcatcagaatcacctgagagctcgtttaaaatgcccttttaagacctgcagcagtgactctcaaccagggttgatttggcgatctctggagacattttcggttgtcacacctggggctgtgctactggcagggtgctgctgaacatcccacagtgcgcaggacagcccctcacaaaaagaaaccctgtcctgcggagtctgtggttctggaagggctcactgggaatcttcgtttgtcatgagccagtggaatgttttttggtttttggtttttttttttttttttttttttgagacagtcttgctctgtcacccaggctggagtgcgatggcgcgatcttggctcactgcaacctccgcctcccgggttcaagagattctcctgcctcagcctcacaagtagctgggattacaggtgcccgccaccacatctggctaatttttgtatttttagtagaggtggggtttcatgtttcaccgtgttgtccaggctggtcccgaactcctgacctcaggtgatccacccgcctcagcctcccagctacttaggaggctgaggcaggaggatcatttgagcccaggaaacatagtgagaccccttacctc

SEQ ID NO: 10905 - protein, 152 aa, Homo sapiens
MPSLCGVSLEDQSQGCCLTGEQQDSDLDVSDSGILSPNPDAFPASLDDLASLHPVPMPCPFSILEFLKPQWAVHSVLLWVTYDASLPPGPPANPRPLLIGVSLAGEQRAFWGCQVAALSAPVLARVAWLPETSCCLLAGGGPGHARTVSCSP

SEQ ID NO: 10906 - DNA, 2064 bp, Homo sapiens
  CDS (1)..(1962)
atggagcgctctgggcccagcgaagtgacaggctcagacgcgtcgggaccggacccgcagcttgcggtcaccatgggcttcacggggttcggtaaaaaagctcgcacatttgacttggaagcaatgtttgaacaaactcgaaggacagctgtggaaagaagtcgcaaaacactggaagcaagagaaaaagaggaagaaatgaacagagagaaagaattaagaagacaaaatgaagatattgagccaacatcctcaagatcaaatgtggtcagagattgctccaaatcatcttccagggatacgagcagcagtgaaagtgaacagagttctgactcttctgatgatgagttaattggccctcctttaccccctaaaatggtaggaaaaccagttaattttatggaggaagatatcctcggtcctttacctccacctcttaatgaagaagaagaagaagcagaggaagaagaagaggaagaggaggaagaggaaaatcctgttcacaagattcctgactcgcatgagataacgctgaagcatggcactaaaacagtgtctgctttgggtctggatccctcaggtgcccgtttggtgacaggaggatatgactatgatgttaagttttgggattttgctggaatggatgcttcttttaaggcatttcgatcccttcagccctgtgagtgccatcagatcaagtcattacagtatagtaacacaggagacatgattcttgttgtatctggaagctctcaggccaaggtgattgacagagatggttttgaagtaatggaatgtataaaaggagaccagtatattgtggacatggccaacaccaagggtcatacagcaatgcttcatactggctcatggcatcccaaaataaagggagaatttatgacttgctcaaatgatgcgactgtgaggacgtgggaagttgaaaatccaaagaagcaaaaaagtgtgtttaaaccacggacgatgcaaggcaaaaaagtcattcccactacgtgcacatatagtagagatggaaacctcatagcagctgcctgccagaatggaagcatacagatctgggaccgaaatttgactgttcatcctaagttccactataaacaggctcatgactcgggcacagacacttcttgcgtgactttttcctatgatggtaatgtccttgcctctcgtggaggtgacgattcattaaaattatgggacatccgacaatttaataaaccacttttttcagcctcgggtcttcccaccatgttcccaatgactgactgctgtttcagtccagatgataagctcatagtcactggtacatctattcaaagaggatgtggcagcggcaaacttgttttctttgagcgtaggactttccaaagggtgtatgaaatagacatcacagatgcgagtgttgttcgctgcctgtggcatccaaagctgaaccagatcatggttggaactggaaatggattggctaaagtctattacgaccccaacaagagtcagaggggagcaaaattatgtgtggttaaaacccagcggaaggcaaaacaagctgagactctaactcaggactacatcatcacccctcatgccttgcctatgttccgtgagccccgccaacggagtacaaggaaacagctggagaaggacagactggatcccctgaagtcgcataaacctgaacctcctgtagcaggcccaggtcgtggtggccgagttggaacccacgggggcactctctcttcctatattgtgaagaacattgctttggacaagaccgatgacagtaatcctcgggaagccattttgcgtcatgccaaagcagcagaagacagcccatattgggtttctccagcatattccaagactcagcccaaaaccatgtttgcccaagttgaatctgatgatgaggaagcaaagaatgagccagaatggaaaaaacgtaaaatttgaagaatctcatttgagagctgtttgcatgagtgggaggggtatgggacaggtttgggttttttttttttatgctcatgaaattaaaaattcatttttatg

SEQ ID NO: 10907 - protein, 654 aa, Homo sapiens
MERSGPSEVTGSDASGPDPQLAVTMGFTGFGKKARTFDLEAMFEQTRRTAVERSRKTLEAREKEEEMNREKELRRQNEDIEPTSSRSNVVRDCSKSSSRDTSSSESEQSSDSSDDELIGPPLPPKMVGKPVNFMEEDILGPLPPPLNEEEEEAEEEEEEEEEEENPVHKIPDSHEITLKHGTKTVSALGLDPSGARLVTGGYDYDVKFWDFAGMDASFKAFRSLQPCECHQIKSLQYSNTGDMILVVSGSSQAKVIDRDGFEVMECIKGDQYIVDMANTKGHTAMLHTGSWHPKIKGEFMTCSNDATVRTWEVENPKKQKSVFKPRTMQGKKVIPTTCTYSRDGNLIAAACQNGSIQIWDRNLTVHPKFHYKQAHDSGTDTSCVTFSYDGNVLASRGGDDSLKLWDIRQFNKPLFSASGLPTMFPMTDCCFSPDDKLIVTGTSIQRGCGSGKLVFFERRTFQRVYEIDITDASVVRCLWHPKLNQIMVGTGNGLAKVYYDPNKSQRGAKLCVVKTQRKAKQAETLTQDYIITPHALPMFREPRQRSTRKQLEKDRLDPLKSHKPEPPVAGPGRGGRVGTHGGTLSSYIVKNIALDKTDDSNPREAILRHAKAAEDSPYWVSPAYSKTQPKTMFAQVESDDEEAKNEPEWKKRKI

SEQ ID NO: 10908 - DNA, 1658 bp, Homo sapiens
agtcagatggtaagcaaagatgcaaataaaaatatcagcttctgataagtgcagtggagaaaaataaacaagaaaaaaaatgctactgtgttcatttcttagtatgtgccaaaaaatgatctcattgaatccccaagataatcctaggaattatgtcctattcctatcatccccatttacagatgaagaaagtgaggcacagagaggctagggtggttgctgaaggtcacacagccaggaagttacagagtcagggctggaactcaggacagcctgaaaccacagccctcgttcatattcagtaaaacccggcagtgaacccccagcagtgttcacatccctggcacatactgggcacatatcaatttggaacccagtggaatgactgaattgtgtctctgcccacaatacgagtgccataattttcctcatgcgaaatggcaggtgtgttaacctcttgcaacatcatcagggctggaggaggacttcagactgagctgggacatggggagagcctctgtccccaggttgttttctgctgggcaactcccctccagagttcagttctgctggcacatgcctaagtgattagctggctctgagcctgagcatggcatagctcaccagggtgggctctcacagctcccaggaaccagcaaatagccggtggaggaaagcactgattccctattcgcctttttctgccattatcagcaccagtggctttccaaagatgagttgatataagcatcctgtcagaaaggatacagcctaataaatggaatgtcccttcccctctctaggcctcagtttgcctatctgtcaaatgaggagagtggattaaagtgcacttttcaaactgtctttcctggctctacagagctttcttaggggctgctgaagatgatggggagctgatgattagaagagagtggctgtggccaaatattggaaactcaatagtgtctctgaggatacttaggctttgaggggggatcccagtgcctaaagggacctggctgataatacgaaagaattcagcctctgggtagggactggagcaaactgagcccacgtttcatccaagggggcggccacttctcagctccagtcccctggggccacttgtggccagatcctctgagtttttggtaaaacttgaacatatggatttttatgttaaatgttccaattttaaaaagtcggtcatgaactcaaaatcttctaaaacagtgtgaggcagacaaagcatatctgtgggttacatttggccctaggccagcaatttggaactctgttctagaaggctggggatgaactttattctctccgtccttccaatttaatgagcattaggattgtggtgagatgattggaagaagtgttggtggctgggcgcagtggctcacgcactttcggaggccgaggtgggtggatcatttgaggccaggagttcgagaccagcctggacaatatagtgaaacaccatctgtactaaaaatacaaaaagtagctgggcgtgctggtgggtgcctgtaatcccagctactccagaagctgaggcatgagaatcgcttaagcccaggaggcggaggttgcagtgagctgagaccgtgccactgcactccagcctgggcgacagaatgagactccgtctc

SEQ ID NO: 10909 - DNA, 2530 bp, Homo sapiens
ttttttttttttttttttgagatgggggttcccactctgttgccctggctggagtgcagtggcgctgatcacggctcactgcagcctcgtctgcccaagctctagagattctcctacctcagtctcctgagtagctgggaccacaggcatgcaccaccatgtccagctaattggttaactttttctttgcagaaatggggtcttactgtgttgcctaagctgatctcaaactcctaacctcaagtgatcctcccaccttggccctgcaaaattctgggattacaaacatgagccattgtgcccagctgagggctggtttctagaaatggtggtatgccaggcttcatactggggtcatgcatgtggactgggctcattggcctgattgctctagcaatatgtggggtagggagaatcatgccccctctctcctcctcttcgaaaaatgtccacatcccaatccctggaagctgtgaatatgttcagttatatggcagttgggaattaaggttgcgagtcagctgtccttgagatggggagattatcctggactatccaggtgggacttttgtaatcgcaaaggtcctcggaagtgaagaaggaagtcaggagagtcagtgtcagagtgatgccgtgggacacagtcttcagggctgttgctgccttgaagatgcaggaaggggccgtgagccaaggaatgcaggtggcctctagaagctggaaaaggcaagaaaatggattctccttgagagcctccagcagaaatgaggccctgccaacaccttgacttgtagcccagtgagacccaaacatctaacatctaaaactataaataagaatttgtgttgttttaagtcaccacgtacatagtcatttgttacagcaagctatagcaaacaatccaaatggagacctgtctctggtttggaaatgcgagacattcttatttatttgtggaatataatataatggaaaatttatggaatataagtaactccaagaagattcttgtcaacattaattctgagatttttctaagctaatttattttactacagtaaggccaggaactttattgctttgctgttgtctcctcactgcctcgatcagtgcctaattcattcctttttgaatgaatgaatcttttctaaccaaactcatgaaaaaccctaagaaacaccccccactttttttgagacagaatctcattttgtcacccaggctggagtgcagtggatcacagctcactgcagcctcaacctcccaagttcaagtgatcctccccacttggcttcccaagtagctgggaccacaggtgcacaccaccacgtctggctaattttttaatttttttttgtagaaatcaggtcttgctatgttgcctagactggtctcaaactcctgggctcaagtgaacctcccgccttggccttccaaaatgctctcattacaggtgtgatccactgtgcttggccccaccttttcaaaaaagaatttatgctaaattgtaaatgttaaattgaggctcttgttatagacaaggcatatcatacttcgcattatcattcaaagatgagaggcttaattagagaattttctacagttgggttttaacaagagccattcttaacttccttggggtctaagaacttcttggtacctacacatggttgaaatgttaaccctgtactttgctgcttagcaagactgctgtaatgctgatatggtttggctctgtgcccccacccaaatctcatctcgaaattgtaatccccacacatcgagggagggacctgatgggagatgattggatcatggaggcggtttcccccatgctgttctcgtgatagtgagttctcgcgatagtgagttctcgcaagatctgatggtttaaaagtgtttggcagttcccccctagctctctctctctctctctctctctcccccctaatgccatgtaaggcgtgccttgcttcccctttgccttccgccatgattttaagtttcctggggcctcccacactatgcagaactgtgagtcaattaaccctcttttctgtataaagaactacctgagactgggtaattcataaagaaaataggcttaattggctgatggatcttcaggtcatataggaagcatggttgcagaggcctcaggaaacttacaatcatggcagaaggtgaatgggaagcagacacagcctgcatggctgaagcaggaggaagagagagaagggggaggtgctacacacttttaaacaaccagatctcatgagaactcaccatcacaagaacagcaagggggaagtttgcccccacgatccaatcacttcccaccaggcctgtcctccaacattgggggttataattcaacatgagattggggcaagaacacaaatccaaaccatatcaggctgggcacagggactcatgcctgtaatcctggcactttgggaggccaaagcggaggattgtttgagtccaggagtttgagaccagcttggtcaacatagcgagaacgactcag

SEQ ID NO: 10910 - DNA, 1864 bp, Homo sapiens
  CDS (706)..(1023)
gcaataaggtaacaggtgtgcccacctctcagggctgctatgaggacaactgaggccacacacctggctctcaataagtgagtggtgctctgtgagcttctggcgagtaaggggcaccctactcattgcggccgggggcctcccccagcaaacgggtggaaagaggcctgagccccatccccagtttctgcccctgctatctccacccaggatccaccagaagatatgaagcaggaccgggacattcaggcagtggcgacctccctcctgccactgacagaagccaacctacgcatgtttcaacgtgcccaggacgaccttatccctgctgtggaccggcagtttgcctgctcctcctgcgaccacgtctggtggcgccgcgtgccccagcggaaggagatgtgaccgactgcagaggccgcgccgcctcccccgtccgaggtctgcgcgctccgccgcagggtgcagacccggggcgcccgcctgggtttggggcgcaagagcagaggcggagccagggcggagccagcgcgccgggtcccccctgaatcgaaagcgaaacaggggccggggaggaagggcggagccggccccgaggcaccgccccctgccctgcgcggctgctggaccgacgggcgcacccaggtaggggggcggctgagccgcgcagtgcggaccctcgcggggaactgcgccgccgccaccatgtctcaggaaggtgtggagctggagaagagcgtccggcgcctccgggagaagtttcatgggaaggtatcctccaagaaggcgggggctctgatgaggaaattcggcagcgaccacacgggagtggggcgctccatcgtgtacggggtaaagcaaaaagatggccaagaactaagtaacgatctggatgcccaggtaacctatcccctcccctcgcaaaggaccgggtcacgggagggagagcaagaggggggacccgacccgttcatggtgactgacccccctctgaaacaggagggaccaggcattgtcggtccataactcatcacccaatctcactttttcacctctccatcatttgtccggccagggagcctgcgaacagtaggcgctcattatgtgctgattgtattcaatgggggagagagccatgaaactaagcaatgaaaggagccaggattattgccatcatagcgggggcgcagaggtcagagaaggcttactggaggaggaggtaccaagtcttaaaggatggggaggagtgagccctgggaggggaaagggaaagaaaggcaggggtcttggggtgggggagggaatggcataagcaaaggctgggaggtggggaagggttgttagtggcagtctctagaaaggctgggatgagcagaggattggggaggagagagaggcaggggaatggaacccttgtgttgaatgaatgaatgaatgaatgaatgaatgaatgaatgaatgaatggctttgaagcacaggtgcatcatggctactttgcttctttgacagctttggtgatgggaacgctgtggatttagcctgcctgaaaggcttagtgtagggctgttaaagagtataataggccaggcgcggtggctcacgcctgcaatcccaacattttgggaggccgaggcgggcggatcacctgaggtcgggagtttgagaccagcctgaccaacatggagaaacccgtctctactaaaaaatacaaaattagctgggcatggtggcgcatgcctgtaatcccagctactcgggaggctgaggcaggagaatcacttgaacccaggaggcggaggttgcagtgagctgagatcacaccattgcactccagcctgggcaacaagagcgaaactctgtctc

SEQ ID NO: 10911 - protein, 106 aa, Homo sapiens
MSQEGVELEKSVRRLREKFHGKVSSKKAGALMRKFGSDHTGVGRSIVYGVKQKDGQELSNDLDAQVTYPLPSQRTGSREGEQEGGPDPFMVTDPPLKQEGPGIVGP

SEQ ID NO: 10912 - DNA, 2372 bp, Homo sapiens
tttaaagatgtggctaactagctagtgatgcatgaacaattgttttagaaacctaccattgtggtcctgttggtatctaggaagttttttcatttgttggtggcaactgagtgatctgttatgtctacttttcctctctccctgtcccctcccccatcttcttctctctcttttctttctccctttttttcagtcaaggtagacttgagataggggacttgcatggctatagtagatcataatacatgaggccccccaaataagagagtgaaacattgtctgggatgtattttctgctcgaactcatcgtcatttttctgtgtatttcttacattagcccccagaaaagcatttttcaaagactttgagaaccaaaggttctctctgtaaggaaatgtgttaacctgatttccttgttctcatgtaattttctctcttaaagccataataatagtgtcagaggcagctttctagttagtgtgagtaatgtggttactgtattttctatttttattttaatgtgcttttcctgctgtggattttttttttctttcttgattttaaaaacagcagttgagtaaatgtggttatttgaagactggcgtatattgcatcttctctgagatgcaattttgaaggaaggctctgtgcacaataggcattttttttcagattccttagtaggataaataggagaatgtttggaacacagatcagtgacaatattggtttatggtcatggtaggtcaggcttcctcagagaaactgacaatagagtatcccataggttttgtctctagagagtctgttaatatgaagtctgtttattttatgatgtgttgataagaaaattaggtaaccagggaagcaccttaaattgctgcattcatttgcctctttttaagcatgcacacacattgagaaattttgaattaacaacaacaaaatacacttaaattcccctggaaagagtaattaagagctacttgtctctgtgctgtcatctctgccagaattagagttcctgctgagtatattccattgagtcagccatcattccatcaccagcagggattgcttttctgcttttccacgtattgacatgtgagggaatgtctgtcttgcagtagccatgggcttgtgccagattttgagatccatagaggcagttctgggagcttttcaattctgaatcagggttccaattcataatagctgagccagggaaaccgggttgaatctgtggccaaaaccgtggtaaaaaactttttccccctttcctttcttgcagtgctttattgctttaaaatatgagtgcctctgtccattgattctctggtgactttccgttggattcaaattgtggtctcttaggtgaaaaggtcagtgtgttattcattcagccacacatcgatggagattaactgagagcagtacaagacatttggatcctgccagacctagggcacctgaaggaagtttatttcttttctctctagcctttactatgcctgctgcagaagaggatggccctgtcttctgggagtaggggagggttttgattggctgtatgttaactgcctcaaatccatggccatagggcgagtaagaaccctggagaatcaaacatgtcatctttgtagcatcacctgatttagtgcttttcctcaggtctgagatgtctcagggggcctttttcccttgcagcactgatctttcaatgaggtgctagtgtctgtcctgagcaataacaaggagaaaccatgaagtgtgaacagctcttattaggggggtaaatgtcattagcgcctttgtagccttctctgcaatctgaatgctcctgtcaaaagagcgacttactgaagcctcctttaaaatcacataaatggaatttaagatgctgaagttttacattttaattaagcaaggccattaactccctttacatatacacttttttgtagccagttatgcttgtatgccttataaggctattgaaaaattatccacgaaaattattttaaggatttgagaaatagttggttaactttaagtcaaagttttagatatagagaccctatactcatgtgcccaaccattgtaatatgcgtattgacgtatatgataggagaaaacactagcattttgagttaataagtaggtcagtttggattaatggaaagtttgaagcttagagtgtttaaataatgattttattcttttcaatacacaagtggaaatgtttctccagtctaaattccccctagtattctcctgaaacaaaatttttatatgcagatatttgcttcttttgcaagtttgagaatttcacagtaacttctggttaccctgggttgtgtcttgcagttacc

SEQ ID NO: 10913 - DNA, 2132 bp, Homo sapiens
catgtctggagaccattttcaacctgaatttatctctgatgccagtccccaagatgagccattggttgcttattctttggggtcacccaagatggcagcactgaaggccacatggctggggttttctataccttgggattacatgttatacaaaacagctgactgacaatgcagaatgagggaagggacacctccaaattccttcagcctcccaaagtgctgggattacaggcatgacccaccgctcccggccttgttttccgtttaaagtcgtcttcttttaatgtaatcattttgaacatgtgtgaaagttgatcatacgaattggatcaatcttgaaatactcaaccaaaagacagtcgagaagccagggggagaaagaactcagggcacaaaatattggtccgagaatggaattctctgtaagcctagttgctgaaatttcctgctgtaaccagaagccagttttatctaacggctactgaaacacccactgtgttttgctcactccctcactcaccgatcaaaacctgctacctccccaagactttactagtgccgataaactttctcaaagagcaaccagtatcacttccctgtttataaaacctctaaccatctctttgttctttgaacatgctgaaaaccacctggtctgcatgtatgcccgaatttgtaattcttttctctcaaatgaaaatttaattttagggattcatttctatattttcacatatgtagtattattatttccttatatgtgtaaggtgaatttatggtatttgagtgtgcaagaaaatatatttttaaagctttcatttttcccccagtgaatgatttagaattttttatgtaaatatacagaatgttttttcttacttttataaggaagcagctgtctaaaatgcagtggggtttgttttgcaatgttttaaacagagttttagtattgctattaaaagaagttactttgcttttaaagaaacttggctgcttaaaataagcaaaaattggatgcgtaaagtaatatttacagatatggggagatgtaataaaacaatattaacttggtttcttgtttttgctgtatttagagattaaataattctaagatgatcactttgcaaaattatgcttatggctggcatggaaatagaaatactcaattatgtctttgttgtattaatggggaatattttggacaatgtttcattatcaaattgtcgacatcattaatatatattgtaatgttgggaagagatcactattttgaagcacagctttacagatgagtatctatgatacatatgtataataaattttgatcgggtattaaaagtattagaaggtggttataattgcagagtattccatgaatagtacactgacacaggggttttactttgaggaccagtgtagtcaagggaaaacatgagttaaaaagaaaagcaggcaatattgcagtcttgattctgccacttacaggatagataatgcctgaactttaatgacaagatgatccaaccataaaggtgctctgtgcttcacagtgaatcttttccccatgcaggagtgtgctcccctacaaacgttaagactgatcatttcaaaaatctattagctatatcaaaagccttacattttaatataggttgaaccaaaatttcaattccagtaacttctattgtaaccattatttttgtgtatgtcttcaagaatgttcattggatttttgtttgtaatagtaaaataccggatacatttcacgtgtccttcagtattgatttggttgaatattgggtcataatggttgagaagcatggacactagagccagaatgcttggatatgaatcctggatctgtcacttacttctgtgtgacctttgaaaggctacttatttcctctcttagctttctcattaaaatcaatgaacaatgccagcctcatggggttgttgaatgattaaattagttaatatacctaaagtacatagaacactgcctgcacatagtaaaagaattataagtgtgaggtagttggtaaaattatgtagttggatatactaccgaacaatatctaatctctttttagggaaataaagtttgtgcatatatataatcccgaaacatg

SEQ ID NO: 10914 - DNA, 1622 bp, Homo sapiens
aacaataaatgatgacagtgatgatgatatgatccatgtgatttcttggtcatggctttatgtcaagatttcctttagaaagtgaaataagtttaggtaacacacagaacaaacacagcaagaattgatgacttagacaataccgatttctttttttattgttattatactttaagttctggggtacatgtgcagaccttgcagatttgttacacaggtatacacgtgccatggtggtttgctgcccccatgaacctgttatctacattaggtatttctcctaatgctatccctcctctagccgtgcaacctccaacaggccccagtatgtgatgttcccctccctgtgtccatgtgttctcattgttcaactcccacttacaagtgagaacatgcagtgtttggtttaggtttcctgtgttagtttgctgagaatgatggcttcaaaaaaaaaggttaggtttcttttgttttgttttgtttgagacggaattttgctcttgttgcccaggctggagtgcaacagtgtgatcttggctcactgcaacctccacctcccaggttcaagcgattctcctgcctcagcctcctgagtagctgggattacagtcatgtgccaccacgcccagctaattttgtatttttagtagagtcggggtttctccatgttggacaggctggtcctgaactcccaacctcaggtgatctgcccgcctcggcctcccaaagtgcaaaaggttagttctatacataaaatacattttcttacttagtaatgttcctaatttaaagaatacttgtagaggattaccatagacttgtgtattaattttctagggttgccataataaattatcacaaaccaaatagtattcaatactggaaaaatgttctctcacaattctggaggttacatgtccaaaatcaaggtgttggcagggccatgttccccctgaaggttctagggtaggatcctcccttgcatcttcccagactcctgcagttgtcaacactccgtggtgttccttgacttgctgcctcactctaatttctgcctccatctccccatggctgtgttccttctgtgtgtgacggtctctatggtttttctttaaggatactagtgattggatttagggccaccctaatctgtataacttacatcttaattacatctgcaaagactctttttcttaagagggccacattcacaggttactggaggtaggacttcgacacaccgttttggggaacacaattcaatccgttataacgtgtatctatttttaattgaatttttgcatgattacagaataaccgtttataaagttttgaaaacccagaagcaaaaagaagaaaataaagcatccctgttaatcttaccaaatggatacttattctagtttttacattttccctatgcatatacgtagaggaacacacatacatagttgagtttctttttcttttaattagtcttttgtgggggacatgttgttgtactatggatatataggggtgactgaaaacatggcccccaccatcagagaataagaatgaaagagagagagagaatcctaatcacacaaataaacacataattccactggacaactgctatt

SEQ ID NO: 10915 - DNA, 1712 bp, Homo sapiens
agctttgatgaagagtgaatactgatggagaaatatgataggacaaaaagggtgtgatctagtgtagataaactggggaatttagcaaggcctgtttgttcaggttcctctctgtgacccttcatcttcagagatgagcatgttcctttcttccagggatcgggaggccctcacatgagtgtcttctgacctgcttcttgggaatgttggaaaagctttcctaagctgtatgccctgcatcggggagaagcatatgtgtgggtgaggaggggaggtcagagagactttcctgcttctgtttttttaatatgccaaggtgccgtattttgagtagtgtgtcctgaatcccatcatccttttcaatgtaacttttcattaaatgcagtgttctaggataagggttagcaaatgacttctaaaaaaacaccagatagtaaccatctttgtctttgcagcccataaagtatctgttgcaactactcaactctgttgctgcagcacaaaagcaatagtagaaaatacatagaccaagaagagtggctatgttccaataaaacattttttgtagatagtaaaatttcaatttcctgtaatttttacattataatattttacttattttttttccaaccattgaaaatgaaagaaccattcttagcttactggttctacaaaaacagatggcaacctggatttggcctgctgctgtagtttgtcaacccctcttctatgacattacattcacacagacaaaactaaacccaaacaaaacaataaaaatgcattcttctgacaatacaaagacatatcttaaaatatttaaagtcaaacaaaaatggacagtttctgacatagcttatagaacattgtttgtcaaactgcagggatttgaaataatgaatagtaaacaatagtgaaaaaaaaacttcaaataaatcacagctaatttttgaaaatccagtgttaaaatgtgatgatcagagtcaagaaaaattgtgaaagatttgaaaattggcaaaagtaaagattatttttctctgtattgcacttctccaagttctgtccagtgttcagtgctttgaactattttcccactctgcaaatggtagaaaattgataatgaaaataactcttgtccatgaaaatgcaaatacattttgtctagtggaatgcacttgatgcttcatccaggaatacaacattttgcatatatttgtaaatccatttcagcaccagcattccttattgaccctattcatccatccatccatccgtccatccatccatccatccatccatccatcttaatctgtctatcatttatctgtctattgtctatttatctatgggatttttcctttgaatcaaatgtaacatatgactatttcttgagttaaataaaatctttggtacatttccatctgatatttgcatgagtcttgtcttcactttataaaatatttctccactttgggagtccaaggcaggtggatcacgaggtcaagagttcaagaccagcctggccaacatggtgaaaccccgtctctactaaaaatacaaaaattagccgggtgtggtggtgcacgcctgtaatcccagctactcaggaggctgaggtaggagaatcacttgaacccaggaggtggaggttacagtgagctgagatcgctccactgcactccagcctgggcaacagattgagactctgtctc

SEQ ID NO: 10916 - DNA, 1692 bp, Homo sapiens
  CDS (7)..(777)
agcaagatggcggctccctgggcgtccctgcgcctggtcgcccccatgtggaatgggcgtatcaggggcatccatcgcctgggtgcggcagtggccccagagggcagtcagaagaagaaaaggacaatactccagttcctgaccaactatttctacgatgtggaggctctgagggattacttgctccaaagggagatgtacaaggtgcatgagaaaaatcgatcttacacctggctggagaagcaacatggtccatacggcgcaggtgcctttttcatcctgaagcagggaggcgcagtcaagtttcgagacaaggagtggatcaggccagataagtatggccatttctctcaggagttctggaatttctgtgaagtgcctgtcgaagctgtggatgccggtgactgtgacatcaactacgagggcctggataacctcctccgcctgaaggagctccagtccttgtcgctgcagcgctgctcccacgtggacgactggtgtctcagccgcctctacccactggccgactcgttgcaggagctctcgctggccggttgcccccgcatctccgaacggggcctcgcctgcctccaccacctccagaacctccgcaggctggacatctcggacctccctgccgtgtccaaccctggcctcactcagatattggtggaggagatgctgcccaattgcgaggttgtgggagtcgactgggctgagggcctgaagtcagggccggaggagcagcctcgggacacagccagccctgtccctgcctagcctttagccctgtccccactcacgtggcttctcagcgggctgcatggaatgtctggtagctcaccacacttctggcttccatttgtcttcactcaacgtcagggtgggggagtggtgctggccaatcacaggagagagcgtgagttcccagtatttattcctggctgcccttggctaaaggtcacagctcctgtcaccctgtcaggcagccctttccatgcccctgttcaggcctggggaggtaaaggctcaggctgttagtagccgcagagagccacactcaccttgtcaggagactcttctcaaactgtccttatgtgagtgcactgccatttcttgcagggaccctgactgacacaggggctactactgacactttacagggatggttctcccccgtgcagggccgctgtgcccactgcaggacatgcagcatccttcgccccactccactcactaaaggccagcgcaccccaggccccatagtattgctggttatggatttattgactttatgttccaaattcagctttttcagttggcagttttttgaaaggggataagctttgtcagtagagggcaccaaacaggcattataggaggaaaggcgcctccttcgtggttcttgttggttgtgcttctgcctctggacgccgcagtgcatgtggcttccccagcacccagctcctgaagcaccaggcggtcagcagctgcccttggcaccctccagccctcagaagttgcgtaggagacacagcgcctccactgaggcacctctctgggaataacgttccccagcaccccaaatggatttccagtcaattcagaagcattttaccagtgaagccctcattattccagttcactgttaaagccagtaattctctatattaaactttccctgttcaagtt

SEQ ID NO: 10917 - protein, 257 aa, Homo sapiens
MAAPWASLRLVAPMWNGRIRGIHRLGAAVAPEGSQKKKRTILQFLTNYFYDVEALRDYLLQREMYKVHEKNRSYTWLEKQHGPYGAGAFFILKQGGAVKFRDKEWIRPDKYGHFSQEFWNFCEVPVEAVDAGDCDINYEGLDNLLRLKELQSLSLQRCSHVDDWCLSRLYPLADSLQELSLAGCPRISERGLACLHHLQNLRRLDISDLPAVSNPGLTQILVEEMLPNCEVVGVDWAEGLKSGPEEQPRDTASPVPA

SEQ ID NO: 10918 - DNA, 3023 bp, Homo sapiens
  CDS (12)..(1997)
tgagtgatgctatggaggagatcgacatgcaacaaggcacctcgtcagtaaaaccacaggctaatggtgttttggatgaaaaatctcaaattcaggagccatgttgttcagacctcttcctgtttcctgacgagagtgggaatgtatcccaggagtccggccccacctatgcctcattctctcaccatttcatcagtgatgcaatgacaggtgtgcccactgagaatgatgacttttgcattctttttgcaccaaaagcagccatgcaggagaaggaagaagaaccagttataaaaatcatggttgatgatgcaattgtgataagagacaattatttcagtctgcccgttaataagaccgatacgagcaaagcccccttacactttcccattcctgtgattcgctatgtggtgaaggaggtctctcttgtctggcatctttatggaggaaaggattttggaacagtccctcccacttctccggctaaaagttatattagtccccacagttcgccttctcacacacccacgagacatggacgtaatacagtatgtgggggaaaaggaaggaaccatgactttttaatggaaatacagctaagcaaggtgaagtttcagcatgaagtctacccgccatgcaaacctgattgtgattccagcctctcagaacacccagtctcccggcaggtgttcattgttcaggatcttgagattcgagatcgtttggcaacatcacaaatgaataaatttttatacctgtattgcagtaaagaaatgcctcgaaaagctcactccaacatgttgacagtgaaagccttacacgtgtgtccagaatctggcaggtccccacaggagtgctgcttgagagtgtcgctgatgccgctccgcctcaatattgaccaggatgctttgttcttcctgaaggatttcttcacaagtctttctgcagaagtagagcttcaaatgactccagatccagaagttaaaaagtctcctggagctgatgtcacctgcagtttgccaaggcatttgagtacctcaaaggagccaaatctggttatttctttctctgggccaaaacagccttcccaaaatgatagtgccaattcagtggaagtggttaatggcatggaagagaagaacttctctgctgaagaagcatcttttagggatcagcctgtgttttttagagaatttagattcacgtcagaagttcccattcgacttgattatcatggcaaacatgtatcaatggatcagggtacgctagctgggattttgattggtctggctcagttaaactgctctgaactaaagctcaagaggctttcctatcgacatggtttactaggcgttgacaaattattctcatatgcaatcactgagtggcttaatgacattaagaagaaccagctaccaggaatcctgggaggtgttggacctatgcattcactagtacaattagtacaaggcctagaggacttggtctggctcccaatagagcagtaccggaaggatggccgcattgtcagagggtttcagagaggcgctgcttcctttggtacctcgacagcgatggctgctctagaactcacaaacagaatggttcaaaccatacaggcagctgcagagactgcttatgatatggtgtctcctggtaccctttctatcgagcccaagaagaccaaaaggtttcctcatcaccggttagcccaccagccagtagacctgagggaaggtgtggccaaggcctacagtgttgtgaaagagggaatcacagacacggctcagaccatttatgaaactgcggctcgagaacacgagagcagaggggtgactggtgccgtgggcgaggttctgcgccagattcctccggcagtggtgaaacctctgattgttgccacagaagcaacgtcaaacgtgctgggtggcatgagaaaccaaattgggccagatgtccggcaagacgagtcacagaaatggcgccacggggatgactgatggcttggaactgacagtgtgaagataaggagagtggaaccaggagctcagagtcctgacagcagcttcagaggaagctcgtttaattttattgtgctcatctcaggaacaaaagcattttttagttaaataatttaacatcaaaacaacatgcaaccaaaaacttctgacatttatagttgatacttgcctatagaaatgtttggtggctggtgtcaaaggtccttaaagcatttgctgccaagttagtggaaggctcacttttgttaagatgactgtaattctccttgttaccgacgagagatcattggaagctgccttctaacactttgtgtagctctgtggagttggattttcttaaggtttaaaaagaatcacagcttcggaacttttaactgaaaatgagagacagaagccacaggggaagcaaagcaaataggattttcaatataaatatcagtgtggaaaaataacctattctgttgaatttagtgttcatgcacttgagaacaacattatttccatttactccgaaaatccttctgtgggggtttgagaaagtgaatgttgcagacatgttctgttgtgttgcactttatcctgtgtttatgtgtatgtgtttttagattaattcaagttgtgtgctatatttcttgtataatttacaaagttacacaaaatataaagagcagtaaacttgtctgaaagtttttggcaaaggaaggtaacttcaatgtaatagcttcctttaagagtacaggaaaatgcattctgtaatgaagtggggcccatgtaattgtttatattttcagttttaagcaggtatagtgcaggcttgttaggaatgtgtggaagggaagattggaagtgatttttcctcttttaaaagtaaacaaaattcttcaaatatgccctagttaactatttcagcataccatttttacttggttaacagtgtacattttgataacctatcaggaatgaataaagtatttttatttaaaggtgaaaaaaaaaaaaaac

SEQ ID NO: 10919 - protein, 662 aa, Homo sapiens
MEEIDMQQGTSSVKPQANGVLDEKSQIQEPCCSDLFLFPDESGNVSQESGPTYASFSHHFISDAMTGVPTENDDFCILFAPKAAMQEKEEEPVIKIMVDDAIVIRDNYFSLPVNKTDTSKAPLHFPIPVIRYVVKEVSLVWHLYGGKDFGTVPPTSPAKSYISPHSSPSHTPTRHGRNTVCGGKGRNHDFLMEIQLSKVKFQHEVYPPCKPDCDSSLSEHPVSRQVFIVQDLEIRDRLATSQMNKFLYLYCSKEMPRKAHSNMLTVKALHVCPESGRSPQECCLRVSLMPLRLNIDQDALFFLKDFFTSLSAEVELQMTPDPEVKKSPGADVTCSLPRHLSTSKEPNLVISFSGPKQPSQNDSANSVEVVNGMEEKNFSAEEASFRDQPVFFREFRFTSEVPIRLDYHGKHVSMDQGTLAGILIGLAQLNCSELKLKRLSYRHGLLGVDKLFSYAITEWLNDIKKNQLPGILGGVGPMHSLVQLVQGLEDLVWLPIEQYRKDGRIVRGFQRGAASFGTSTAMAALELTNRMVQTIQAAAETAYDMVSPGTLSIEPKKTKRFPHHRLAHQPVDLREGVAKAYSVVKEGITDTAQTIYETAAREHESRGVTGAVGEVLRQIPPAVVKPLIVATEATSNVLGGMRNQIGPDVRQDESQKWRHGDD

SEQ ID NO: 10920 - DNA, 2083 bp, Homo sapiens
  CDS (506)..(1195)
ttttttttttcccggctgggctcgggctcagctcgactgggctcggcgggcggcggcggcggcgccggcggctggcggaggagggagggcgagggcgggcgcgggccggcgggcgggcggaagagggaggagaggcgcggggagccaggcctcggggcctcggagcaaccacccgagcagacggagtacacggagcagcggccccggccccgccaacgctgccgccgggtacgtggctacaccactggctgccctcttgaacataaaggagaaaactcggctgcgggcacctcccaacgccaccttggaacatttctacctgaccagtggcaagcagcccaagcaggtggaagtagagcttttgtcccggcagagcgggctctctggccgccaggtagagcgttggttccgtcgccgccgcaaccaggaccggcccagtctcctcaagaagttccgagaagccagctggagattcacattttacctgattgccttcattgccggcatggccgtcattgtggataaaccctggttctatgacatgaagaaagtttgggagggatatcccatacagagcactatcccttcccagtattggtactacatgattgaactttccttctactggtccctgctcttcagcattgcctctgatgtcaagcgaaaggatttcaaggaacagatcatccaccatgtggccaccatcattctcatcagcttttcctggtttgccaattacatccgagctgggactctaatcatggctctgcatgactcttccgattacctgctggagtcagccaagatgtttaactacgcgggatggaagaacacctgcaacaacatcttcatcgtcttcgccattgtttttatcatcacccgactggtcatcctgcccttctggatcctgcattgcaccctggtgtacccactggagctctatcctgccttctttggctattacttcttcaattccatgatgggagttctacagctgctgcatatcttctgggcctacctcattttgcgcatggcccacaagttcataactggaaagctggtagaagatgaacgcagtgaccgggaagaaacagagagctcagagggggaggaggctgcagctgggggaggagcaaagagccggcccctagccaatggccaccccatcctcaataacaaccatcgtaagaatgactgaaccattattccagctgcctcccagattaatgcataaagccaaggaactaccccgctccctgcgctatagggtcactttaagctctggggaaaaaggagaaagtgagaggagagttctctgcatcctccctccttgcttgtcacccagttgcctttaaaccaaattctaaccagcctatccccaggtagggggacgttggttatattctgttagagggggacggtcgtattttcctccctacccgccaagtcatcctttctactgcttttgaggccctccctcagctctctgtgggtaggggttacaattcacattccttattctgagaatttggccccagctgtttgcctttgactccctgacctccagagccagggttgtgccttattgtcccatctgtgggcctcattctgccaaagctggaccaaggctaacctttctaagctccctaacttgggccagaaaccaaagctgagcttttaactttctccctctatgacacaaatgaattgagggtaggaggagggtgcacataacccttaccctacctctgccaaaaagtgggggctgtactggggactgctcggatgatctttcttagtgctacttctttcagctgtccctgtagcgacaggtctaagatctgactgcctcctcctttctctggcctcttcccccttccctcttctcttcagctaggctagctggtttggagtagaatggcaactaattctaatttttatttattaaatatttggggttttggttttaaagccagaattacggctagcacctagcatttcagcagagggaccattttagaccaaaatgtactgttaatgggtttttttttaaaattaaaagattaaataaaaaatattaaat

SEQ ID NO: 10921 - protein, 230 aa, Homo sapiens
MAVIVDKPWFYDMKKVWEGYPIQSTIPSQYWYYMIELSFYWSLLFSIASDVKRKDFKEQIIHHVATIILISFSWFANYIRAGTLIMALHDSSDYLLESAKMFNYAGWKNTCNNIFIVFAIVFIITRLVILPFWILHCTLVYPLELYPAFFGYYFFNSMMGVLQLLHIFWAYLILRMAHKFITGKLVEDERSDREETESSEGEEAAAGGGAKSRPLANGHPILNNNHRKND

SEQ ID NO: 10922 - DNA, 1894 bp, Homo sapiens
  CDS (263)..(1099)
actctcctcccccgagcggcagcggcagcggcggcggcggcggctgctgcgggcgctgaatgagagacggtgactgttcgggtcgacgagtgctactctaggcggcggcggccgtggcggtgaagcgtggggccggcatcgtctttccgtcctctgagacgacggccgcggctgcacaggaataatgtatttgtggccttggacatgaggcagtcagtcctctgttgctgttaacataaggtcagggactgatgaggaaagcatggacctaatgaacgggcaggcaagcagtgtcaatattgcagctactgcttctgagaaaagtagcagctctgaatccttaagtgacaaaggctctgaattgaagaaaagctttgatgctgtggtattcgatgttcttaaggttacaccagaagaatatgcgggtcagataacattaatggatgttccagtatttaaagctattcaaccagatgagctttcaagttgtggatggaataaaaaagaaaaatatagttctgcaccaaatgcagttgccttcacaagaagattcaatcatgtaagcttttgggttgttagagagattcttcatgctcaaacattaaaaattagagcagaagttttgagccactatattaaaactgctaagaaactgtatgagctgaataaccttcatgcacttatggcagtggtttctggcctacagagtgccccaattttcaggttgactaaaacatgggcgttattaagtcgaaaagacaaaactacctttgaaaaattagaatatgtaatgagtaaagaagataactacaaaagactcagagactatataagtagcttaaagatgacaccttgcattccctatttaggtatctatttgtcagatttaacatacatcgattcagcatacccatcaactggcagcattctagaaaatgagcaaagatcaaatttaatgaataatatccttcgaataatttctgatttacagcagtcttgtgaatatgatattcccatgttgcctcatgtccaaaaatatctcaactctgttcagtatatagaagaactacaaaaatttgtggaagacgataattacaagtaggttggatcttcaaaagtggtttgtataactttgtcctgtcctccacctttctatccctatgtatttaaacatctaaatcctacatggtatcatacaaaggactaatccagtggtttacagcagtaaaggtactaacatgtattacttcttaatcacttgttatgattgagccaatatacaaatacctcatctgttctttttaatattttatctctgtttgtagagagctaacgtttgatagttctaatttaaatttcttcctttcccccatattcaatcattgaatccttatagaatttgtcttttaatagacagaaaaattaatgaaactttttaaaatagaaaaattactcttctttaatgctaagtattgacacatcgttgtttgtttttcattgtttttgcggattgagagacttggtccatcttgtctcaggagaagaaacctttctccaatgtagcagaattatcctcttccctgtattatagcaagttctttattaaagatttttgaggccgggcacagtgactcacgcctgtaaccccagcactttgggaggccgaggcgggtggatcacttgaggtcaggagctcaagaccagcctgaccaatatagtgaaacactgtctgtactaaaaatacagaattagccgggcatggtgcatgcctgtaatcccagctgcttgggaggctgaggcaggagaatcacttgaacacaggaggcagaggttgcagtgagccgagagtgcaccattgcactccagcctgggcaaaaagagcaaaactccgtct

SEQ ID NO: 10923 - protein, 279 aa, Homo sapiens
MDLMNGQASSVNIAATASEKSSSSESLSDKGSELKKSFDAVVFDVLKVTPEEYAGQITLMDVPVFKAIQPDELSSCGWNKKEKYSSAPNAVAFTRRFNHVSFWVVREILHAQTLKIRAEVLSHYIKTAKKLYELNNLHALMAVVSGLQSAPIFRLTKTWALLSRKDKTTFEKLEYVMSKEDNYKRLRDYISSLKMTPCIPYLGIYLSDLTYIDSAYPSTGSILENEQRSNLMNNILRIISDLQQSCEYDIPMLPHVQKYLNSVQYIEELQKFVEDDNYK

SEQ ID NO: 10924 - DNA, 2385 bp, Homo sapiens
agcaaggtctaatgggatgctgtcttcaagagacccatctctcatcccatgagacccataatgacacccataagctcaaaataaagacatggagaaaaatctaccaagcaaatggaaaacagaaaaaagcaagggttgtaatctcatttcagacaaaacagactttaaaccaacaaagaccaaaaaagacaaagaagggcactacataatggtaaagggttcatttcaacaagaagacttatcctaaataatatatgcacacaatacaggagcacccagactcataaagcaagttcttagagaccttcagagaggcttacactcccacacaataaaaaaagaaaaaggcctgggtatagtggctcatgcctgtaatcccaacactgtgggaggccaagacaggaggattgcttgagcctaggccttcaagagcagcctgggtaacacagcaggacctcacctcatctcttaaaactcccacacaatacggggagactttaatacccaactgacggtactagacagaccatcagagcagaaaattaacaatgatattccggacctgaacacaacactgggccaaatgtacctgatagacatctagagaactctccacccaaagatcaacagaatatgcattcttctcattaccacatgggacatactctaatatcaaccacacaattggacataaaacaatcctcagaaaatgcaaaagaaggaaaattataccaaccactctcttagaccacagcacaataaaaatagaaatcaagacaaaatcactcaaaaccatacaattatatggaaattaaccaacctactcctggatgacttttgggtaaataatgaaattaaggtagatatcaagaagttctttgaaacgaacaaaaacaaagacacaacataccagaatctctgggacacagctaaggcagtgttaagagggaaatttatcacactaaacacccacatcaaaaagataggtcaatggccaggcacggtggctcatgcctataatccaagcattttgggaggccaaggagagtggattgcttcaggctagcagtttgagaccaccctagccaacatggcaaaacctcttctctactaaaaatgcaaaatttagctgggtatggcagtgtgtgcctgtagtcccagctattcggaaggctgaggcacaaggaggtggaggtggcagtgagccaagattgtgccactgcactgcagcctgggtgacagagcaagactcttgtttaaaaaaaaaaagaaagatctcaaattaacaacctaacttcataggagaaagaactagaaaagcaagagcaaaccattcccaaagctagcagaaaaaaagaaataatcagagctgaaaactgaaggagactgagacaggaaaaaccattcaaaagattaacaaatctaggagttggttttttgaaaaagttggtaagatggaccgctagctagaataatgaagaagagaaaaaatccaagtaaacacaattagaaacaacaaagcgggtgttgccactgacccctcagaaatacaaataactagcagatactactatgaacacctctatgcacacaaactagaaaatctagaagaaatggataaattcctgaacacatacaccctcgcaagactgaaaccaggaggaacttgaatccctgaacagaccaataacaagctctgagattgaattagtaatgtatagcctagcaaccaagaaaggcccaggaccaggtgaattcacagccaaattctaccagatgtacaaagaagagctggtaccatttctactgaaactgttccaaataactgaggagaaaggactcctccccaactcattctttgaggccagcatcatcctgataccaaaacctggcagagataacagaaaaaactaggccagtatccttgatgtttattaatgcagaaatccttaagaaaataactagcaaaccaaatccagcagtatatcaaatagctaatccaccatggtcaagtaggctttatccctgggatgcaaggttggttcagcatacgcaaatcaataaatgtgattcatcacataaaaaagaactaaagacagccaggtgtggtggctcatgcctgtaatcccagcactttggtaggccaaggtgggtggatcacctgaggtcaggagttcgagaccagcctgaccaacatggtgaaaccccatctctactaaaaatacaaaaattagccgggcatggtcgtgggcacctgtaatcccagctacttgggaggctgaggcaggagaattgcttgaacctgggaggcagaggttgcagtgagccgagatggcgccactgcattccagcctgggcatcagagcatcagagcaagactatgtc

SEQ ID NO: 10925 - DNA, 2127 bp, Homo sapiens
  CDS (28)..(486)
atttttcatgtcacataattttggagtatgtcatggacatttgaatattttgttacaaaactggatgctgttaaaatcctctggaaaatatttttggttttttggtttcactttagcgggcagttaacctggttaggttcagactgcctctgtgggctgtggatccagtttgaacttacttttcaaaaccttcgtattgctgttcaggtcccaggtgtgccatccatgccattgtgcagttctcagcgcctttcctctgccgccttgggtcagttcacacatgggcatgttggtggtaaacttgagattgtatacacaaatttagaggacgtttcttctctccgtgacttcccttgtacacaagctcccaagagtttcttttcgtggttctttggtgagaaaactggaattttagcttctttgtgcttttcatacgttttctgtagaggggctcatttcctgaacaaaatggagagagagaaaagttagagaaaaaaataaaatgaattccctcttccatactcttccgatcatcgtctttttcctagttcttttgtcagaagaactctcttttagagtttaggagacagctaccagccacaggtgtgcagactcaggattggggcttgctttgaggcagagctgagagagaagaaaaattaccagatatccacccctccccattgtccctctcccattcatcatcttttctagttctctagccagaaggagtttctcttggaacttttctctgtcttcactcactgcacagttaatgagatttgggctgtcctcaagtctaagctgacatatgtgggagaaaaaaaccaggaaactcactactgttttgagttttgatttctctcgccagtctgcttgcttcaaattacttttcagagtccttgtatatttgctttatgtattctttccaggatttttagtaataatcaatggacaagatagggtggagtgtgctttctccatcttagctagaactgggaccccgtcccccactcgtaaaatataaataatgacttagcatggcacattaggtgggcattagagacaccagggaagcgattacaaatataaatgcccaggttgtatctccagataattaaaaatctttcaggagtaggatccagaaaactatatttaaaagttctctaggttcttgatatactatgtaggttgtggtctgaggaccactacatggggatcatttggaaacttgttagaaatgtagactcaggttccattccagacctgctgaattggaacaagatccccagatggtgcctacgcacagtaaaatttgagcagcactgccctagcatgattctagtgtgcagtcaatgttgaggaccactgtcttagaggattgcgtaaaagcaaatgacgtgtatataaatttagattgtaatattctctgagtataaactcattaggtgcaagctgagctcaccctccatgttttctgtgttcctggttaaagtaagttacctttgatgaaaaccacaggttcatctttgacttcaaatcagatttgttgctattgaagctaattggatcccagctcagctttgtggcttggattcacaccatataaaatcttcaacagacattcattcctttgttcagaacacacaaccttctaacgtgaacctccaattttctaaattcattctttttctacttcacctgaaaccacagatccatggcacttagtttctctgtaacagcagctctaccatggtgtccagaaattttagcccctactatcaagaacaaaacatccttgtacatgtttatacatctttttgagtaggagttttccaccagttgcagggattccctgagtctagagtaatgccacaatgctgctcccttttactcctttctaagcatttctgtcagggagaagacttagattcagttgttcactttaacattttccttagatactctcttagaaaagttgtattctgcgcacttctgttatgaagggagtaagggattgctgagatttgttaagttaccaaactagtcttgatagatgtataattattacatatccaccatcacttcatttagctgggcaacaagggcaaaactctgtctcaaggg

SEQ ID NO: 10926 - protein, 153 aa, Homo sapiens
MSWTFEYFVTKLDAVKILWKIFLVFWFHFSGQLTWLGSDCLCGLWIQFELTFQNLRIAVQVPGVPSMPLCSSQRLSSAALGQFTHGHVGGKLEIVYTNLEDVSSLRDFPCTQAPKSFFSWFFGEKTGILASLCFSYVFCRGAHFLNKMEREKS

SEQ ID NO: 10927 - DNA, 1601 bp, Homo sapiens
tactatagatggtgaagctttattcaagtatcaatatatgtggtcaggcaagaaatattaataataaatgttgaaaacactattcccattaagaaataagtggatcaaagtgttacccttaatgatcatatagacactgataaataatagtcaactttattactgtggttcaaaccaagtggaggttgtatgttttgtctagaaaatatataaactacaaaaagttaataaacacctaagtgaatgagtaaattaaatgtggggagtaagattcaattaagataaagtcctaattttcttttaatcaaatgctctgctttgtactccttagaatggatgcactggagctgatttaaacattctttggtggtcacaagatgtatagctgcctctgtatgtttggcgcatggaaaaaaatatgagtttttgtggacatacactctttatttgaaaagtatgaaatataatccaagaaagccagccatggctcagtgataaatatggaattgatatgaaacattatattgattaatcacctttgaggatgattaataaaagagagaaagtgattctatatagagatgcaggactatttcaggctcattcatgatctaggtttttgtgcttcatggttattttattatcatcaataaaaagaaaaaagaaaaaaatcttatactgtccaaaaaattagggagaccagcgcccagtgttcatgtgaggggggactagtgtccatttccaccaagcagcctggaaatgctcatcctcacagggcattggagaggtttctcaagaagcgagtgcctccatgggggaaataattaaccccagattaaatgctgcttcagacctaatggatggtaaaaacaagatccaaaaggatcaaactctttccaggtagattaactgtatcccagaacaaagctcaaggacatttttagaaatacgtatatatccagcacacaagcagggtaaaattcacatctgcaaatttaccaggcattcaaaggggcaaaaaatacacaacccacaattaagagactaatgaattaatcaaaaccaacccagaacttatacagatgtgagcattagcagaaaaggacttgaagtagttattagaactgtctccctggccgggtgtggtggctcatgcctgtaatcccagcactttgggaggccgaggtgggtggatcacctcaggtcaggagttcaagaccagtctggccaaaatggtgaaaccccacctctactaaacatggaccaatgatgaccactggtggcgtttgagtcatggacgatgaatactacgtgtctgaaactctgaggtccaacagaaaacataattggatagatatcagaaatgtgcaaagatcatattcttactttggattaatagattgaggttcatcatcaatagataaatgatagaacaattaaacaagaataaataaaggtgaatcattgttcaattatgaatatacatgatgatgtaagaaatattatcactaaaaattttaaacacagatgccccttaaagaaatggatcatgagtcccgccactgcactccagcctgggcgacagagcgagactccgtctc

SEQ ID NO: 10928 - DNA, 1699 bp, Homo sapiens
ccactgatgacttgtagatggaggggtacatatgaaaagggcttcagagtggcctccaggagttaggagcaaccaccagtcaacagccagccagaaacagaggtcttggtcatctaagcacaagaaattgtattctgccaacaagaagatttggctgaccatgagaatgatttttttcctagagcttccagatgaggactcagtcatcagacacccagattatagccctgtggtaccctagttaaagaactaagctattccatgtcagagttttgaccaacagtactgtaggctaataaataggtgtgactgtaggctgttaagtttgtgtccatttgctatgaagcaatagaaaacaggcaacatgctctgttttttctactcttgcatcaccttggtctttctgttctcctccattcattaataaattgcttctggttcctctaggtactaggctgtgggtaggggaaggtaggaaagttgagaagaaagttggggtgtttttaaaatgacttaagttcagctgtcttccgagttcatgggaaaataagccattctttttctgccaaacggtggtattaaggcttgcaggatgaaatattttgcttctgacttctccagctgagaagcaggcataattttctgtgattattaatattgcaaactctagaaaatgcaagctagccttcccagaagttttctcactgttctacactccaattgccctaagggaaatagagggtgaagactgtctttccttctcagaggcactcccaatttctatgtgtgattctcttgggtcaccctcatgtcaccagggaatgaaatattccccatcttactccatgcagaaaggaggagaagagccaggacatgttctgtattcctatgtattcccattaaccactagctttctcttacatatgttcattaggggatgaacaagaatattggaaagattggtaaaatcttgtagggacatttctagatgatttctatgattgtttgggatatttgcaatctgtccttagttttgattcctctgtgaattgaggtaaaattcccatttaaaatcctgttgcaaattctactttgcgaaagtaaaaaccaccaccctgtgctctatgaaagttcctttcttgcctactgataatagtttggttctcttgagttaaaatatagctttattttcagatatttaaaatatctgctttttattttctaaaaatcactctaactacttggtggagagtagaatgcaggaggatgaaattggaccctgcaatacagatactcttgaggtaatctagaccttccattaaatgggtgatccatggaatggcaggatcaatgtcatctggaagcctgtaagaaaagatgagtctctggtctttcttcagacctactaaagtagaatgtacactttaacaagatccccaggtaatttgtatgcttactagaaattgtgaaggacttctctaggtgagatttgatgcttgcttatctagggtgatgtgtgtggaaatggggataagggaatggatacaagatatatttttgagatacaaatgacagaattttaggatgacttgatgtcagaaataaggaaaaggaagaaatccagcatgataagttaggtttctagcttgagtaacatagtggtggtttatgaagtttgggagaggaatatgcttgatac

SEQ ID NO: 10929 - DNA, 3077 bp, Homo sapiens
  CDS (20)..(640)
agagggccggagcgagaagatggcgaagacgtacgattatctcttcaagctcctgctgatcggcgactcgggggtaggcaagacctgcctcctgttccgcttctcagaggacgccttcaacaccaccttcatctccaccatcggaattgattttaaaattagaacgatagaactagatggaaagaaaattaagcttcagatatgggacacagcgggtcaggaaagattccgaacaatcacgacagcgtactacagaggagccatgggcattatgctggtctatgacatcacaaatgaaaaatcctttgacaatattaaaaattggatcagaaacattgaagagcatgcctcttccgatgtcgaaagaatgatcctgggtaacaaatgtgatatgaatgacaaaagacaagtgtcaaaagaaagaggggagaagctagcaattgactatgggattaaattcttggagacaagcgcaaaatccagtgcaaatgtagaagaggcattttttacacttgcacgagatataatgacaaaactcaacagaaaaatgaatgacagcaattcagcaggagcaggtggaccagtgaaaataacagaaaaccgatcaaagaagaccagtttctttcgttgctcgctactttgatgaactctttctgagagactgcagcacacctagagggccctttcctgcttctctgaaagcacaggtcacccagcctcagaatcacacctcccggctgctgctgagagcaccactgaacttagacctctcaacacagtatgccaagtggattccagcctcatggcctagcaaaagaacagactccctttttcaaacatggaagcaatgaagtggagacacatgcaggacctaactcgttttttccttgttttattacctgttgcagaagcggttatctttcttttttactttgcacatcagtgttagcctttccctatttcagcacaatcttagactcatatttgcacacttttgtgtcgtgaagttctagacaaatttgtacatgtggcaatgttaaaagagcatttacagcagaggttaatatactaaaattaaagggtatttggtctggttcatatggtcaaatattactgccttggtagcatttatttaagggctttttcttaaataagaatcattaaagtcattaaaaaatttactgaaatgcccatcttgtcatcaaaggccacaatttctttatttcttcagattaagagctttgcctcatccccgacctgttttccagagtctgggtagctgaatgaatcactttaaaatgattacctctgcctaatctatagaaactgcatttggaaatcaccatattctcatttttccctggggtttgtatttgctattctttcccatgtttgacttaagtgtaatcgctcttaagtaatatttgaacattattatctgtttctatttgtgaacttcttgagctgaaattttacgtgggctgagagatataccatttagggttttagtgcagcatctaactgtgattctgtcaataaggatatgtaatatattttttcttaggttcactccttagctggctggtttagttgtaataccaaattcctaccataatccctgtctacaaaagttaggtttagattttagtttgcggaaaccttccctatatagagacagattaacttgttgatataaatttaatagagctagctcttggtaatggtgaaaataatgagttttggttggttttatttggcagatgtttttagaaataaaagtacttagacctagtgcagcctctaggaaaagtcttgccttttcattagagaaaacaggaccaaggtttcagttttcaaacagctgttgttgaatgtgtagaacccagttccatctgttttggttcattgttacagaacttagtccagtcatttgggctaaagccaaccaaaagcttagttgcctttctcaacaaacactggtactggtatacttttgtagatgaaaccatcacaaggtatttagtgttaacttgtgtgccaaattcagatcactatgtcgttgttgctctagccttcagtgtcataacacaggggggataaaacagaggggatgagggaaatgaattctgttaataattattcttcctggtatgcctgttttgcttcacaaaggctactatcatgctggatagataagaacaggagatggcagtggaaagggattgcttgttaccacagagaattctcttcaaattaagatatgtcattagaatgcttggaccagtcaatcttttgtacttatttgaaaatataggaacaatttagcagctgcaaatatgcccaagctatttttaatagatatactaaacttattgttgacaaatttcagcctccttaattttttttttttttggtaattacctataggcttaaaagtcattcgttgctgttctagtataattggtagttccgtgattgaaagtttattgtaattctactatcttcaaattagatacattttcaaaaggaaaagataattttttagaaacatcttaatattcactatttcctgaaaaaatccaagcagttaacgctttctggatggtaacaaagtaccttctaaaagataagtgctatgacaccatgtatgaatgtaattctcttagtaatttacctctgactatttggtgtcttaacgctttggtttatataatctcaggggttgtctgcaaaccaaaactgacatattctgtggttagcttttattacttttttttttaacagaatgctttgctttggttatatttcttctttcttcttttgtcttatatggattaataactagtctccatgaacttcacttgaaagagcctgtaaaagttagatgagtctaaaagtgctctttgaagtagcagcaaattgggagtatatgccctgttatatagaaataaattgtccttgctattttcttacatttagctttgctagattgtatatacattgagctaagaccttaggaaattcactttctgcatgataaaatgacccaataaatattccactttgcttaataatgt

SEQ ID NO: 10930 - protein, 207 aa, Homo sapiens
MAKTYDYLFKLLLIGDSGVGKTCLLFRFSEDAFNTTFISTIGIDFKIRTIELDGKKIKLQIWDTAGQERFRTITTAYYRGAMGIMLVYDITNEKSFDNIKNWIRNIEEHASSDVERMILGNKCDMNDKRQVSKERGEKLAIDYGIKFLETSAKSSANVEEAFFTLARDIMTKLNRKMNDSNSAGAGGPVKITENRSKKTSFFRCSLL

SEQ ID NO: 10931 - DNA, 2515 bp, Homo sapiens
  CDS (393)..(1484)
atttggccagtggtgggcggttgccacagctggtttagggccccgaccactggggccccttgtcaggaggagacagcctcccggcccggggaggacaagtcgctgccacctttggctgccgacgtgattccctgggacggtccgtttcctgccgtcagctgccggccgagttgggtctccgtggttcaggccggctcccccttcctggtctcccttctcccgctgggccggtttatcgggaggagattgtcttccagggctagcaattggacttttgatgatgtttgacccagcggcaggaatagcaggcaacgtgatttcaaagctgggctcagcctctgtttcttctctcgtgtaatcgcaaaacccattttggagcaggaattccaatcatgtctgtgatggtggtgagaaagaaggtgacacggaaatgggagaaactcccaggcaggaacaccttttgctgtgatggccgcgtcatgatggcccggcaaaagggcattttctacctgacccttttcctcatcctggggacatgtacactcttcttcgcctttgagtgccgctacctggctgttcagctgtctcctgccatccctgtatttgctgccacgctcttccttttctccatggctacactgttgaggaccagcttcagtgaccctggagtaattcctcgggcgctaccagatgaagcagctttcatagaaatggagatagaagctaccaatggtgcggtgccccagggccagcgaccaccgcctcgtatcaagaatttccagataaacaaccagattgtgaaactgaaatactgttacacatgcaagatcttccggcctccccgggcctcccattgcagcatctgtgacaactgtgtggagcgcttcgaccatcactgcccctgggtggggaattgtgttggaaagaggaactaccgctacttctacctcttcatcctttctctctccctcctcacaatctatgtcttcgccttcaacatcgtctatgtggccctcaaatctttgaaaattggcttcttggagacattgaaagaaactcctggaactgttctagaagtcctcatttgcttctttacactctggtccgtcgtgggactgactggatttcatactttcctcgtggctctcaaccagacaaccaatgaagacatcaaaggatcatggacagggaagaatcgcgtccagaatccctacagccatggcaatattgtgaagaactgctgtgaagtgctgtgtggccccttgccccccagtgtgctggatcgaaggggtattttgccactggaggaaagtgaaggtcgacctcccagtactcaagagaccagtagcagcctcttgccacagagcccagcccccacagaacacctgaactcaaatgagatgccggaggacagcagcactcccgaagagatgccacctccagagcccccagagccaccacaggaggcagctgaagctgagaagtagcctatctatggaagagacttttgtttgtgtttaattagggctatgagagatttcaggtgagaagttaaacctgagacagagagcaagtaagctgtcccttttaactgtttttctttggtctttagtcacccagttgcacactggcattttcttgctgcaagcttttttaaatttctgaactcaaggcagtggcagaagatgtcagtcacctctgataactggaaaaatgggtctcttgggccctggcactggttctccatggcctcagccacagggtccccttggaccccctctcttccctccagatcccagccctcctgcttggggtcactggtctcattctggggctaaaagtttttgagactggctcaaatcctcccaagctgctgcacgtgctgagtccagaggcagtcacagagacctctggccaggggatcctaactgggttcttggggtcttcaggactgaagaggagggagagtggggtcagaagattctcctggccaccaagtgccagcattgcccacaaatccttttaggaatgggacaggtaccttccacttgttgtatttattagtgtagcttctcctttgtctcccatccactctgacacctaagccccactcttttcccattagatatatgtaagtagttgtagtagagataataattgacatttctcgtagactacccagaaacctttttaatacctgtgccattctcaataagaatttatgagatgccagcggcatagcccttcacactctctgtctcatctctcctcctttctcattagccccttttaatttgtttttccttttgactcctgctcccattaggagcaggaatggcagtaataaaagtctgcactttggtcatttcttttcctcagaggaagcctgagtgctcacttaaacactatcccctcagactccctgtgtgaggcctgcagaggccctgaatgcacaaatgggaaaccaaggcacagagaggctctcctctcctctcctctcccccgatgtaccctc

SEQ ID NO: 10932 - protein, 364 aa, Homo sapiens [sequence omitted]

SEQ ID NO: 10933 - DNA, 1808 bp, Homo sapiens
  CDS (8)..(433)
cagtaatatgattgtccatagagatatcaaaggcgcaaatatcctgcgagattcaacaggcaacgtcaaactaggagattttggggccagcaaacggcttcagaccatctgtctctcagggacaggaatgaagtctgtcacgggcacaccatactggatgagccctgaagtcatcagtggagaaggctatggaagaaaagcagacatctggagtgttgcatgtactgtggtagaaatgctaactgaaaagccgccttgggctgaatttgaagcaatggctgccatctttaaaatcgccactcagccaacaaacccaaagctgccacctcatgtctcagactatactcgagatttcctcaaacggatttttgtagaggccaaactgagaccttcagctgatgaactcttaaggcacatgtttgtgcattatcactagcagccagtaacctctcctgtgcctctacctagctcccatctattcattcaccttctctctgactgcacttttcttttttataaaaaaagagagatgggggagaaaaaagacaagagggaaagtatttctcttgattcttggttaaatttgtttaataataataatatcctaaattttttatatttaatctttttttcccttacaagaacttgaagttttttttttaatttttataatgtactgatgtggttcagagagataaagcactttagtacatagtcactctttttagtacaaacaaatcatttggaatacctaaagattgtagagtcattccctctatcactgacacatcagtgacgatgggaagacatggaaaacaaggagaagaaaatgatgtataatttgtagtttttagtgatagtatttaaaatatatcctcatttgtggggttgagccctaaactttagtttagggtaggtactcaacttaaagaatataggtttcttcttatatctgtattctttagatcctaacctctgtctaccaacctttttgctcagtaggagtcttgatagaagatatgaatctctgagaggtatgtttatttgttaatcctaaccagtataataagcaaatacactataatagatccacgttactggaatctgtaaaccttgagggatagctttctgcttaaaaacacacacacacacacacacacacggaaaacctttattttaaagtcaagttgtgagcaaatagaaataaaagacaaaaggacatcactcttatcaaatgtgtgagcagtagaagagaccacatttacagtcaatagaaataatgaaaaaaaattaggtgtttagtgtattttaaacagttttgttttgttttacttgagggggacgtcccaaaattaaaggaatggagaaataatcaaaatcatgtataccatcttctatttccagctcctgattccccataggtaacatcccttaggagcgaagagttcaattagtaatgtctatgtgttatgtcaggagatgaaacccttgttcttaggatcacagaatactaaagcacctcaaaaaaacaggtatcatgtgaaacagtggttgccaaaagtggagcgaggatgatttcactaggcatttggcaattcttagagacatttccggttgtcacaattagagggatactagtagcatgaattgggtagaggccagggatgttgctaaatagattataatacacaaggaaagcagcctcaaagaattacccctcccaaaatgtcagaagtgctgaggctgagaaaccctgatgtaaagatcagtcccagttataaactgaaaacagctatttacaaagcagt

SEQ ID NO: 10934 - protein, 142 aa, Homo sapiens
MIVHRDIKGANILRDSTGNVKLGDFGASKRLQTICLSGTGMKSVTGTPYWMSPEVISGEGYGRKADIWSVACTVVEMLTEKPPWAEFEAMAAIFKIATQPTNPKLPPHVSDYTRDFLKRIFVEAKLRPSADELLRHMFVHYH

SEQ ID NO: 10935 - DNA, 1741 bp, Homo sapiens
  CDS (153)..(1172)
caccgatttatggtgctgacatcagtggctccttgtttgatgaaaacactaaacaatggaatcttgggcacctgggaacaattcaggacctgctggaaaaggaatgtggggttgtcatagaaggcgtcaatacaccctacttgtactttggcatgtggaaaaccacgtttgcttggcatacagaggacatggacctttacagcatcaactacctgcaccttggggagcccaaaacttggtatgtggtgcccccagaacatggccagcgcctggaacgcctggccagggagctcttcccaggcagttcccggggttgtggggccttcctgcggcacaaggtggccctcatctcgcctacagttctcaaggaaaatgggattcccttcaatcgcataactcaggaggctggagagttcatggtgacctttccctatggctaccatgctggcttcaaccatggtttcaactgcgcagaggccatcaattttgccactccgcgatggattgattatggcaaaatggcctcccagtgtagctgtggggaggcaagggtgaccttttccatggatgccttcgtgcgcatcctgcaacctgaacgctatgacctgtggaaacgtgggcaagaccgggcagttgtggaccacatggagcccagggtaccagccagccaagagctgagcacccagaaggaagtccagttacccaggagagcagcgctgggcctgagacaactcccttcccactgggcccggcattccccttggcctatggctgcccgcagtgggacacggtgccacacccttgtgtgctcttcactcccacgccaatctgcagttagtggcactgctacgcagccccgggctgctgctgtccacagctctaagaagcccagctcaactccatcatccacccctggtccatctgcacagattatccacccgtcaaatggcagacgtggtcgtggtcgccctcctcagaaactgagagctcaggagctgaccctccagactccagccaagaggcccctcttggcgggcacaacatgcacagcttcgggcccagaacctgagcccctacctgaggatggggctttgatggacaagcctgtaccactgagcccagggctccagcatcctgtcaaggcttctgggtgcagctgggcccctgtgccctaagtccacgggctgtctttatatcccactgccctgctgtgtgacagtttgatgaaactggttacatttacatcccaaaactttggttgagtttgcaggactctaggcatgcatgaaagagcccccctggtgatgcccttggatgctgccaagtccatggtagttttcaattttgccatacttttgttcttcctaccggaccctggaatgtctttggatattgctaaaatctatttctgcagctgaggttttatccactggacacatttgtgtgtgagaactaggtcttgttgaggttagcgtaacctggtatatgcaactaccatcctctgggccagctgtggaagctgctgcacttgtgaagaatcctgagctttgattcctcttcagtctacgcatttctctcttcccctccctcaccccctttttcttataaaactaggttctttatacagataaggtcagtagagttccagaataaaagatatgacttttctgagttatttatgtacttaaaatatgttgtcacagtatttgttcccaaatatattaaaggtaaccaaaatgtt

SEQ ID NO: 10936 - protein, 340 aa, Homo sapiens
MWKTTFAWHTEDMDLYSINYLHLGEPKTWYVVPPEHGQRLERLARELFPGSSRGCGAFLRHKVALISPTVLKENGIPFNRITQEAGEFMVTFPYGYHAGFNHGFNCAEAINFATPRWIDYGKMASQCSCGEARVTFSMDAFVRILQPERYDLWKRGQDRAVVDHMEPRVPASQELSTQKEVQLPRRAALGLRQLPSHWARHSPWPMAARSGTRCHTLVCSSLPRQSAVSGTATQPRAAAVHSSKKPSSTPSSTPGPSAQIIHPSNGRRGRGRPPQKLRAQELTLQTPAKRPLLAGTTCTASGPEPEPLPEDGALMDKPVPLSPGLQHPVKASGCSWAPVP

SEQ ID NO: 10937 - DNA, 2338 bp, Homo sapiens
  CDS (99)..(1682)
aaaaaatgctgaactgctctttggaagtcgccggtgctgttgtagttggagtctgttcacgggcctgagcttcgaggccaggctcccgggtgtcgttaatgttcggggccgccgggcgccaaccgatcggagctccagcagccgggaacagctggcatttcagtagaaccatggaggagctggttcatgaccttgtctcagcattggaagagagctcagagcaagctcgaggtggatttgctgaaacaggagaccattctcgaagtatatcttgccctctgaaacgccaggcaaggaaaaggagagggagaaaacggaggtcgtataatgtgcatcacccgtgggagactggtcactgcttaagtgaaggctctgattctagtttagaagaaccaagcaaggactatagagagaatcacaataataataaaaaagatcacagtgactctgatgaccaaatgttagtagcaaagcgcaggccgtcatcaaacttaaataataatgttcgagggaaaagacctctatggcatgagtctgattttgctgtggacaatgttgggaatagaactctgcgcaggaggagaaaggtaaaacgcatggcagtagatctcccacaggacatctctaacaaacggacaatgacccagccacctgagggttgtagagatcaggacatggacagtgatagagcctaccagtatcaagaatttaccaagaacaaagtcaaaaaaagaaagttgaaaataatcagacaaggaccaaaaatccaagatgaaggagtagttttagaaagtgaggaaacgaaccagaccaataaggacaaaatggaatgtgaagagcaaaaagtctcagatgagctcatgagtgaaagtgattccagcagtctcagcagcactgatgctggattgtttaccaatgatgagggaagacaaggtgatgatgaacagagtgactggttctacgaaaaggaatcaggtggagcatgtggtatcactggagttgtgccctggtgggaaaaggaagatcctactgagctagacaaaaatgtaccagatcctgtctttgaaagtatcttaactggttcttttccccttatgtcacacccaagcagaagaggtttccaagctagactcagtcgccttcatggaatgtcttcaaagaatattaaaaaatctggagggactccaacttcaatggtacccattcctggcccagtgggtaacaagagaatggttcatttttccccggattctcatcaccatgaccattggtttagccctggggctaggacagagcatgaccagcatcagcttctgagagataatcgagctgaaagaggacacaagaaaaattgttctgtgagaacagccagcaggcaaacaagcatgcatttaggatccttatgcacgggagatatcaaacggagaagaaaagctgcacctttgcctggacctactactgcaggatttgtaggtgaaaatgcccagccaatcctagaaaataatattggaaaccgaatgcttcagaatatgggctggacgcctgggtcaggccttggacgagatggcaaggggatctctgagccaattcaagccatgcagaggccaaagggattaggacttggatttcctctaccaaaaagtacttccgcaactactacccccaatgcaggaaaatccgcctaagaaaagcaaagaagaaatgttttacagactttattcactatgtcccattgttctaaaatgataacatgacttctgtttttgaagcaaaaatctacattgcctcaaacacatcactctagcttccttactgcatacagtcctgccatagtgagagaaatgggatttcatcacaattcatggtgctaaaatgaaaacctctgcactttaatttttttcagtaatttccagctatttctaggtataaagagcagctcgtttctcttatttattttagtctcatgtgtcaatactttccgatgctttgcttaattcatgtatgtgtgcagtgctgcaatgcccagacaaacgtgagcacacccaccagtttctaaaatggaatagacaggaaaagattgtgttttatatcatccctatctattgtaacccaaaagacctaccatcgcatcagtgaagtccgaacacatctttgtttgaaaggcttgtcaatttcatattccttgaattggcttcttggtgaggattttctgacagagtgatacccatcaattttctatccttagacaatgtagtgtgaagttcacagttgacaaacaacaattaatgtttcccttggatgttttgacaaaaataaacctcatcgttgttatcaccag

SEQ ID NO: 10938 - protein, 528 aa, Homo sapiens
MFGAAGRQPIGAPAAGNSWHFSRTMEELVHDLVSALEESSEQARGGFAETGDHSRSISCPLKRQARKRRGRKRRSYNVHHPWETGHCLSEGSDSSLEEPSKDYRENHNNNKKDHSDSDDQMLVAKRRPSSNLNNNVRGKRPLWHESDFAVDNVGNRTLRRRRKVKRMAVDLPQDISNKRTMTQPPEGCRDQDMDSDRAYQYQEFTKNKVKKRKLKIIRQGPKIQDEGVVLESEETNQTNKDKMECEEQKVSDELMSESDSSSLSSTDAGLFTNDEGRQGDDEQSDWFYEKESGGACGITGVVPWWEKEDPTELDKNVPDPVFESILTGSFPLMSHPSRRGFQARLSRLHGMSSKNIKKSGGTPTSMVPIPGPVGNKRMVHFSPDSHHHDHWFSPGARTEHDQHQLLRDNRAERGHKKNCSVRTASRQTSMHLGSLCTGDIKRRRKAAPLPGPTTAGFVGENAQPILENNIGNRMLQNMGWTPGSGLGRDGKGISEPIQAMQRPKGLGLGFPLPKSTSATTTPNAGKSA

SEQ ID NO: 10939 - DNA, 1945 bp, Homo sapiens
tcagattatgattaaattagatattaaacacttcaaccacataagaatattgaggactgttgaatgagtcctgtgctctggtggtcctggaacttaattttatttatgaattttcagtcattagagaagagtatggtgtggatatgggaggttggattagccgactaaactttgaagtttgcaactttagcagatgttgggatagaagttaacacagtagttcaaattgatttcgcacttcatggtttatagaaatgctttcacattcatatctgaatatttgaaacaacctagtgggtaggtaggtaagcaattttatctgtgtttcccatggaagaaactgaggctgggagatgttcattgtttgttatccaaggtcatatagctagtaagtagaagagtccagatgcaaacccaggccacctgaacaatgttcacatcattttaccatggagaagagattagtgcttttatttgtctaacactctggtcagtgaaattaaagtatctccgtgtgaaacagcatgcaaaaggctttgtttctaatatttttaacaaatccctttagatcgttgggaattaaacaaatacctagggcagtgtggacttacctgaagtcttttgacattttatgaagttctgttaaacctagaaataaagtcaaataaattttttattgctttagagacatagttattggaagttatttatagtttaaatatgtagccataataattattcgtgactatatttcaagatagtttattcagcaagcacttactgagaacctaccatgtactgggcactgtgttcttaaaaggactaattgatgagctcagtctagtgggggagatgagtaaaccagcaattataatacagagtactacttgagtagaggtacgcatagggaaaaccctgtaatagagggagcactgtctgtgttacctaatgcagacttgaggtaattcgaaaaggcatgttaagccatgtgatgcttgagtacaatcttgaaagcatgttaatacttaacttggtaagaacattttaagcgaataacagcctatgcaaatacacagaggcatttgagaatgcggcacttagagggagctacaaatagattgacatggcaagagtatgcactgactgttaagggatggaaggagttgagaccagagagagagagacatgattaggattgtgaagagccttagatgacatgcttttaaaaagttagtactttttcctaaagataattgggagtcattggtgaattttaatagggaaatgcttgctatccatttatgtttgcaaagattacataatagtgtggaggatggaattggtggtgcaggatatgagattggaagcaagaataccagttagttacgatagtaaccatgtcataaatgctccacgtccaaactggtactgacattagagagaaaagaaagaaatttgagaaataattagaaggttgagatttaactagtcttggtgagagagagagatagtcttcagatgtggtttggacaaatgggtggatggcgatgctggtcaaagccaatacatggttgaaaaagccggtttctgtggctagagggtgttgatgagctcagtttgagatattttgagttgaaggtacctgtgggaatttacggttagaaataactgttaggaggctgggcatggtgtctcacatctgtaatcccagcagtttggaggctgaggtgaacagattgcttgagatcaggaattttgagaccagcctggtcaaagtggtgaaaccccatgtctactaaaaattcaaaaattagctgacatggtggcgggcgcctgtaatcccagctgcttgggatgctggcttgaacctgggaggtggagtttgcactgagccaagatcacgtcactcactccagcctgggcgacagagcaagtctcaataaag

SEQ ID NO: 10940 - DNA, 2134 bp, Homo sapiens
  CDS (173)..(991)
agaaggaaagttcctcaacataacagaagccatttatgaaaaatctacagctgatggaggaatattttccaagcaaatggaaagcaaaaaaaaaaccagggattgcaatcttagtctctgataaaacagactttaaaccaacaaagatcaaaagagacaagggcattacataatggtaaaaggatcaaagcaacaaaaagagctaactatcctaaatatatgtgcatccaatacaggagcacccagtttcataaaaaaagttcttagagacctacaaagagacttagactcccacacaataatagtgggagactttaacaaccccgtgtcaatattagacagatcaataagacagaaaattgacaaggatatccaggacttgaactcagctctggaccaagcagacctaatagacatctacagaaccctccaccccaaatcaacaaaacatacacttttctcagcaccacaatgcacttattctaaaactgaccacttaattggaagtaaagcactccttagcaaatgcagaataagggaaatcataacaaatagtctctcagaccacagtgcaatcaaattagaactcaggattaagaaactcactcaaaaccacacaactacatggaaactgaacaacctgctcctgaatgactactgggtaaataacgaaatgaaggcagagataaagatgttctttgaaaccaatgagaacaaagacagagcatatcagaacctctgggacacatttaaagcactgtgtagaaggaaatttatagcactaaatgcccacaagagaaggcagagaagatctaaaatcgacacactaacatcacaattaaaagaactagagaagcaagagcgaacaaatccaaaagctagcagaagacaagaaataactaagatcagaacagaactgaaggagagacacgaaaaacccttcaaaaaatcagtgaatccagagttggttttcttgaaaagatcaacaaaataaataggccactagccagactaataaaaaagaaaagagaagaatcaaatagatgcaataaaaaatgataaagggaatatcaccaccgatcccacagaaatacaaactaccatcagagaatactataaacgcctctacgcaaattaactagaaaatctagaagaaatggataaattcctgtacacatacaccctcccaagactaaaccaggaagaggtcgaatccctgaataggccaataacaagttctgaaattgaggcagcaattaatagcctattaaccaaaaaaaagtccaggaccagacggattcacagccaaattctaccagaggtacgaagaggagctggtaccattccttctgaaactattccaaacaatagaaaaagagagaatcctccctaacttattttatgaggccagcatcatcctgataccaaaacctggcagagacaatagaaaaaaagaaaatttcaggccaatatcactgatgaacatcgatgtaaaaatcctcgataaaatactggcaaaccgaatccagcagcgcatcaaaaagcttatccaccacgattaagccggcttcatccctgggatgcaaggctggttcagcatacacaaatgaataaacataatccatcacacaaacagaaccaatgacaaaagccacatgatatttacctgtatacctttttaagtacaaataaatctgggctgtcattatttatgctaacactggttttgtgtccctggaatctatctatctaagtttttttttctttttttctttttccattttccagtacctattagacagaatggctttcaattttttctcttacttccaaacttagtcattataagaagatgtaggccaggcgcagtggctcattactgtaatcccagcactatgggaggctgaggcaagtggattacttgagtccaggagttcgagaccagcctggccaacatggtgaaaccccatctctactaaaaatacagagattagcagggcatggtggtgcatgcctgtaatcccagctactcaggaggttgagtcaggagaatcacttgaacccggaggcagaggttgcaggcagattgtgccactgcactcctgcctgggaaacagagcaagactctgtctcc

SEQ ID NO: 10941 - protein, 273 aa, Homo sapiens
MVKGSKQQKELTILNICASNTGAPSFIKKVLRDLQRDLDSHTIIVGDFNNPVSILDRSIRQKIDKDIQDLNSALDQADLIDIYRTLHPKSTKHTLFSAPQCTYSKTDHLIGSKALLSKCRIREIITNSLSDHSAIKLELRIKKLTQNHTTTWKLNNLLLNDYWVNNEMKAEIKMFFETNENKDRAYQNLWDTFKALCRRKFIALNAHKRRQRRSKIDTLTSQLKELEKQERTNPKASRRQEITKIRTELKERHEKPFKKSVNPELVFLKRSTK

SEQ ID NO: 10942 - DNA, 4121 bp, Homo sapiens
aaacaactatgatgctaattaggaggaggaagaatgttttcaaagtctttcaccaggtatcgatattcatctcaaagagtttgaacaacagattcaattctgtgtagggaccatttcttcatttattctttattcctactaaatcagaaataccaaattcataagtcatttggaatgggtaacaaatgttcgatggtttgtcaactagtcttgacaaacggattctacaatgtacagaaattatggagacagttttcactgatagatgttcagtgcctcaaaggaaactcattaagatgagggaatggcctctcaaatggaacaggattgctgaatatatcaacacaaaagatcactagcaaatggattcctaatgaattcctggttgaatttgcctccgataattatgtattcatattcagtttgagcattcagatgtgttaaatatggccaataatagcactgatttatttcctcctttaatttagaatatctttaagtagttagaaggaaacccttgttaactaatccattgacatcaaaatttaactttttaaggaacttttgctgtctctcactaaatattagaaatgatgatatgttgttcgtgaagtcataaagtcaggcttctccactctctgtttgatttttatgtgtatgtgctgctcataaaaatcatcacactggtagagattcttgttctcacaatgcagattcacagtgtattttctccctgaaaacttgttattttctttggaacctttatgccaaatgatatataatttgcagtactattttcatgtctttctacttttacatctccgatggattaatgttgcagcattatttcattttgtgtgagttggtactctaaaatacaataaggcagacagctttaaacccatgtgatgtttaatatcctacaaagaccaaagagtcatagtggatatttccctcaatctaaaaataagggaaaatactaataagcaaattatataaaaatgaatctgcttaaatagacagcaccctgtttgccagatgttacctgagacaaccaatccatatatcccatgtatgtgagatgtttaaaaatgtaagaattactaaggacatgataaatttttatgagaatcataattaatcatatagttcaaatttcatggtgcctgtctattgccaacccctagtttttcacaggtttcacattggaaagcaatgggttgtcctttggcttattttattttagtaattaactgtcctttaaaaacaataaaactttcagccttcagtgactttgataacctatgtgataaagtcagaactcattagcctgatattcaaggtcttcccagagaggctccatcttacctgctctgacttctgtcttatacctgctgatccacctggggtgtctgctgaaagcaggtcagcacaatgactcagattcttccctttctttccctctcccatgccccaggatttgtttgtacaactggcccaggaatcctgacttcatttattctctatgggttaacccaggttcttgcttgtgaatggaaacaggataatggagctaaacctaaatggcattttctaaccatgtcttcattattcattctctgaaccatcctctctaatcagtttttactgatttcttccccaaatatgcatttgctttctcatttcaacttatatttacactgttctattcatcagaaatgtccctgtcttgtctgcctcgtcaaattcttcaactcccaactcctgtcttacttcctatataaaatcttattaggttaccttagctgaactatcttcttctttctggaattcctattgcaattacttttgttgtaattatttaggcagtggtttctttgatatcatttactgtgttttctggcaattgcactgaaattgtatactgctcttcaatgaatgattatctatttccccaaactagattttaagcaccttgaggacaaatattgcctcatatgcctgtatttctgttccaggtctttggcatactgttaataatgaacaaatattatattacagtaaaactgtatcccaagattttctcagactcatctaaaatataggcaagaacttaataacactaatatgcctgttcaatgaagcattctattcaaaatgttttattaattctttacagcttcctcagcatctgattggaatcagtggcattttaatttatatgtctatttaacaaatactaatatagtgtgcactgtgtgttactcattttctatgcactttacaaataataattttatttaactttcaagacaaccatctgaaataggtgctattattatccctgttttatgtatgaggaaatggatttactgagaagtaactcagccaaggtgatggaattagttactaataggttcaggatttgaacctacatttttaaccactgtgctctaggaacttagttaacagctttaatgaatgaaatggttctgctaattgatgtaagaaactacttacatgttttgttggctaggtcacctgtcactctcagttcggaatctttcaggaaatgtcctttagtctctggtgggaggtgtactgcaactaaccgtcctttgaatttatgttgccatgtacagttcctgtaattttatttcctctttctatctttacttttgggatctaagcttccttgaatgtttagcctttttgtctttttagaaaatattgttccctttatgaatatgtctcttaattgctagagtttcctaatagccaaatgaaaattacattttggcttagaaaatgctttcatctgtatccactggctatatatctgcaaccaaagtaaagtgtggaattgggtatttgttgtttgcagcatttgagcagtgtacacatcaaatgtggttaattctattaccagtaatatttctagtttcttctaaaattaccataaaggtttaggtctagattagataattatttccaatcaatctcctttcaagttggaaatgaatgaagtcccatgttttctgtgtgctatttcatatattttggcatgataattattaatagcaatgtattactattgcccttttgcttacttaaaagtatattttgcagtggtttattttattctaggtgggagaataacacgttgatatcttcttgaaataaaaattatatgtcaatgaatgtgacaatgttctatgtaagtagcaatcgaggaatgactgaaaagggattattaaatatttcaatgcatgggaaaatatttcttctacctatttactgcctaaagcaaatgctaacccagaagatatttatgtcttggtttagaaatctgtagagtgacagagcaatctgagctctgtaatgtatgcaaaatttatcaggctcagagagacatgagtatgggactttggccacataccatacctgtgcccagggacaactgttaggaaacattttgttccagactagttgtgtcacctattatcttcatgttcctggaatttgtgatacaaagaacaatgtatagccaatcgatagcttatgtatttgaatgtatattcttggtaaacaacttaggaactgcctcttgtttttttcctaaaaaaagccacttgtaatggctggtagttggagtgtataatcagagcaacttgaatctacgctcctgagtggccatcttcaacgatcaccctggaataaactctttttaaactagaaaacaaaaacaaaggaaacaacaaaaaagaagaaatctatagagtgaactatatttttccaccttgcaaatagaaggggcaaaaatcaaccttgcctatctgatgatttagtgtcatagggattccaaaatgttatttgtaacgtgtaccttgatatgctaatggtgaaatctcctgtttcttgatttggtcttctcatcttacatttcttacctcaaatccattctgcgacttcaccagcagattaatattctttcctggtctcttggaattttaataaaaacagcatggtcatggggtttcatgaagcttgcagccctctgggggatgcagataataatcaatcaatctcataattaaatgtaattttaaataagagcttac

SEQ ID NO: 10943 - DNA, 1548 bp, Homo sapiens
ctgatgcatgacctctttgacagttgcctttgttcatgattcctagtttcctggtttattttattggggtacagggtgaggtctggaagacctggaaaggaaactcacttttttggtttgacagtattaatgcaatcatctagttcataccttgtaagcccacttattatttcctctgcgtgtgttttttctggtttagcggattagctgcactgtctcttcaaaggctgtccaatcaaggaggggttattaaaaccagggcgatttatgactgagaattaattagagaagcattttcatgcacaacatccaattttttgattagcaatggagcagggccgcaattaacactcgaggaagcttaaatttccagctttttgattctcaggaaatgagattatcaaaccagggtcagacacttgacagcaaagtgggagtgggggagtgtgaaattatatgtaaaaaaaaaaaaaaaaaaaaaaaattccagagtctagaaattcggtcatttttctctttatgtaatggtaagaattaagaatcctcacatctgcaaccaaaaatacaagcctggtgtgtaacactaaagggtaaaacagggatagatataagctgttatgctattcttcaggcaacactgtggataagtgacattcagatgtttactgtaaagaaaaatttgaatacatttgtattgaagggcttttagaaaagagcattactacacagaactgagagttgaaaatatgaaggtgtggaagattaagagaacgcgtttactttaaaagataatttaaaagttatctttccaggctgacacggtggcccactcctctagtcataacactctgggaggctgtggtgggacgatccctcgagcccaggagttcatagaccagcctgggtaatatagggagaccccatctctatctaaaattttttttaaaagaaaataaatatctttacagttatttttcttagtcctatgttctttattttggtgttttccattggatacctgcatgccaagtgttgtgctacagtattactgaagagtataatggaagtaatgtcctgctgaaaattttctttgagatattaatcattaataatttatatattgctatttaatacttacataggtctttagccttttaaaggatttctgtttgacagcttttataattgaaagttattccattttttttttaattttgcatgcttgaaaaagatgaaaacagtgatttaaattatgaagtatggggccaggtgcagtggctcatgctggtaatcccagcactttgagaggctaaggcaagtgggtcacttgagcccaagagttcaagaccagcctggccaacatggtgtgaaaccccgtctgtactaaaaatacaaaaattagccaggcgtggtggtgcatgcctgtaatcccaggtacttgggaggctgaggcacaggaattgcgtgaacccaggaggcagaggttgcagtgagccaagatcacatcaccgcactgcagcctgggtgacagagtaagactctgtctcc

SEQ ID NO: 10944 - DNA, 1349 bp, Homo sapiens
gttttataaatggggtagggaccaactgaaagacaggaaaataaggcccttgatgccattaatcttttatcctcttgccctcattggtatcttcatcccaccttgggtcccagtcccctctcctgttcccacaccacctgtcacatgcaagggatgatggctgtctgctcctgggtctatgctttgtggaagaaggatgctgtggagggagcatatccaagctctaaagtggcattctctcccaccctttgcagttctgcctcctgggggcattgctggcccccatccgagtgcttctggcctttatcgtcctctttctcctctggccctttgcctggcttcaagtggccggtcttagtgaggagcagcttcaggagccaattacaggatggaggaagtaagtgagggatcagcccccagagaccctacttctcttccctgctgtctattcggctccctctttgagaagaagaaaagagagcattctgaaactattctgtctagcttgggtagatgagatgagtcagccaagctcagacgtggttcccagacctcacctctaagtaatgtgccctgataggtcccaaagtggccagagaccttggccccttggtcacatcctatttaagggtaaaagaggggtgccctactttcccggtgtctgaacctgggggcgggtgagggttagaaccactgcttccgctgatacccagccttgccctggcaggactgtgtgccacaacggggtgctaggcctgagccgcctgctgtttttcctgctgggcttcctccggattcgcgttcgtggccagcgagcctctcgccttcaagcccctgtccttgttgctgccccacactccactttctttgaccccattgttctgctgccctgtgacctgcccaaagttgtgtcccgagctgagaacctttccgttcctgtcattggaggtgagagagttcaaagggggtgaagggcagggtgacaactctgggcaaaaaaagtcaggaatggagacactggagtgaagaactggcctcaaagtggggagggactgttggcaagtgaaatataaattaacaccattagtcaaccagtcttagattctgagggctgggacagagagaaggtgttggagggagttctggtcagttctctaaaaggacaactactataaagggattgtcccagggcaaagataacaggccaggcacggtggctcgcgcctataatcccagcacgttgggaggccaaggcgggcggatcacctgaggtcgggagttcgagaccagcctgaccaacatggagaaaccctgtctctactaaaaatacaaaaaaagtagccgggcgt

SEQ ID NO: 10945 - DNA, 1490 bp, Homo sapiens
tgcttttgtgacttgacttagaagctgaaattgggaatttccttagatgagacagtacatagttcatctgtgatatcagatcagttcaccaatacatgctacatacttgtgcccctgaagctttgtaaaggcctaggacattccagttctcctcactcagtttggtgaacaaggacatgcccatgtcaagtacagtaccccatgagacactggctgagtggggttatgtgtcatttcccatgtcctcagtcagcagatcctctttggccagtctgcatctttcatgcaaggagagagcttcatacccacttcttggtaagcagggtcttcaaatgtcaaacgttctttggacagatggcttccagtccacagaagcacttcttctagtgcttccccttcactccccaagaggctgcttcttgactaatgactgtgggacctaacttggtcgttcaggtgacaaagaatgttccccaagtctgtagctgacaattgatggttctctctgaacagcgctttagggtgggcttttccccccactctttttagagacaaggtcttgctctgtcacccaggctagagtgcagtggcaccatcagtgactcactgcagccttgaatactgggctcaagccatcctatcccctctcacctcagcctcccaagtagctgggactacaggtgcacaccactgcactcagctaatttttaaattttttgtagagatagggtctcactttgttgcccggggtggtctgaaactcctggcttcaagcagtcctcccaccttggcctcccaaagcgtaaggattataggcatgagccactgcgcccagtctagagtgggctttttttattgtcctccaaaggtacagaggttgcttcatgagtcatctggtgaaaaggtatagaataacatcactagaataacatcactgtccgcctgtgtccaggttcaaggtcctgctctgaaggtgacagctctacctgtactgaccaaacctctgtctgacctgttagcagagagaccgtcattccaggggtggggcttgtttcttcacagagccagggctgcaacacaaaaggtgtgataccaagtaccgtgggggcttcatccagacgcagagaacttctttgggtttacatggcaaataagtcaacctttctgtttcctaaagggtttcacaaaaaaaggcatctttgaatggcctcagcagtgctctcacagaagaaagtaagggttttatcattccgagaggcactggtgggctcctctactttcagttaggtggaaatggggtctctgccactacctcttcaccagtgttgcacagctgacccttggagagggtcagcatttccagcacacaccagccctggtgttagcttgaatctgtgcgacttatgccacacagttagaggagaggcctgcagttctggagaggagagtggcatttgaagttgctgggcgacagagcgagactctgtctc

SEQ ID NO: 10946 - DNA, 2065 bp, Homo sapiens
  CDS (6)..(680)
aaaccatgaaccgatgcccccgcaggtgccggagcccgctggggcaggcagcgcgatccctctaccagctggtgactgggtcgctgtccccagaccgcgtggacgatgaatttgaattgtccaccgtgtgtcaccggcctgagggtctggagcagctgcaggagcaaaccaaattcacgcgcaaggagttgcaggtcctgtaccggggcttcaagaacgaatgtcccagcggaattgtcaatgaggagaacttcaagcagatttactcccagttctttcctcaaggagactccagcacctatgccacttttctcttcaatgcctttgacaccaaccatgatggctcggtcagttttgaggactttgtggctggtttgtccgtgattcttcggggaactgtagatgacaggcttaattgggccttcaacctgtatgaccttaacaaggacggctgcatcaccaaggaggaaatgcttgacatcatgaagtccatctatgacatgatgggcaagtacacgtaccctgcactccgggaggaggccccaagggaacacgtggagagcttcttccagaagatggacagaaacaaggatggtgtggtgaccattgaggaattcattgagtcttgtcaaaaggatgagaacatcatgaggtccatgcagctctttgacaatgtcatctagcccccaggagagggggtcagtgtttcctggggggaccatgctctaaccctagtccaggcggacctcacccttctcttcccaggtctatcctcatcctacgcctccctgggggctggagggatccaagagcttggggattcagtagtccagatctctggagctgaaggggccagagagtgggcagagtgcatctcggggggtgttcccaactcccaccagctctcacccccttcctgcctgacacccagtgttgagagtgcccctcctgtaggaattgagcggttccccacctcctacccctactctagaaacacactagacagatgtctcctgctatggtgcttcccccatccctgacctcataaacatttcccctaagactcccctctcagagagaatgctccattcttggcactggctggcttctcagaccagccattgagagccctgtgggagggggacaagaatgtatagggagaaatcttgggcctgagtcaatggataggtcctaggaggtggctggggttgagaatagaagggcctggacagattatgattgctcaggcataccaggttatagctccaagttccacaggtctgctaccacaggccatcaaaatataagtttccaggctttgcagaagaccttgtctccttagaaatgccccagaaattttccacaccctcctcggtatccatggagagcctggggccagatatctggctcatctctggcattgcttcctctccttctttcctgcatgtgttggtggtggttgtggtgggggaatgtggatgggggatgtcctggctgatgcctgccaaaatttcatcccaccctccttgcttatcgtccctgttttgagggctatgacttgagtttttgtttcccatgttctctatagacttgggaccttcctgaacttggggcctatcactccccacagtggatgccttagaagggagagggaaggagggaggcaggcatagcatctgaacccagtgtgggggcattcactagaatcttcaatcaacctgggctctccccaccccaccccagataacctcctcagttccctagggtctcttcttgcttgactcaatctacccagagatgccccttagcacacctagagggcagggaccataggacccaggttccaaccccattgtcagcaccccagccatgcggccaccccttagcacacctgctcgtcccatttagcttaccctcccagttggccagaatctgaggggagagcccccagagagcccccttccccatcagaagactgttgactgctttgcattttgggctcttctatatattttgtaaagtaagaaatataccagatctaataaaacacaatggctatgcacag

SEQ ID NO: 10947 - protein, 225 aa, Homo sapiens [sequence omitted]

SEQ ID NO: 10948 - DNA, 2598 bp, Homo sapiens
  CDS (10)..(2316)
ggattttctatgtttgcacatgcccccctgaccaatattccactgtgtaaagtaattagattcaacatagactacacgattcatttcattgaagagatgatgccggagaatttttgtgtgaaagggcttgaactcttttcactgttcctattcagagatattttggaattatatgactggaatcttaaaggtcctttgtttgaagacagccctccctgctgcccaagatttcatttcatgccacgttttgtaagatttcttccagatggaggaaaggaagtgctgtccatgcaccagattctcctgtacttgttaaggtgcagcaaagccctggtgcctgaggaggagattgccaatatgcttcagtgggaggagctggagtggcagaaatatgcagaagaatgcaaaggcatgattgttaccaaccctgggacgaaaccaagctctgtccgtatcgatcaactggatcgtgaacagttcaaccccgatgtgattacttttccgattatcgtccactttgggatacgccctgcacagttgagttatgcaggagacccacagtaccaaaaactgtggaagagttatgtgaaacttcgccacctcctagcaaatagtcccaaagtcaaacaaactgacaaacagaagctggcacagagggaggaagccctccaaaaaatacggcagaagaatacaatgagacgagaagtaacggtggagctaagtagccaaggattctggaaaactggcatccgttctgatgtctgtcagcatgcaatgatgctacctgttctgacccatcatatccgctaccaccaatgcctaatgcatttggacaagttgataggatatactttccaagatcgttgtctgttgcagctggccatgactcatccaagtcatcatttaaattttggaatgaatcctgatcatgccaggaattcattatctaactgtggaattcggcagcccaaatacggagacagaaaagttcatcacatgcacatgcggaagaaagggattaacaccttgataaatatcatgtcacgccttggccaagatgacccaactccctcgaggattaaccacaatgagcggttggaattcctgggtgatgctgttgttgaatttctgaccagcgtccatttgtactatttgtttcctagtctggaagaaggaggattagcaacctatcggactgccattgttcagaatcagcaccttgccatgctagcaaagaaacttgaactggatcgatttatgctgtatgctcacgggcctgacctttgtagagaatcggaccttcgacatgcaatggccaattgttttgaagcgttaataggagctgtttacttggagggaagcctggaggaagccaagcagttatttggacgcttgctctttaatgatccggacctgcgcgaagtctggctcaattatcctctccacccactccaactacaagagccaaatactgatcgacaacttattgaaacttctccggttctacaaaaacttactgagtttgaagaagcaattggagtaatttttactcatgttcgacttctggcaagggcattcacattgagaactgtgggatttaaccatctgaccctaggccacaatcagagaatggaattcctaggtgactccataatgcaactggtagccacagagtacttattcattcatttcccagatcatcatgaaggacacttaactttgttgcgaagctctttggtgaataatagaactcaggccaaggtagcggaggagctgggcatgcaggagtacgccataaccaacgacaagaccaagaggcctgtggcgcttcgcaccaagaccttggcggaccttttggaatcatttattgcagcgctgtacattgataaggatttggaatatgttcatactttcatgaatgtctgcttctttccacgattgaaagagttcattttgaaccaggattggaatgaccccaaatcccagcttcagcagtgttgcttgacacttaggacagaaggaaaagagccagacattcctctgtacaagactctgcagacagtgggcccatcccatgcccgaacctacactgtggctgtttatttcaagggagaaagaataggctgtgggaaaggaccaagtattcagcaagcggaaatgggagcagcaatggatgcgcttgaaaaatataattttccccagatggcccatcagaagcggttcatcgaacggaagtacagacaagagttgaaagaaatgaggtgggaaagagagcatcaagagagagagccagatgagactgaagacatcaagaaataaaggagggcacgcaagtgtggagtatttacttgctcagtaactgtgactgttgtctattgagacctagcctagtcttcctgcagacaatgaatgaagtgtgctcattgaaataaaatacagagtcaaatcgctattgttgttttaatgatctgtttttagctggatggtctttattacaaagtattagatttttcttctatttaacggaaaacttgactttggtgaatgtgcattacttccttttattttgctctttaaataataaaattcaagaagcat

SEQ ID NO: 10949 - protein, 769 aa, Homo sapiens
MFAHAPLTNIPLCKVIRFNIDYTIHFIEEMMPENFCVKGLELFSLFLFRDILELYDWNLKGPLFEDSPPCCPRFHFMPRFVRFLPDGGKEVLSMHQILLYLLRCSKALVPEEEIANMLQWEELEWQKYAEECKGMIVTNPGTKPSSVRIDQLDREQFNPDVITFPIIVHFGIRPAQLSYAGDPQYQKLWKSYVKLRHLLANSPKVKQTDKQKLAQREEALQKIRQKNTMRREVTVELSSQGFWKTGIRSDVCQHAMMLPVLTHHIRYHQCLMHLDKLIGYTFQDRCLLQLAMTHPSHHLNFGMNPDHARNSLSNCGIRQPKYGDRKVHHMHMRKKGINTLINIMSRLGQDDPTPSRINHNERLEFLGDAVVEFLTSVHLYYLFPSLEEGGLATYRTAIVQNQHLAMLAKKLELDRFMLYAHGPDLCRESDLRHAMANCFEALIGAVYLEGSLEEAKQLFGRLLFNDPDLREVWLNYPLHPLQLQEPNTDRQLIETSPVLQKLTEFEEAIGVIFTHVRLLARAFTLRTVGFNHLTLGHNQRMEFLGDSIMQLVATEYLFIHFPDHHEGHLTLLRSSLVNNRTQAKVAEELGMQEYAITNDKTKRPVALRTKTLADLLESFIAALYIDKDLEYVHTFMNVCFFPRLKEFILNQDWNDPKSQLQQCCLTLRTEGKEPDIPLYKTLQTVGPSHARTYTVAVYFKGERIGCGKGPSIQQAEMGAAMDALEKYNFPQMAHQKRFIERKYRQELKEMRWEREHQEREPDETEDIKK

SEQ ID NO: 10950 - DNA, 2369 bp, Homo sapiens
  CDS (354)..(2087)
attgatcgctttctgcaaccattcagactgatctcgggctcctatttcatttacattgtgtgcacaccaagtaaccagtgggaaaactttagagggtacttaaaccccagaaaattctgaaaccgggctcttgagccgctatcctcgggcctgctcccaccctgtggagtgcactttcgttttcaataaatctctgcttttgttgcttcattctttccttgctttgtttgtgtgtttgtccagttctttgttcaacacgccaagaacctggacactcttcactggtaacatattttggcaagccaaccaggagaaaagaatttctgcttggacactgcatagctgctgggaaaatgaacatcagtgttgatttggaaacgaattatgccgagttggttctagatgtgggaagagtcactcttggagagaacagtaggaaaaaaatgaaggattgtaaactgagaaaaaagcagaatgaaagtgtctcacgagctatgtgtgctctgctcaattctggagggggagtgatcaaggctgaaattgagaatgaagactatagttatacaaaagatggaataggactagatttggaaaattcttttagtaacattctgttatttgttcctgagtacttagacttcatgcagaatggtaactactttctgatttttgtgaagtcatggagcttgaacacctctggtctgcggattaccaccttgagctccaatttgtacaaaagagatataacatctgcaaaagtcatgaatgccactgctgcactggagttcctcaaagacatgaaaaagactagagggagattgtatttaagaccagaattgctggcaaagaggccctgtgttgatatacaagaagaaaataacatgaaggccttggccggggttttttttgatagaacagaacttgatcggaaagaaaaattgacctttactgaatccacacatgttgaaattaaaaacttctcgacagaaaagttgttacaacgaattaaagagattctccctcaatatgtttctgcatttgcaaatactgatggaggatatttgttcattggtttaaatgaagataaagaaataattggctttaaagcagagatgagtgacctcgatgacttagaaagagaaatcgaaaagtccattaggaagatgcctgtgcatcacttctgtatggagaagaagaagataaattattcatgcaaattccttggggtatatgataaaggaagtctttgtggatatgtctgtgcactcagagtggagcgcttctgctgtgcagtgtttgctaaagagcctgattcctggcatgtgaaagataaccgtgtgatgcagttgaccaggaaggaatggatccagttcatggtggaggctgaaccaaaattttccagttcatatgaagaggtgatctctcaaataaatgcgtcattacctgctccccacagttggcctcttttggaatggcaacggcagagacatcactgtccagggctatcaggaaggataacgtatactccagaaaacctttgcagaaaactgttcttacaacatgaaggacttaagcaattaatatgtgaagaaatggactctgtcagaaagggctcactgatcttctctaggagctggtctgtggatctgggcttgcaagagaaccacaaagtcctctgtgatgctcttctgatttcccaggacagtcctccagtcctatacaccttccacatggtacaggatgaggagtttaaaggctattctacacaaactgccctaaccttaaagcagaagctggcaaaaattggtggttacactaaaaaagtgtgtgtcatgacaaagatcttctacttgagccctgaaggcatgacaagctgccagtatgatttaaggtcgcaagtaatttaccctgaatcctactattttacaagaaggaaatacttgctgaaagccctttttaaagccttaaagagactcaagtctctgagagaccagttttcctttgcagaaaatctataccagataatcggtatagattgctttcagaagaatgataaaaagatgtttaaatcttgtcgaaggctcacctgatggaaaatggactgggctactgagatatttttcattatatatttgataacattctctaattctgtgaaaatatttctttgaaaactttgcaagttaagcaacttgatgtgatgttggataattgggttttgtctattttcacttctccctaaataatcttcacagatattgtttgagggatattaggaaaattaatttgttaactcgtctgtgcacagtattatttactctgtctgtagttcctgaataaattttcttccatgcttgaaaaaaaaaaat

SEQ ID NO: 10951 - protein, 578 aa, Homo sapiens
MNISVDLETNYAELVLDVGRVTLGENSRKKMKDCKLRKKQNESVSRAMCALLNSGGGVIKAEIENEDYSYTKDGIGLDLENSFSNILLFVPEYLDFMQNGNYFLIFVKSWSLNTSGLRITTLSSNLYKRDITSAKVMNATAALEFLKDMKKTRGRLYLRPELLAKRPCVDIQEENNMKALAGVFFDRTELDRKEKLTFTESTHVEIKNFSTEKLLQRIKEILPQYVSAFANTDGGYLFIGLNEDKEIIGFKAEMSDLDDLEREIEKSIRKMPVHHFCMEKKKINYSCKFLGVYDKGSLCGYVCALRVERFCCAVFAKEPDSWHVKDNRVMQLTRKEWIQFMVEAEPKFSSSYEEVISQINASLPAPHSWPLLEWQRQRHHCPGLSGRITYTPENLCRKLFLQHEGLKQLICEEMDSVRKGSLIFSRSWSVDLGLQENHKVLCDALLISQDSPPVLYTFHMVQDEEFKGYSTQTALTLKQKLAKIGGYTKKVCVMTKIFYLSPEGMTSCQYDLRSQVIYPESYYFTRRKYLLKALFKALKRLKSLRDQFSFAENLYQIIGIDCFQKNDKKMFKSCRRLT

SEQ ID NO: 10952 - DNA, 3052 bp, Homo sapiens
  CDS (20)..(1801)
ggatgaaaacatccccagcatggagatgtgtgaccagagacacaatatcaccatgtgcccgctttgcgacaagacctgcagctactggaagatgagctcagcctgcgccacggcccgcgccagccacctcttcgacaaccccgccacggtcttcttctctgtcttcatggccctctgggctgccaccttcatggagcactggaagcggaaacagatgcgactcaactaccgctgggacctcacgggctttgaagaggaagaggaggctgtcaaggatcatcctagagctgaatacgaagccagagtcttggagaagtctctgaagaaagagtccagaaacaaagagactgacaaagtgaagctgacatggagagatcggttcccagcctacctcactaacttggtctccatcatcttcatgattgcagtgacgtttgccatcgtcctcggcgtcatcatctacaggatctccatggccgccgccttggccatgaactcctccccctccgtgcggtccaacatccgggtcacagtcacagccaccgcggtcatcatcaacctagtggtcatcatcctcctggacgaggtgtatggctgcatagcccgatggctcaccaagatcgaggtcccaaagacggagaaaagctttgaggagaggctgatcttcaaggctttcctgctgaagtttgtgaattcctacacccccatcttttacgtggcgttcttcaaaggccggtttgttggacgcccgggcgactacgtgtacattttccgttccttccgaatggaagagtgtgcgccagggggctgcctgatggagctatgcatccagctcagcatcatcatgctggggaaacagctgatccagaacaacctgttcgagatcggcatcccgaagatgaagaagctcatccgctacctgaagctgaagcagcagagcccccctgaccacgaggagtgtgtgaagaggaaacagcggtacgaggtggattacaacctggagcccttcgcgggcctcaccccagagtacatggaaatgatcatccagtttggcttcgtcaccctgtttgtcgcctccttccccctggccccactgtttgcgctgctgaacaacatcatcgagatccgcctggacgccaaaaagtttgtcactgagctccgaaggccggtagctgtcagagccaaagacatcggaatctggtacaatatcctcagaggcattgggaagcttgctgtcatcatcaatgccttcgtgatctccttcacgtctgacttcatcccgcgcctggtgtacctctacatgtacagtaagaacgggaccatgcacggcttcgtcaaccacaccctctcctccttcaacgtcagtgacttccagaacggcacggcccccaatgaccccctggacctgggctacgaggtgcagatctgcaggtataaagactaccgagagccgccgtggtcggaaaacaagtacgacatctccaaggacttctgggccgtcctggcagcccggctggcgtttgtcatcgtcttccagaacctggtcatgttcatgagcgactttgtggactgggtcatcccggacatccccaaggacatcagccagcagatccacaaggagaaggtgctcatggtggagctgttcatgcgggaggagcaagacaagcagcagctgctggaaacctggatggagaaggagcggcagaaggacgagccgccgtgcaaccaccacaacaccaaagcctgcccagacagcctcggcagcccagcccccagccatgcctaccacgggggcgtcctgtagctatgccagcggggctgggcaggccagccgggcatcctgaccgatgggcaccctctcccagggcaggcggcttcccgctcccaccagggcccggtgggtcctgggttttctgcaaacatggaggaccactttctgataggacattttcctttcttctttctgttttctttcccttgtttttgcacaaagccattatgcagggaatattttttaatctgtagtattcaagatgaatcaaaatgatggctggtaatacggcaataaggtagcaaaggcaggtgctttgcagaaagaatgcttggaaacttgagtctccctagaggtgaaaagtgagcagaggcccctagaaaccctcctctgaatcctcctaattccttaagatagatgcaaaatggtaagccgaggcatcgcgcaaaagctggtgcgatgcttcagggaaaatggaaaacccacgcaagaataatgattgattccggttccaaaaggtgtcacctacctgtttcagaaaagttagactttccatcgccttttccttccatcagttgagtggctgagagagaagtgcctcatccctgagccacacagggggcgtgggagcatcccagttatccctggaaagctagaaggggacagaggtgtccctgattaagcaggaaacagcacccttggcgtccccagcaggctccccactgtcagccacacacctgcccccatcacaccaagccgacctcagagttgttcatcttccttatgggacaaaaccggttgaccagaaaatgggcagagagagatgacctcggaagcatttccacagatggtgtcagggtttcaagaagtcttagggcttccaggggtcccctggaagctttagaatatttatgggtttttttttcaaatatcaattatatggtagattgaggattttttttctgtagctcaaaggtggagggagtttattagttaaccaaatatcgttgagaggaatttaaaatactgttactaccaaagatttttattaataaaggcttatattttggtaacacttctctatatttttactcacaggaatgtcactgttggacaattattttaaaagtgtataaaaccaagtctcataaatgatatgagtgatctaaatttgcagcaatgatactaaacaactctctgaaatttctcaagcaccaagagaaacatcattttagcaaaggccaggaggaaaaatagaaataaatttgtcttgaagatctc

SEQ ID NO: 10953 - protein, 594 aa, Homo sapiens
MEMCDQRHNITMCPLCDKTCSYWKMSSACATARASHLFDNPATVFFSVFMALWAATFMEHWKRKQMRLNYRWDLTGFEEEEEAVKDHPRAEYEARVLEKSLKKESRNKETDKVKLTWRDRFPAYLTNLVSIIFMIAVTFAIVLGVIIYRISMAAALAMNSSPSVRSNIRVTVTATAVIINLVVIILLDEVYGCIARWLTKIEVPKTEKSFEERLIFKAFLLKFVNSYTPIFYVAFFKGRFVGRPGDYVYIFRSFRMEECAPGGCLMELCIQLSIIMLGKQLIQNNLFEIGIPKMKKLIRYLKLKQQSPPDHEECVKRKQRYEVDYNLEPFAGLTPEYMEMIIQFGFVTLFVASFPLAPLFALLNNIIEIRLDAKKFVTELRRPVAVRAKDIGIWYNILRGIGKLAVIINAFVISFTSDFIPRLVYLYMYSKNGTMHGFVNHTLSSFNVSDFQNGTAPNDPLDLGYEVQICRYKDYREPPWSENKYDISKDFWAVLAARLAFVIVFQNLVMFMSDFVDWVIPDIPKDISQQIHKEKVLMVELFMREEQDKQQLLETWMEKERQKDEPPCNHHNTKACPDSLGSPAPSHAYHGGVL

SEQ ID NO: 10954 - DNA, 1741 bp, Homo sapiens
  CDS (100)..(645)
ggatatctgtatgcagttggtgggcgaaatgcagcaggtgaactgcccacagtagaatgttacaatccaagaacaaatgaatggacctatgttgccaaaatgagtgagccccactatggccatgctggaactgtgtatggaggagtgatgtatatttcaggaggaattactcatgatactttccaaaaggagctcatgtgctttgaccctgatactgacaaatggatccagaaggcgccaatgaccactgtcagaggtctgcattgcatgtgtacagtgggagaaaggctctatgtcattggtggcaatcacttcagaggaacaagtgattatgatgatgtcctaagctgtgaatactattcacctatccttgaccagtggaccccaattgctgccatgttaagagggcagagtgatgttggggtcgctgtcttcgaaaataaaatctatgtggttggggggtattcttggaataatcgttgtatggtagagatagtgcagaaatatgatccagataaagatgaatggcatagggtttttgatctgccagaatcccttggtggcattcgtgcttgcacactcacagtttttccaccagaagaaaccacaccatcaccttctagagagtcccctctttctgcaccttaagatcatctctacaactaagatgctgtagttctatctttgcaatgtgtcataaattctcttctttttcccccttaagtagtatatatgttaggattaccctctggtaattgatacagatattggaaaaaagacaacattgatgttatttgtgctctttgtttggcctagaatgtttataaagtggtaacacaaccattctggaaatgtatcccatagaagctgatgtttaacatatgaaaaaaaagtattgtctataaaatgtttcttcagtactttttaaatgctgtgtattgggtgtaaggtatttgtcatcttacattagtaaacccaataagccaagttgaaggtggattatagtaaatgtacaactgtgctcactaggcttcaagtaaaaagttttcctttcatctttgactgtaagatgtcaaagggaggcagcctgcttgaacaggaaacaatacacaaaaggttgccaactcgcatgagctacctccctcttttcataaagtatttttgacatatctgtcaacccacttgactgtgtgggtgcattgagaacacaaagtttcctagacacacaggagaagtagcttaaattcactaatattaatttaaaaagcagcatgaaccctctacttataaacaagggtttggtgtttttaaagtgtgtatacatacatacacatacacacatgcacatatgtcaaatataatttttttaaaaattgagtggcacatcaaagaaatgtgaaattaaaaagaattcttccaaaaagcagcttccattaaaatgggaattcagtatgcacatactgaatgcatatatgtagaaccatacagaatttaggtggataagggctagaaattttgagcaacaaaatttgtcacttgaccagattttatcttcaaaaactgtattctactccttctcctttgctgttgaggtaacttgcatattatatgtattctgtatactcagttcataaggttatttagcacaaagtatagcagcttcacctggagagctgcttttgctcagtaaattcaacttccatgttttatctttttttgttcaataaaaacatttaatgtc

SEQ ID NO: 10955 - protein, 182 aa, Homo sapiens [sequence omitted]

SEQ ID NO: 10956 - DNA, 2486 bp, Homo sapiens
tgacttcctattggtttggtgaaccaagtcacaatctttgttgggtttaggtgataggttgtaatgactgagtcactcagtactgggctgtcttgtgtgtcactgccattctgtgtgctcatggtggttggctggtgaggcccagctgagggcagggttggtcggccaggactggaaacaaagagagaatggtggtgttggggtgtacatggcttgcctcggtagtggtccacttttgaattaggccaggatactttctatttgtttgttcacttggtttgagggaaattaagatttactgtgtttttagatattcttcttagtctagtgccatgaaatcaaacagatctgggttcaaactgtggccctgccatgtactagtttatgtgatcttggacaggttattcacactcgcagattgttttttcgtaatcaaatggccacaggaatggcaaaatatcagagaatatgtcgaaatggaaggaaatcctgggattatctgatctgtagactcttcctattaaattaaacattaaatgcctgaaatgttataagacgttattaaatatctgaaacgaaatctcagtatgaaaagcagatatgttaggtggatgcctcagttgaattcagtcttcttattgggtaagattagtctttgttcacagaactactttaccaccttcactgagtcccatggttcactgcagctcggaatgaaatctcctgatttttcttcatgtataaggaaactgaggtcctgtatgccaagccactttccccaaaggtcaaataggaagatagtggcagtggcagattggagtcagtaccatgttcctcatacaacaccacaaagaagtcaacttggttagcaaccaaaactccgactgcatttttttcttagattccattgtgccaatgcataacctttgtattctttcaatttttaaatggcactctagaagaaaaaaagatatctgggaaagtttgctgttaagaatattttctccttcaagattcctcatttcaagttctaccatagactcagttcatcacctgtcaaaaaaatgacatgaaatctcaacattctccctaaaatacagagacctgtgacatcataatcctgaagcctgagagactaagtaggaagctgaaccatatgacataaactgtaaggaccagagtagaggaggggaagtgaagaggaaaagaggaaaggacatccacatctctttggacctttggaccgatcagtctaaaccttatttttgtcgttgttgttttttggtacatgtcctggttgtttgttccctttgttcagttcattttgccaagtgtttacagaacacccatgctgtgctagtatcggttatcacctctgaacaaatagaataatgtttggagtgtgacttacaccttgaagtccacttccttttagagatactatctcatattctgtaaatttaagctaggaataacctcacaccagttactcggtgtttgaatctggagaaggaatagaaggcattatctgctgggaacgcttcaatattgaaatgttctttcccgaagctacttctttttccctctcaagtcacatattactgacccacagcaaaacccgagattccaacagacaatccaatctgaagcaaagtttcttattcagatgttggacaggtactaattcagcacctacttgtgtgagatactcttccaggttttggcatagagtggtgaccaggaaagatcaagacccaagcactctgtggtgcttccatgctcatggggggaagagaaaataataagtaaatccattagaaagattatgatttcaactagtcataaatatgatgaaggaaatatacatggaaatgtaatattaatcaaggcatgggtattgcatattatgattgatcaggaatcagtttctcctaggaggtgacatttaaactcagacctttaggagatctcaactctcagtatcctcagagtcaagttgagggaccttataagactccaacagaaggaaccacacagtttcatgctgcaagggcaaggctactctatttttaattgatggctagacttcattaagactgaaatgaataacagtgaggaaaggcggggcagctactagagacagaagagtcattgtgatttagttgtttggtgaattgctcatactttcaagggtcatcggtagcataactgcaccttggtgcttggagaaagcagagcgcagcagctgggccagcccaggactctctgtgcctggagctcctggtaatggacctgccagcgtgtgaactgacgtgcccagcgctcccacggtgggaagctgtttactctctcccgggaggacacagggttagacatagttgaatctataatcattatcaaccagatcaacacgttctaactgacttgcttgtgtcgtttttttccccaacagtagttcaatggcctgtgaatgttttgcttccagt

SEQ ID NO: 10957 - DNA, 2114 bp, Homo sapiens
aacaacttccgctcgggaagtttgtaaaagtctggtctaccggcgcggcgtagtggatgcagcatcctagtggaggacgcccctgtgatctgccctccttggcactgtgcttccccagaggggtggcctcgctgttcccatggacatggcccaggagccagtgaccttcagggacgtggccatctacttctcaagggaggagtgggcgtgtctggaacccagccagagggccctctaccgggacgtgatgctggacaacttcagcagtgtggctgctctgggtgagcacgggctgagcgcagcgtgagcacagggattttgcagccccagaccagacctcgtctctcgcctggaacagtgggaggagccgtgggttgaagaccgggagagacctgagttccaggcagtgcagaggggaccccggccaggggcaaggaagtctgcagaccccaagagaccttgtgatcatccagcttgggctcacaagaaaacccacgtgcggcgagaaagagccagggaaggaagcagctttaggaagggcttcaggctggacacggatgacgggcagcttcccagagctgctccagaaaggacagacgccaagcccacggctttcccgtgtcaggtgctcacgcagcgttgtgggcggcggccgggccgcagagagcgccggaagcagcgcgcagtagagctgtcgttcatctgcggcacgtgcgggaaggcgctcagctgccacagccggctgctcgctcaccagacggtgcacacgggaaccaaggccttcgagtgccccgagtgcggccagaccttccggtgggcttcaaacctgcagcgccaccagaagaaccacacgcgcgagaagcccttctgctgcgaggcctgcgggcaggcgttcagcctgaaggaccgcctggctcagcaccgcaaggtccacaccgagcacaggccctactcgtgtggcgactgtgggaaagccttcaagcagaagtccaaccttctcagacaccagctggtgcacaccggggagcggccgttctactgcgcggactgcggcaaagccttccggaccaaggagaacctcagccaccaccagagggtccacagcggggagaagccctacacctgtgccgagtgcggcaagtccttccggtggcccaagggcttcagcatccaccggaggctgcacctgacgaagaggttctacgagtgcggccactgtgggaaaggcttccgtcacctggggttcttcacgcggcatcagaggactcacaggcacggggaggtgtaggggcgcccgaagagtggggtgctgcgcctctgcgggagtactgggtcctgaggaagagctgcagtgagaagttgctcttcagcctggaaaatcaacctgaattcagagaagccttcttagtcctcagagctccccagtcacccgagaagtttactgggaaaactgccaggtgggagaagcagagccatgggtacgccggagatggcgggggctctggagatggcgggggctgcgccccggcgccgggcatcctggggatgtgctgagagtgtgcgcgaccccggagccacgtgccaggccgggctcagaggcggagaagcctgcctggtgcccacagccgtctggctcagggactccaccctggccccgagttgccgtctgctgggcctttccttcctggctctgcaccccatgctggctgcccggtctggcttcccttcttgtctctgtcttgggcgaggcagctgtgagcattgcacagaggcaaagaccctcctgcagcctctgcgctgggccgtagaaacaagagcctttgtaataccgaacctcattcaaggattaggagtggtggttaggtcagggccacccccagtgctgcaggaacggcctccacccagctctgttggtcagagcctgggtcatgcacctggagttgggagatcaagttgggtctcagggcagtgaggtggccatatccaccacatcgcatttcgtgggggaagaggtgacctctttgttttaaacttaaggtgtctgcttatccagccagaaataaaaatctgccagtggtgttcccaagggaagacccccgtgggaatgggtcggg

SEQ ID NO: 10958 - DNA, 2603 bp, Homo sapiens
ataaagaatggggggcggggggtattggaaaggctgatcaataaggctgggcttcatgtcaaacatgtcaatgtatgcttaggccagtttcaaatgtttggtggcattttgttcacaaaaggatagagtgtgtgcatcatatttgttttttttgttttttcacaaaattgagttaaatccagtgcttttgttattggctattcttcatgtagctttctttagggtggttgtttacaaagacttcggcatggtttcacagagactcattccagtggaatccagttagatggtcctaatgctttcgttccagctatgacatgtgttttgattcacagtatgcttggatggactgtgtggatgcttcattcctatggaagacataattcagaacagaaaacttgtaacagcagcatcttgcctgcaaaattatttaagaaaaaaaaaaaaagactttctggttaataccaaaatctttaactgtcctttagataggtactgtttcaagtaattaacccactgtgattctcaacaatgggtccataatagccttacctgaacattaactcctcctatttgcccccattactcccagagattccggtatttttttagtggggctttggtggtggtgtgcgtgtatgtatgtatgtgtatatgttatgtatacacatgcacatatgtgccttgggtgtatgtaactatgtatgtatatacacacatatttttaaacataaatttttataatattcattttaaacaaaagtatacagatatataatcttaagcaccacaggtgagtttgaagtccagccattgttgggaaccatggaatcaaacacaattttttaaaagcactttgctttcatgacaaataatacacttaaggataggaagagaaggagatgctcacagatacaaagacgttaaaaaaaaaaatgcccatgttcatgaaggggcttgcgtacaaccaattgctctcttatttcacgggctcttttgattttacataaagttcagtgctataaaactctgtaaaatttcattatgtttttaaagtcagaggcagggaaaaagtcacctccaggtgtttagaaaactaaaaaagactgccatttcactgggctaagtttgaagccccgcagatgcaagtgccttgtattcatgagtccacaaataaggaggtgttaatgatcaaggtagtggttgagtggatcctggtaaatacagcttcaattggagatggactcaagcagttcagcatatacagcagacacacaagctgatgataaccacttactatgtgctaggtactgttctgatgctttgcttacatcacctcatgacatctcgacaacaaggtaggtattattatccctgctttatcaatgagaatttcagtcacagacccttgactacatttgctcagctagtaggcagggactggaactcaaatccgtgtgacttcaaagccacgcagcaaccaccacaccagtcatatgctctgccctgtggattgggccatattgaaacaataaagaccatcgagctgatggatttcgaaccacttcagagaaatatgtaaaaggcttacatgcaaaaatatgttcagaagacaagccaaaaggccaagtattcttgtaaatgtggcagtgatgactgaagactttattaaaaatatattaagcgtgtagatagagagtgaactgctcataaatctaggtggttttgtttacttctatttttctgtatgtttgagatatttcattgctgattatttttgggcaacgggacatggaagaaagttgataagctcttctgaattatgacttattcaggtagttttgcataaaccagagggcagataattgctgatatgacctcaacaaagagataaggtggagaaaggaatgtttgctaattatctacaaaggaaagagaaaggtgagaaataataagttacctgattctctgtgttctgtgcttacttgttcctccaaagcattctccccagcatgtctcttccagcttaataactgaaaacacttagtcaacaacaatacactctagtggaaaagagatcctgttagttttctagacgatgcctgttgtgggtatattgtttccaaaattatattagtgctcatgagctggaatcgctgcactttacacactcaaaattatgagaccatttgtccccggtggtagctcagtttttggagtgaacctcaaaagcaatccttggctaacagaagattcttccagattctagcaatgtttgttcaaagtggggcatagctggccaggtgtagtggctcacacctgtaatctcagcactttgggaggctgaagcaggcagatcacctgaggttaagagttcaagaccagcctggccaacatggtgaaaccctgtctctagtaaaaatacaaaaaattagctaggcgtggtggcacacgcctgtaatcacagctacttgggaggctgaggcatgagaattgcttgaacccaggaggcggaggttgcagtgggccgagattgcaccacttcactccagcctgggtgacagagtgagactccatctcaaaacaaacaaaaaacaaaaagc

SEQ ID NO: 10959 - DNA, 1244 bp, Homo sapiens
tgaaaatgcctttcccttagaattctcattctctccttcagttactcacatccaaaaattatttaaggcctaaaccaagtccaatcatcttcaagcagctttcttccactcccacccaccatagagatagatctctctttcccttaccttcctgtagcactttgttatctatacctctcatgtgcacttaccccagctccaattctggatgtcttgttctcctagtgagattgtgagctcttcaaggtaaggatcatgtctttgtgcttccttcttttgtgactctgaagtgcataacatggtgatgtgccttgggaattttcaataaatattcatgggaaaaatgaacatatcaatgtattaagctcaataaagtccgttttcctaaaaacagtccttcattgctgaagtgtgaaagcatgtaaactataatctactggatttggtatttttattattcttttttactaatatatacattctaacactttttgaccactgcttagagaaaatagaaggcatgcttatcaaatttcagatggcacgaattagaagtaataagtaatgcacgagataacagaatcaaaaactagacaaattagaaataagtaaataacatttaacagggataactacaaaattagattttaaaagaacaggtacccaatttcagtatggaaagacatggctaacatcaggttttaattggctgctagactgacatgagcccagagtggtacacagaaccctgttcatagttagactcagggcactgagtggtaggtgaaatattcaggctccaacaaggcacaggcatgaatgaagattgctagatggtggccagctagagacagatggagcctcaatgtctggtaaagtctgcagtaaagagcagaatgaagtcctatactttatttaacccgggagctaaacaaataaacaatatataataagaataaataggctgggtgcagtggctcatgcctgtaatcccagcacgttgggaggccgaggcaggcggatcacctcagttgaggagtttgagactagcctgaccaacatggagaaactccgtctctactaaaaatacaaaattagccaggcgtggtggcacatgcctataatcccagctactcgggaggccgaggcaggagaatcacttgaaccccggttgcagaggttgcagtgagctgagatcgcgccattgcactccagcctgggaaacaagagcgaaactccatctc

SEQ ID NO: 10960 - DNA, 1672 bp, Homo sapiens
  CDS (17)..(1303)
aaaggcgcgcgggaacatggggctgtatgctgcagctgcaggcgtgttggccggcgtggagagccgccagggctctatcaaggggttggtgtactccagcaacttccagaacgtgaagcagctgtacgcgctggtgtgcgaaacgcagcgctactccgccgtgctggatgctgtgatcgccagcgccggcctcctccgtgcggagaagaagctgcggccgcacctggccaaggtgctagtgtatgagttgttgttgggaaagggctttcgagggggtgggggccgatggaaggctctgttgggccggcaccaggcgaggctcaaggctgagttggctcggctcaaggttcatcggggtgtgagccggaatgaggacctgttggaagtgggatccaggcctggtccagcctcccagctgcctcgatttgtgcgtgtgaacactctcaagacctgctccgatgatgtagttgattatttcaagagacaaggtttctcctatcagggtcgggcttccagcctcgatgacttacgagccctcaaggggaagcattttctcctggaccccttgatgccggagctgctggtgtttcccgcccagacagatctgcatgaacacccactgtaccgggccggacacctcattctgcaggacagggccagctgtctcccagccatgctgctggaccccccgccaggctcccatgtcatcgatgcctgtgccgccccaggcaataagaccagtcacttggctgctcttctgaagaaccaagggaagatctttgcctttgacctggatgccaagcggctggcatccatggccacgctgctggcccgggctggcgtctcttgctgtgaactggctgaggaggacttcctggcggtctccccctcggatccacgctaccatgaggtccactacatcctgctggatccttcctgcagtggctcgggtatgccgagcagacagctggaggagcccggggcaggcacacctagcccggtgcgtctgcatgccctggcagggttccagcagcgagccctgtgccacgcactcactttcccttccctgcagcggctcgtctactccacgtgctccctctgccaggaggagaatgaagacgtggtgcgagatgcgctgcagcagaacccgggcgccttcaggctagctcccgccctgcctgcctggccccaccgaggcctgagcacgttcccgggtgccgagcactgcctccgggcctcccctgagaccacactcagcagtggcttcttcgttgctgtaattgaacgggtcgaggtgccaaggtgagtgagtgggggcgtgcttgggaggcgcaggatggcaccggcacatctaacatctacacttctctagctcagcctcacaggccaaagcatcagcaccagaacgcacacccagcccagccccaaagagaaagaagagacagcaaagagccgcagccggtgcttgcacaccgccttgcacatagcagaggctccgggctgactccttcctggtgggaaaggaagatgcctgtcctctccgtggaggaccctgggccctcaccgcaggaagcagtttgggttttgaaaggttattgggtcccttccttgggctgtgttcttgctggtgagcaaagtgttgcctgcaaaaataaaatgcagaacgtactct

SEQ ID NO: 10961 - protein, 429 aa, Homo sapiens
MGLYAAAAGVLAGVESRQGSIKGLVYSSNFQNVKQLYALVCETQRYSAVLDAVIASAGLLRAEKKLRPHLAKVLVYELLLGKGFRGGGGRWKALLGRHQARLKAELARLKVHRGVSRNEDLLEVGSRPGPASQLPRFVRVNTLKTCSDDVVDYFKRQGFSYQGRASSLDDLRALKGKHFLLDPLMPELLVFPAQTDLHEHPLYRAGHLILQDRASCLPAMLLDPPPGSHVIDACAAPGNKTSHLAALLKNQGKIFAFDLDAKRLASMATLLARAGVSCCELAEEDFLAVSPSDPRYHEVHYILLDPSCSGSGMPSRQLEEPGAGTPSPVRLHALAGFQQRALCHALTFPSLQRLVYSTCSLCQEENEDVVRDALQQNPGAFRLAPALPAWPHRGLSTFPGAEHCLRASPETTLSSGFFVAVIERVEVPR

SEQ ID NO: 10962 - DNA, 2390 bp, Homo sapiens
  CDS (26)..(232)
ggccttttttttttttttttttgagatggagtctctgtcactcaggctggagtgcaatggcgcgatctcagctcaccacaatctccgcctcctgggttcaagcaattctccggcctcagcctcccgagtagctgggattacaggcgcatgccaccacacccagctaatttttgtttttcgagtagagatggggtttcaccatgttggccaggctggtcttgaactcctgatgtaatccacccacctcggcctcccaaagtgcagggattataggcgtgagccactgcgtccggctcaagtgaatgttcttaatgggatcatgggatctagaatggtgaatccttttcagaaggtggactttgcccagatccatcaaaggaatcactatttatggcagtgttgccttatgaaatgtgtttcttaggtaataacacttgaaagtctgaattactcctggatacatggactgcagaatggatgttgtggtagcaggcatgaaaacaacattaatcttgtacatctccatcagagcttttggatgactaggtgccttgtcaatgagcagtaatattttgagaagaatcttttttttgcaagcagtaggtctcaatggtgggcttaaaaatattcagtaaactatgctgtaaacagatgtgctgtcatccaagctttgttccatttatagagcacaggtagaatacagttagcatgattcctaaggcctgtaggattttcagaatagtaaataagcattggcttcaatttaaaaagttactagctgcatttgtctctaacaagggtcagcctgtcctgtggagctttgaagccagccattgacttctctctagctatagaagtcctagatggcatctttttccaacataaggctgttttgtctatagtagccaccttcatcaaggtgggctaggtcttctagatgacttgctgcagcttctccgtcagcacttgctgcttgcttcatcttgcacatttatgttatggaggtggctactttccttaaaccttgttaaccagtctctgccagcttctaacttttctctgtagcttcctcgcctctctcagccctgttgaattgaagagagttagggtcttgctctggattaggttttggtttaagggaatattgtggctggtttgatcttctgtctagaccactcaaacttctttctttcccttttttttttttttgagacaaggtttcgctctgtcacccagcatggaatgcagtggcatgattatggcttactgtagcctcagcctcccaacctcaagcagtccccccacctcaacccccccaggttgctgggattgcaggcatatgccaccatccctggctaatttttattttattttttgtagagacaggatcagcgtatgttgaccatgctggtctcgaattcctggcctcaagcagttgtcccgccttggcctcccaaagcactaggtttacaggcatgagccactacaccctgccaaaactttctctatatcagcaataggctgtttcactttattttatttatttatttttacattttactttaagttctgggatacatgtgcagaacgtgcagatttgttatataggtatacatgtgccattgatggtttgctgcacctatcgacctgtcatctaggttttaagccccacatgcattaggtatttgtcctaatgctctccctttccttgctccccacctcctgacaggcccctttgtgtgatgttcccctccctgtgtccatatgttctcattgttcaactcccacttttgagtgagaacatgcagtgtttggttttctgttcctgtgttagtttgctgagaatgatggcttccagcttcatccatgtccctgcaaaggacatgaactcactcttttttatggctgcaggctgtttcactttatcactcgtgttcactggagtagcacttttaatttctttcaagaacttttccttcgctttaacaatgtggctgtttggcacaagaggcccagctttcagcccctcttggcttttgacatgctttcttcactaggcttaatcatttttagcttttgattgaaagcgagggacatgtgactcctcctttcacttgagcacttagaggccattgtgggattattaattggcctaatttcttttttttttgaaacagagtctcgctctgttgcccaggttggagtgtagtggcacgatctcggctcactgcaacctccgcctccgaggttcaagcgatcctcctgtcttaatcccagctactcaggaggctgaggcaggagaatcgcttgatgaaaccaagaggcggatgttgcagtgagctgagatcacgccattgcgctccagcctgggtagcgagtaaaactgtctc

SEQ ID NO: 10963 - protein, 69 aa, Homo sapiens
MESLSLRLECNGAISAHHNLRLLGSSNSPASASRVAGITGACHHTQLIFVFRVEMGFHHVGQAGLELLM

SEQ ID NO: 10964 - DNA, 1487 bp, Homo sapiens
  CDS (299)..(949)
agttggtcggtgggccagtggcccgtcgctcgcttctgggctctcatgtttgaaggtgggagggacacgggagcggcccgcacaccttattgacagccacccctcaggacatggaaaaggagctaggaattaagcacccactccacaggaagaagcttgttttagcagtgaaagccatcaacaccaaacaggaggagaagtctgcactgctagaccacatttgggtgacaaggaggcttgatgatattggctaccccagtacaaagaccagtttcatgaatctagagttgacggacgaatgctgcaatacctaactgtgaacgatttactcttcttaaaagtcaccagccaactacatcatctcagcatcaaatgtgccattcacgtgctgcatgtcaacaagttcaacccccactgcctgcaccggcggccagctgatgagagtaacctttctccttcagaagttgtacagtggtccaaccacagggtgatggagtggttacgatctgtggacctggcagagtatgcacccaatcttcgagggagtggagtccatggaggcctcattatcctggagccacgcttcactggggacaccctggctatgcttctcaacatccccccacaaaagacgctcctcaggcgccacctgaccaccaagttcaatgccttgattggtccggaggctgaacaggaaaagcgagagaaaatggcctcaccagcttacacaccactgaccaccacagccaaagtccggccaaggaaactaggattttcacacttcggaaacataagaaaaaagaagttcgatgaatcgacggactacatttgcccaatggagcccagtgacggtgtcagtgatagtcacagggtctacagtggctaccggggcctcagcccccttgatgcccctgaactggatgggctggaccaggtgggacagattagctgattcccttgtcacctgccctctgtgcaccctgagagctcacagtaacactgtgtgtgtcaccatataactgcacctcacccccgcacgtgtgcatgactcgcagagaatattccagcaattgtgtacccctgggccagtctctttgaaccctgagggtggccaggatctggagctgcatctctaaggggccaggctttggggaccattgccaaaggtggactcaggaggaaagacacttaaagacacttttacatgtctagtaattcttgatgttcatcttcagcaccagtggaaacacatgaacttcgatgcaggtccagagaccatggacactcccacgaggctcagctctcaggcaccccctacacttcagttgagggaaaagctcaagtgccttaggcccgtggaccacagtcttggctgagatcaaagggatgagcaacagggacttctgccacagtgacaatggaattgtgttgtgccttacttcagaggtggtctcttctttcttgtaataaaagcaatatttatgcgg

SEQ ID NO: 10965 - protein, 217 aa, Homo sapiens
MLQYLTVNDLLFLKVTSQLHHLSIKCAIHVLHVNKFNPHCLHRRPADESNLSPSEVVQWSNHRVMEWLRSVDLAEYAPNLRGSGVHGGLIILEPRFTGDTLAMLLNIPPQKTLLRRHLTTKFNALIGPEAEQEKREKMASPAYTPLTTTAKVRPRKLGFSHFGNIRKKKFDESTDYICPMEPSDGVSDSHRVYSGYRGLSPLDAPELDGLDQVGQIS

SEQ ID NO: 10966 - DNA, 1404 bp, Homo sapiens
tgatgatgattgtcttaacatgtatttctaatcactttaaaacctcactgtgatagatttgcttgttctttgtacttttgtggtacaatctaatagatttttttctttgaggtttactctatttttagatattaaaagtattttaaactgaaatgatgactcatacgtggatataagaaaataaaaagcagctctgtttcctacattttttactgctttttactctcccaatttttatgtcttttcatcaattctgcaatagacagagattaatagtagcacttgcagttttcgctgagacatatccagttcactgaagacccactttagtgttttgggaggaaaaaacaagtcttttctgaaataatgagttcaagattgatttgaggtttaggaagacttttagcaaactcaatcgctcaggagctgattctcagcttatcagtaatcacatcctttcctattcccttctgcagacaatatctgactattttcaggcttgttagaagggagagtaagaggaagtttagttctagatcatctatttttttttccctgtaagtaagttgctttgatataagatttggtggtggtaatcagttgcttaaatgatatcctaaaataatctccagctcatttaataactgccttcactaaatttttattaatggttttgttttagttttaagctcttttaagtctttttcaggccttctttaactccgtcctgacaagtgtggttttgaatactgatttctgtctttgacttgacttttagtatatttaagtggtgtgagttttggataagtttccttttaaaatgatcccacaaaatatagagagaagcaattctcctgcctcagcctcctaaggagctattttttgtattttagtagagacagggtttcaccgtgttggtcaggctggtctcgaactcctgacctcaagtgatccacccgccttggcctcccaaagtgctgggattacaggtgtgagccaccgtgcccagctagattctttactttttaataaagttcaaaatagcttttaataaggttgtcaaatttgaccaaaatttcatagaagtccaaaatattatgcctctttctgtagatcaaatgaaatatggcccaatttacaagggtatacaccttcatggtagatgaatatagattttaaactagttttaaaaggaatatgaatgatttaattgtagtttctgctgccaaaaagtctccataattattttttaataacttataactaccttgatctttacctgtacacacacacacacacacatgcacagagtaatttcacttagaatcctggtcaaaaattttcttccacttaaattttttttaagactctcacaaatatacatcatggttttctttagtcggc

SEQ ID NO: 10967 - DNA, 2492 bp, Homo sapiens
tattagatggggataagtaaagattatgataacttcatgtcatttcaggtcagattttgcttccaaatgatttgcacacacttaggaaaaaaatttctgttttcagaacgttttggatttcagaattgcagataaaggattgtggacccataattttctcctgttttgcactggcggtagtttaacttgtggaccatcaaaaaaatatgtttgagagaggacccttatcacctcttttgtttaaaaagcaaaataaactttgtttccaccaaaatgcctgcctccccgacatttaggggctgctgtggcaccattcctgtgtgtgtccccttggtagcttagttccaagcttgacagttctcaggggtggggagttctctctgctctcccttaccctcacccccaccagtctcttcagctgcatcccgtttctcctcttctaagggatctggagagttgctggcttccatcatcttccgtgtgaggaccgtcacagcttgcactgctcagcaggcagcttttctggacaccacactctccccaagcctttgtttcttgattttgggagcattcgccatggaaaccattttggctcatcttatcccattcccaggtggtctccaaggctttgcccacacagtgccacaatgaaaaatgcagcctggctcaccggtttgcttttcacgttttcatcgcttatttggctcatggcacaatcccacggaatcctctgcagagggtggtgttgcgccattccctctgacccaagtgttggctctcactctgctcagtgtgagacacacctttcacacccacagtgatgcctcactgcatccaaagccattctgagattagcacagtctcaggccagatggtttgaccaattccaattcctgctcccacgttggctcctttaggcctcgtatgttccatttagctgttgtttctccggtatatgaagtacatcaagcagtgagtatcttcagcaactgtctataccagtaagtatctggctgtcggtggtggtggctgtagtttggcagtactaccagcttctcccagcacctggcttatcagaatacaggattcatgccatgtggctcttacttgggccaagagtcttcagtcagcccagtgacttaagttgccaaggaaactgtgtctagtgagacctcaagatttacaactcattcctaggctacaaggttttctccagaatttttgctgacacagtttattcccataacctcccagccctgtggggtgtataaatctttgagcttctctggagaattcactttactgcatgcaaggcctagaatagggatcaaaagaagtttggcttcaggggcctcatgaacttggaaattgtatgcactattttgtgtggatgtatgtatgggcattttttttatgggaagaggcttgcactgggtgctcagcagcatattctgaaacagtgtagacttgggaaatctatttagtcttctgagcctctggaaagtgaggataatactagattctgtcccattcatttgtaatgaggataaaatgagaagtgcatataaactgtctagtacagtgtccataaatattcataaatgttagctatcatttgactgtgagcctcaaagggttaagatgatgtgactgcctttcgttccttaggattaggtggcagatatagaatttgaaatcattttctttatgctgcacagaaaatcttcacagtactgcctggtgtgatctccttagcatccttgttggtgggtgggaaagagtgcatgactatcctcttttacaggtgaggaaactgaggctcaccatgatcacctagctaataaggctccaaaaaaataggtcctgctcacaatctggtgggacaaacagatcctaagacaagcaattacagaccacgatgagcaccatcacccttgaagtacaggatgttaaagcatctacgaaggtcagggcaggcttcctggggtgacaatccgatccctgaaatgtgggtaggaataggttaggcaaacgaatggactttgagagagtgttgcatgtagaaggaacagcatgtgctgatgcctcgagggagggagcgctcatggttcgggtgcctcgcagcaagagggagtgggagatgaggccagggggaagtttcttttaacccctaaaaaaaaggagatgaatgtgcaaagaaaaaggaaaggaaggccgggtgcggtggctcatgcctgtaatcccagcactttgggaggctgaggtggatggatcacatgaggtcaggagttcgagaccagcctggtcaacctggtgaaactccgtctctactaaaaatacaaaaattagccaggcttggtggcaggtacctgtagtcccagctgctagggaggctgaggcaggagaatcgcttgagcctgggaggtggaggttgtggtgagccaagatcgtgccactgcactccagcctgggcgacagagcaagactgtctt

SEQ ID NO: 10968 - DNA, 2339 bp, Homo sapiens
ttaatatgttttattcatttgtggacactaaaatagctcaggaaagtgaaaatgtcttagacatacgcaagtcacatgaccatttaaatgtgcaaatgtaagaagattcaatgtgtttacatcaaatgacatattttattgatttattgcagattcagtgcatatgagccaaattgttgagtgtgtaagagctatattgtgtattttattaaattaatatatagttgtgttgcaaaaatatttgggcttatattgtaaatggcaagtgttgccttggtagctgtcgaactctatgagttttgttttttcctgcttccttttccccatggagtgtgggaagcagtgcctcagagcaaagtctcttgtttaatgtatagtctaccaagtactacagtacataatctgttcaaaatgtgtttgagtgagctgatggagctaactgaaaggtcaaaaattacatccatcagccatggttatgtgcaagtccttgtagaagcttttattaaagtcatgctaaatcacaagaattgacatttgtaccaatatctgaaacttcttcatgttttttcaataacatacagcttctgcttgtgtagatattatgccatcagtcggttctcaaaagtattttaagtgcttcagatgtgtgttcccattatattttgaaaacatgaaaaatgctttaatgcatgtatgtaccagcagtggttacttgcattgtgtagtgtttttcaagaggtctgggtcttaacaaaatgttttcctttatctcagtgctcttctgcctctttttgttggtgtcctttgagaacaatacaccttctattccttcatttggttacacctttccttgtgacatttagcgagtttcaaacttacttccatatgaggctaagaaacctcaaatttcaggaattgggaaaaataaaattagcacttgcagaagtagcagcagatgggaaaatgccttgattgacattttctttcagcatttaaaatttttggcattttacagcttcatgacaaacagttttgtgcccataccttagaaaatgtggtgctgagttaaataaaggctgtttgagcactggagcagaaaaatgcattatttgcaaactggtggataattttgtgccttctcttctggccaccaagccagtgtagaaacagcaaaaatgtcataaaaattcttatatttaaaacaaaaacaaaagcaaaaacaaacattgaattaaattaagttttgtaattttaaactttaaaaacttctactgaaaatatttccgccaaatgccatcaatattttagactgtacctcgtttgcaaaactgctttgagagggaagagtggacaactcccatcagccttattctcttgagaactatattttggttcctagtaacagcctttccaaagctctactcttggtttttattactcataaatgtttaaattagaaaagaagggaccttgtacatgtgaaacctaattgactctctatattttggacaatttatgtatctgaaatgtgttgtctctgttatatgatgttatttttgccaggagactacaggttgatttagcttgatagctgaaatttgatggaaaactgatttccatttagtcttaccaagtgttgcttctctcttactagacagatatccacttagtaaaatctaaagcagtatgtaaatgaaaccagcaaagagagtagggtttattttataaacattcttaatgctaagtaaccagttgttcaatttattatatgtgtctgaggacattaaaacaccataagattgtaataattggttgtgccaatgtgtgagggatttacctttaggctctctgtcaccagtgatttactagtgttagctgtttaacacattatctgtatttagtagtgattatttatttacaagttggtggtaattcagcagtcaggactctaagcttttatagttgaattgaggaaatctcgcttttattcatttagctggcaactgcctttattgcagacctctggtgcttggctttcaaggaagcctatgagatgccaaaatcacacctttagagggcaccttgctctaataggtgatgcatgagcaaacagtgagatttgaaggggttttaacataatttagaatgtgaaaaaaatatcaattcatatctttcaagtactaacccctcaaaaaagcccacacatacaaaatatgtgatgtgataccactttgtcttttaggtctttaagtaactgaagttaagcacagaaaaaaaaatcacttcatggaaatttcagtaagaaacccaaacttctaaaaattgcttgcagatgagct

SEQ ID NO: 10969 - DNA, 3938 bp, Homo sapiens
  CDS (93)..(896)
accgagaagaagatatttaccagtttgcttactgctacccatatacatacactcgcttccaacattaccttgacagcctgcaaaagagaaacatggattacttctttcgggagcagctgggccagagtgtgcaacaacgaaagcttgacctcctgacgataaccagccctgacaatctccgggaaggggcagagcagaaggtggtattcatcacaggacgagtccacccaggggaaacaccctcatcatttgtgtgccaagggatcattgacttccttgtaagccagcaccctattgcctgtgtcctccgggaatacctggtcttcaagatcgcaccaatgctcaatcctgatggagtctacctgggcaattacaggtgttctctgatgggatttgatctgaatcgtcactggctggatccctctccatgggtccatcctaccctgcatggagtgaaacaactcatcgtccagatgtacaacgacccaaaaacaagcctggagttttatattgacatccatgcccactccaccatgatgaatggcttcatgtatggcaacatctttgaggatgaggaacggttccagaggcaggccatttttcccaagctcctctgccagaatgctgaggacttctcctattccagcacaccctttaaccgggacgctgtgaaagcaggaactggccgtcgcttcctcggtggactcctggaccacacttcctattgctacaccctagaggtctccttctacagctacatcatcagtggcaccacggctgctgtgccctacactgaagaagcctgtatccttagtccccacccagccttgggccagccctcatccagccgagagtatccaagtctgacaggtcaggaattaggcccccagctcaggtaagggctgagactctcaggtgaggatggaggtgcttcttcttctggtggcgtctttggattgtccagtttgcctcagcccttagtatgatactcctaccccaattgccatgctccaaatctttcccaggccagccggacccatggcctgcccatatcttactctgcttccatctctctcccctctcttctctcatgatgcagtgagtctcctgccatctaagctatgcaagtccacaggctggatgaccatccccagggttgctgaggaagagcttgatgatcttgactccttctaaccctgaacatacaaaaacatatgttctcttttcatcttttgtctaacctatcctctcccactttctcttccctctactcactatttccccttctacttacttttctcacccttgttccctctccttctatgccctcctcctccctcctcacctgtcctgtgcttctctttccttacttctttttccccctcctcccctcctttctgtcctctctctcatcccatcctccttttctttctctcctctttgcctgtcttctgtcttccttgtctttcccctctcatcctctgtgcatctttctctctgcctttgcatttcctttgacaaattccttttcctcttagtttcttcataaaatttctctgaaaactccaaagccttccatgatgaaattagaagttattttctagtttgcctaattttttaaggattaggtagtaactctagtttcccgagtgttgattttaatatcaaggtcactgcatcagagctgtaacagatcgtggcagattctgctttccttgatcctttgttttcgggttgatctatgtctcctttcctaacacttagttttctcagagaagtggagggaggaggaaggaactttagatgaaatgaactctgtatttctgcaaattccccctccctggaggtagaagtgctcttttagcattttttcaacccttggtgagtgtttatggaattcctctgtgcagggaaacatcttttctgaacgtggcatgacttagggctagtcccaccagccaactgcaacttagtggctctgtttgtatgtgtgtttgggagggttgggggtatggtgtccaggtaccttgccaggaacatcggaagtagggcaatggccctagaaggaggggctgtcagggggtaggccaggtgttagagcaatgttccacatcctgttggacacagagatattatgattggaactgagagttccctatgtacagtcatcaagactgagggtcatcttgcagtctgctttaatacccacctgactcagcaaggccaagggagtaggctctgctctgaggaagagggtctgtgggttccaaagtcctggccacctgttatgtgccacattgcccctcttcatgccccatacacaccttagatgatgcatatggcctatgccttctccagaatctgctaactcctataacacatgcatatgcttcattccacattgtacttgctttgctctcccataatattatggcaaagggacagagagctgcctggaataagagtttgagcttgtgcactaaaggggattctgcaacccttattcatagtgagatgagggtccctccagaggaggcctgcccttagtttgttgttttttgctgtccaatctgacaggctctcctaccttttcttagcacttctgacatgcttctgtcttagaagaaaatgtgtttcttagtagaaagcccacccttggttcaggcccaaggtttccacccctcaacagccaacactcatttatcaaaagtaaacacagcattagtacataccaggaatcataaaaggcacctagggtaaaatactgaataaaaaggcatgattcctgactcacagaactttcagtctacttggggagacagaaaagggaagagataattacaatgtatgtgataaattctggtggaggaattccagaaggctctgggacattttcatttgacaagtatatattgagtgcctgtcataggtcaggtaaagttctaggcacagggaatgtaacagagaacatactaaagacaagaatgtctttacatgggggaaagagggaactcacacgcagtcctaggagtcagggaagatttcccaggaaaagagacatctaaactgagattttttgtttgtttgtttttgagatggagtctcactctgttacccaggctagagtgtagtggcatgatctcagctcactgcaacttctgcctcctgggttcaagcgattcccctgcctcagcctcctgagtagctgggattacaggtgtgcgccaccatgtccggctaatttttgtatttttagcagagatggggttttaccatgttggtcaggctggtctcaaacttctgacctcgtgatccacctgcttcggcctcccaaagtgctgagattacaggtgtaagccactgagcccggcctaaactgagtttttaatatgaactagtcaaactgggtgagggtgttgttgaagggaggatgtggtagacagaggggggagtacagaaggtatgggcagaagctgtaagtggtcccttagggctgaaggacttcagactcaatgataagtctgaagtggaaagatgtaagaagtttgatcttgaatgtagacaatggaaggacagattcgagggggccagtattgtagacagggacatgcattaggaggctgttataaaaatccaggtgagaaataatccaggccaagaccagagtggtggctgtagaatacttagaatgtggaactgagaagacttggtaattgactatttgggagtggcgacagggaatgggagctcgtgattggaaggggttaaggtgagtagagaggctatgcacaagctgagcaggtcgtgatactgatggacctaccctgccttgttctgtcctctagaggatgagaagaggaaacaaactgcaccagggaagctcaggccgattcaatgcatgcaagggtgatttaacctgggttctgtttgaaatactt

SEQ ID NO: 10970 - protein, 268 aa, Homo sapiens
MDYFFREQLGQSVQQRKLDLLTITSPDNLREGAEQKVVFITGRVHPGETPSSFVCQGIIDFLVSQHPIACVLREYLVFKIAPMLNPDGVYLGNYRCSLMGFDLNRHWLDPSPWVHPTLHGVKQLIVQMYNDPKTSLEFYIDIHAHSTMMNGFMYGNIFEDEERFQRQAIFPKLLCQNAEDFSYSSTPFNRDAVKAGTGRRFLGGLLDHTSYCYTLEVSFYSYIISGTTAAVPYTEEACILSPHPALGQPSSSREYPSLTGQELGPQLR

SEQ ID NO: 10971 - DNA, 4224 bp, Homo sapiens
  CDS (54)..(3053)
agtggtgtggtaccgggtacccggagacgtgtatcggacggtgggccgcagccatggccgagagaaaacctaacggtggcagcggcggcgcctccacttcctcatcgggcactaacttacttttctcctcctcggccacggagttcagcttcaatgtgcccttcatcccagtcacccaggcctccgcttctccggcctccctgctcttaccgggagaggattccacagatgttggtgaggaggacagcttccttggtcagacttctattcacacatctgccccacagacatttagttacttctctcaggtatcaagcagcagtgatccttttgggaatattggacagtcaccattaacaactgcagcaacctcagttggacaatcaggattccccaagcccctgactgctctcccttttacaactggatcccaagatgtctcgaatgcattttcaccatccatttcgaaggctcaacctggtgctccaccttcctcactgatgggaataaattcttatctgccttctcagccaagtagtctccctccttcatattttgggaaccaaccccaaggaattccccaaccaggatacaatccatatcgccatacccctggcagcagcagggctaatccttacattgcaccaccccagctgcagcagtgccaaacaccaggccctcctgctcatcctccaccttctggaccccctgttcagatgtaccagatgcctccaggatctttgccaccggttccttcttcagtgcagtcaccggcacagcagcaggtacctgccagacctggggctccctctgttcaagtgccatctccttttctacttcaaaaccaatatgagcctgttcagccccactggttttactgcaaggaggtagaatacaaacaactgtggatgccttttagtgtgttcgactctttgaatcttgaagaaatctataattcagttcagccagatccggagagcgtggttcttggcacggatggagggcgctacgatgtttacctctatgaccgaataaggaaggctgcctactgggaagaggagccagccgaagtgagacgctgtacttggttttacaagggggacacagatagtcgatttattccctatactgaggagttcagtgaaaaactagaggctgaatataaaaaagctgtaaccactaatcagtggcaccgaagattagagtttccaagtggagagacaattgttatgcacaatccaaaggttattgttcagttccagccctcctcagtgccagatgaatggggcaccacgcaagatggacagacaaggcccagggttgtaaagcgtggaattgatgataaccttgatgaaattcccgacggggagatgcctcaagttgaccatttggtgtttgtggtgcatggcattggacctgtgtgtgacttacgctttaggagcattattgagtgtgtggatgattttagggtggtttctctcaaattgctgcggacacatttcaagaaatctttagatgacgggaaagtaagcagagtggagttccttccagttcattggcatagttctttgggtggggacgccacaggtgtggacaggaatattaagaaaatcactttgccaagtattggtcgatttcgtcactttaccaatgaaactttgctagatattttattttataacagccccacctactgtcagacaattgtggaaaaagtaggaatggagataaaccatctgcatgcactctttatgagtcggaacccagacttcaaaggaggtgtctctgttgctggtcacagtttaggttctttaatattgtttgacatcctgtctaatcaaaaagatttgaatttatcaaagtgccctggacctcttgctgttgctaatggagttgtgaagcagctacattttcaggaaaagcagatgcctgaagagccaaagctgactttggatgagtcgtatgaccttgttgttgaaaatgaagaagtcctaactttgcaagaaactctggaagcacttagcctctctgaatattttagcacttttgaaaaggaaaagattgatatggagtccctgcttatgtgtacagttgatgacctgaaggaaatggggataccccttggacccagaaagaagatagctaactttgtagaacataaagcagccaaactgaaaaaagcagcgccagaaaagaaggcagtggcggccacttctacaaaaggacaagagcaaagtgcccagaggactaaagacatggcttccctcccctcagaatccaatgagccaaagaggaaacttccagttggtgcttgcgtgtcttctgtgtgtgtgaattatgaatcttttgaagttggcgccggacaggtttctgttgcttacaactcattagattttgaaccagagatattctttgccttggggtctccaattgctatgtttctcactattcgaggagttgataggatagatgagaattacagccttcctacctgtaaagggttcttcaatatttatcatccgcttgatccagtggcatatagattagaacctatgattgttccagatttggacctaaaagctgttctcattccacatcacaaaggcagaaaaagacttcatttagaattgaaagagagtctctctcgtatgggatctgatttgaagcagggttttattagctctctcaaaagtgcttggcagacattaaatgagtttgcccgtgctcatacgtcttcaacccagttgcaagaagaattggagaaggtggccaatcagatcaaagaagaagaagaaaagcaagtagttgaagcagaaaaggttgttgaaagtccagatttttccaaggatgaggactacttaggaaaggttggaatgttaaatggaggccgccgaattgactacgttctccaagaaaaaccaatagagagttttaatgaataccttttcgctcttcagagtcacttatgctattgggaatctgaagatactgctctgttactacttaaagaaatttatcgaacaatgaacattagtccagaacagccccagcattgatcaaacttcagttttactgtactttcttgtctgcacagaaagtcccagtacaacttccattgctgagaaaatcctcagaggactttcccacttcgctcctgtgatggatgacagaagagtgattcattaacaattgctcagccacaattctcggatatagggattcaaaagacaggatacagaactaacacagtgaaaaaaatcagtaccacatttggacagtataggtgagaaaacataattataaaaatgatgccatgaaaaattccacagatcagtttagttgtatagttgtcaaagttatatgtgatatcaatgaagaaatatttgtagcatgtaaacggttatttctgtttcttaaaaagtattgttagtgggctattaaacttggatttttctttttattaatgcagtatgttctttttattcaagtatgaacttgttgagaaactatagtaatatgatttttaagagatttatgttctacttaaaatgtgaattgtacttctgagctgccttaatgcaaggtcatttatattcgttaagaggaaataatcaagatcactcatatcccaactgaatctgaggttttataaatccctcaaacgattgctgagagcctgattgtggaaagaagtgagatgcaccttattttcaagaagtcctgggaagcgctctcctagcacgtccatttccaggaggagaagcaagcagatgagaggttttccattttgtcatccaaggtagctgtgcacttgccttgttgctgaagttccaataatgtgaaaaccaaagtagaggtttttttcttcttctttttgttttctattaatttcacttataccaaagtgtttgaaagtatgaaatgtgttgcttctgagttatataaggctacttcatgacaagactgctttgtaatatttcactttgttttactacaaattcagatcactttgttttactataaattcagattatccaaatattttcctaatactatgtgggaatgctgattttcttttgttacgtagtggaaacattttgcattgtttacatagttctcatggaacatggaaatttttgaaagtgatatatgatacacattttttgtgtatgtattctaattagtgtgaataaagcagtaacattaatgcattttttaagcagc

SEQ ID NO: 10972 - protein, 1000 aa, Homo sapiens [sequence omitted]

SEQ ID NO: 10973 - DNA, 2158 bp, Homo sapiens
  CDS (15)..(1370)
gatcgcccgccgccatgggctcctcgcaaagcgtcgagatcccgggcgggggcaccgagggctaccacgttctgcgggtacaagaaaattccccaggacacagagctggtttggagcctttctttgattttattgtttctattaatggttcaagattaaataaagacaatgacactcttaaggatctgctgaaagcaaacgttgaaaagcctgtaaagatgcttatctatagcagcaaaacattggaactgcgagagacctcagtcacaccaagtaacctgtggggcggccagggcttattgggagtgagcattcgtttctgcagctttgatggggcaaatgaaaatgtttggcacgtgctggaggtggaatcaaattctcctgcagcactggcaggtcttagaccacacagtgattatataattggagcagatacagtcatgaatgagtctgaagatctattcagccttatcgaaacacatgaagcaaaaccattgaaactgtatgtgtacaacacagacactgataactgtcgagaagtgattattacaccaaattctgcatggggtggagaaggcagcctaggatgtggcattggatatggttatttgcatcgaatacctacacgcccatttgaggaaggaaagaaaatttctcttccaggacaaatggctggtacacctattacacctcttaaagatgggtttacagaggtccagctgtcctcagttaatcccccgtctttgtcaccaccaggaactacaggaattgaacagagtctgactggactttctattagctcaactccaccagctgtcagtagtgttctcagtacaggtgtaccaacagtaccgttattgccaccacaagtaaaccagtccctcacttctgtgccaccaatgaacccagctactacattaccaggtctgatgcctttaccagcaggactgcccaacctccccaacctcaacctcaacctcccagcaccacacatcatgccaggggttggcttaccagaacttgtaaacccaggtctgccacctcttccttccatgcctccccgaaacttacctggcattgcacctctccccctgccatccgagttcctcccgtcattccccttggttccagagagctcttctgcagcaagctcaggagagctgctgtcttccctcccgcccaccagcaacgcaccctctgaccctgccacaactactgcaaaggcagacgctgcctcctcactcactgtggatgtgacgccccccactgccaaggcccccaccaccgttgaggacagagtcggcgacttcaccccagtcagcgagaagcctgtttctgcggctgtggatgccaatgcttctgagtcaccttaactttgaaccattctttggaattggcgtggtatatttaaccacgggagcgtgtctggaaacgcaaactatcattaatttcatactagtttgtaccgtatctgtaggcatcctgtaaataattccaaggggaaaactaaacgaggacgtgggttgtatcctgccaggttgagtggggctcacacgctagggtgagatgtcagaaagcgcttgtattttaaacaaccaaaaagaattgtaagggtggcttgctgccaggcttgcactgccgttcctgggggtgtgcatcttcgggaaaggtggtggcggggcgtccactaggtttcctgtcccctgctgctccttccgtaagaaaatgaaatattctatgcctaatactcacacgcaacatttcttgtactttgtaagtcgtttgcgagaatgcagaccacctcactaaactgtaaacggtaaagagatttttacttttggtctccgtgagtcgcatctctactaaggtttacacaggaattccacctgaagacttgtgttaaagttctacagcgcgcactgttaactgaacgtctttttcttcagcctatacgcggatccttgttttgagctctcagaatcactcagacaacattttgtaactgctgctgttgctttctacatacaccttataaagtgacatttcaaaagaaataaggtgccacagttttaaaccagaaggtggcactctgtggctccttgtagtattatagctatactgggaaagcatagatacagcaataaagtacagtaatttt

SEQ ID NO: 10974 - protein, 452 aa, Homo sapiens [sequence omitted]

SEQ ID NO: 10975 - DNA, 1717 bp, Homo sapiens
  CDS (214)..(564)
tgcagctttgccttctctccaagagaagggtccacccaatcagaactcctcttccttttcattcctggattaaagcacttgtaatcagtaaccagaaagttccagagcgggagagaccggaaggcactggagtgctatcggacgggtgtctggggcagagccaggagggcgagcctcttctctccccgcctgcccttgctcacttccccctccatgccaggtgctgtgggagcagctgggcctggccggggtcggcgggtgaagctatccgcatggtgtctggagcaccgtttctttgcttcctggatgggctggatgggctcccgtgttcttcaccaatggcagcgttaccagcaccaatggcagcgttaccagcaagaaggcaaaggcaggagcacatcgagggtgggagccagggctgtggggtcaggagtcccgctccttgccgcgggaagcctggctcagccacctccagcacacttcggctttgtccagcataaaaggcagagcgacgttttcactgcaggctgtttcccaccagggcaagtgggacagggcgagtgctgacgtctgcaggcatggtgtgcatttaggggtgggcggcaccgagggggcatcatttggcataggcgggcccgggggccactgggctagatgactggctggttgctgggggcaggtgtcacagcctctctgagcaccctctaagtggaggacagaacattgttgggaggagtccaggcataaagtgacataaacagcgcagagaatgggaccagcgcacctgagaggtgatcattagcctcagcaactggatgggacattccgaagagctcccagccaacacagatggtcactccagaggctgacatttaaaaggaaggggcccggccgggcacagtggctcacgcctgtaatcacaacactttgggaggctgaggcgggcagatcaactggggtcaggagttcaaaaccagcctggccaacatggtgaaaccgcatctctgctgaaaatacaaaaaattagccaggcatggtggtgggcacctgtaatcccagctactcaggaggctgaggtaggaggatcgcttgaacccaggaagtagaggttgcagtgagccgagattgtgccattgcactccagcctgggcgacaagcgaaacttcgtctcaaaataaataaaagtaaggggcacagggggggggccccagctcgtgccccttctgtgtgggctgcacatggtgacttccttccagagagcacagagtgggaggtaggcaaggcgtctccacagtggagagcccgacccactgtctcagcccagaggtcaaggctggcaccatcaccgagaggtcacacgggcagatgtgacagggcgcttcaccactgggctcttcctcccagacccataacccttgtcttagtattagaaaaacactggcagaccgggcgcagtggcttacacctgtaatcgcagcattttgggaggccgaggtgggaagattgttcaagagcagtctgggcaacatggtgagaccccatctctacaaaaaaaatttttttttttaattagccaggcgtgatggcacatgcctgtggtcctagccactagaggctgaggtgggaggatcactggagcccaggaggtcaaggctgcagtgagctgtgatcacaccactgcactccagccttggcgacaaaccaagaccctgtctcg

SEQ ID NO: 10976 - protein, 117 aa, Homo sapiens
MPGAVGAAGPGRGRRVKLSAWCLEHRFFASWMGWMGSRVLHQWQRYQHQWQRYQQEGKGRSTSRVGARAVGSGVPLLAAGSLAQPPPAHFGFVQHKRQSDVFTAGCFPPGQVGQGEC

SEQ ID NO: 10977 - DNA, 3144 bp, Homo sapiens
ttaatggtcagaaacaatatttaaaaaaaaaatagccaacaacttcccaaatttgatttttttaaaaattgtgtatctaagaacctcaatgaactccaagtaggacaaaatttttaaaaacccacacttagacatatcagtcaaaccgttaaaagacacagaatctttaaaggagcaaagaaaattggtacatcacatgtaaggagtctcaataagattagcaactgacttcttatcagaaaccatgaaggccagagggcaatgggatgacatattcaaagtgatgaaagaaagaactgtaaaccaagatttctatatccagcaaaactgttattcaataatgaaaaaatgagataccacttcatttgtactatgatgagtataattttttaaatcaagacagaaaagtgttggtgaggatgaaaagaaactggaaccttcgtacatggctgatgggaatgtaaaacggagaagtcactatggaaaacagtttggtagttcctcaaaatcacagaagtactatatgatccaaggctgggcacagtggctcacacctgtaatcctaacactttaagggccaaggtgggaagatcacttgagctcaggagttcaagaccagcttggacaacatggcaaaaccccatctccacaaaaaatacaaaaattatccaggtatggtggtatgcacctatagtcccagctactttgtgggagctaatgcaggaggattgcttgagcccaggaggtcaaggctgcagtgagccatgttcacaccacagtgctccagcctaggtgatgacaaagtgagaccctgtctcaaaaaaaaaagcctgggcacagtggcttatgcctgtaatcccagcactttgggaggccaaggcagcaaatcacttgaggccaggagttccagaccagcctggccaacatggtaaaaccccatttctactaaaaatacaaaaattagccagtcatgttggcacatgcctgtaatccaagctacacaggaggctaaggcataagaattgcttgaacccagaggcagaggttgcagtgagccgagatcataccactgcactctagcctgggtgatacagtgagactccatctcaaaaaacaaaacaaaagaagtattatgtgatccagcaattccactccatggtatagatccaaaagaattgaaatctggggcttaaacagatacttgtacaccattggtttgtaacattattccaacagccaaaaggaggcaaaaccacaaacgtcaccaacagatgaatagataacgtgttacataggtaccatggaatgttattcagtcataagaaggagtaagatctcatacatgctattgtatgtatgaaggaaagttgaaaacattaagctaagtgaaatgaggcagacacaaaaggacaaatattgttatgattccacttatatgaggtacctagaataggcaaatttatagaggctgaaaatagaatggaggatatcaggggttagtggtggaagtgaggaattattgtttagtgggtacagattttctgtttgggatgataaaagttctagaaactgataatggtgatggttgtacaacattttgaatgtatttaatgcattgaattacacacttttgaatgtttaaaattgttttatgtatattttgcaataattttaaaacaaaaaattcctcagaaggccaggcacagtagctcacgcctgtaatcccagcactttgggaggctgaggcaggcagatcatgaggtcaggagaccgaggccatcttggctaacacggtgaaaccccgtctctactagaaatacaagaagttagccaggcatggtggcaggcacctgtagtcccagctatttgggaggctgatacaggagaatggcatgaacccgggaggcggagcttgcaatgagctgagatcacaccactgcactccagcctgggcaacagagcaagactctgcctcaaattaaaaaaaaaaaaattcttcaggaattcacaataaactattagaaacgaaaaacaagttcagcaatgttttaggatacaagatcaatatacacaaatctattgtatttctatacactaataatgaagaatccaataatgaaattaagcaaacacttcagtttacaataatatcaaaagaacaaaatacttaggaataaactgaacaaaaagtctaagacttgtacaatgaaaaatacaaaacatcatcaaaagaaattaaagacctaaataagatacatctgtcttcatggattagaagacaagatggcatgattgccaaaaatgataaacagattcaatgcaatccctatcaaaatcccagttggctattctaaaatttatatggaaatcctaaaattcacatggaaatataaggtacccagaacagctaaaacaatcttgaaaaataacaaagttggaggacccatacttctctatgtcaaaacttactaagctacactaatcaactcagggtgttcaggcatagagacagacatatagatgaacagaactgagagtctggaaatctaatcaactgattttcttttttttgttttgttttacatttagagacggggtctcactctgtcacccaggctggagttcaccctggagtgtaatcatggctcaaggcaaacttgaactcctgggctcaactcccacctcagcctcccaaagtgctgggatttcagatgtgagccaccacgcccagcctacaatcagttgatttttcaacaaagattccatgataatccaatgaagcaaagaatagtctttttagcatgtggtgctggaataaatagaccaggcaatggtttctaatataacactaaaagtacaagtaacaacaacaacaaaacaactggacttcataaaaattaaaaacttctgtgcttttcaagggacactatcaagaaagtgacatgaaagcccacagaatgggagaaaatacttgcaaatcacctatccagtatatatcaggaattcttacaactaaacaataaaaagacaaccaaatttaattataggcaaagaatctgaacagacattactccaaataagacatgcagatgtccaataagcacatgaaaataccctcaacaaaattagccatcagggaaatgc

SEQ ID NO: 10978 - DNA, 1805 bp, Homo sapiens
  CDS (167)..(1804)
gtctagcgggatcgcttgcttggtaacccggagggagagattggaaaccgcggagtttcctttgggaggctgcggccagccggggctgacttgttatgttgggctccggaggccgttaagagccgagagagacatgaggtgtctctgaagcccggtcgcctgggccatgaagaagatttttagtaagaagggcgagtcgcccttgggctccttcgcgcggcggcggaggagcagcgcgggaggcgggggcgagccgggggagggcgcctactcgcagcccggctaccacgtccgagaccgagatctcggcaagatccacaaagctgccagcgcgggtaatgtggcgaaagtgcagcagatccttttgctcaggaagaatggcttgaacgatagagacaagatgaacaggacggctctacatttggcctgtgccaatggtcatccagaagtagtaactctcctggtggacagaaaatgccagctcaatgtctgtgacaacgaaaacaggacagctctgatgaaggctgtacaatgccaggaagagaaatgtgcaactattctgctagaacatggtgctgatccaaatcttgcggatgtccatggcaacactgctcttcactatgctgtctataatgaggacatatcagtagcaacaaagctgcttttgtatgatgcaaatattgaagcaaaaaacaaggatgacctcacaccacttttacttgcagtaagtggaaaaaagcagcaaatggtggaatttttaataaagaaaaaagcaaatgtaaatgcagtagataagttggaaagcagtcaccaactaatttcagaatataaagaagaaaggatacctaaacattcttctcaaaatagtaattcagtggatgaaagctctgaagactccttaagcaggctttctggcaaaccgggtgttgatgattcatggcctacctcagatgacgaagacctcaattttgatactaagaatgtcccaaaaccaagcttagcaaagctaatgactgcttctcagcaatccaggaaaaatttagaagcaacatatggcactgtgagaacaggaaatagaactttgtttgaggatagagattccgatagtcaagatgaagttgtggttgaaagccttcctacaacatcaatcaaagtccagtgcttttctcatcctacctatcaatcacctgaccttcttccaaaaccttcccacaagtcgttagcaaaccctggtcttatgaaggaagaaccaacaaagccaggcattgcaaaaaaagaaaatggtattgatattattgaaagtgctccactagagcaaacaaataatgacaatttgacttatgttgatgaagtgcacaaaaataatagaagtgatatgatgtccgcattaggattaggacaagaggaagatatagaatcaccttgggattctgagagtatctctgagaattttccacagaagtatgttgatcctttagctggggctgcagacggaaaagaaaaaaatataggaaatgaacaagcagaagatgtgttttatataccttcttgcatgagtggatcaagaaactttaagatggctaaactagaggatacaagaaatgtaggcatgccagtagcccacatggagtctcctgagagatatcttcacttgaagcctaccattgaaatgaaagattctgttccaaataaagcaggaggaatgaaggatgtacaaacatccaaagcagctgaacatgacttagaagtagcatcagaagaagagcaagaaagggaagggagtgaaaataaccagccacaggttg

SEQ ID NO: 10979 - protein, 546 aa, Homo sapiens
MKKIFSKKGESPLGSFARRRRSSAGGGGEPGEGAYSQPGYHVRDRDLGKIHKAASAGNVAKVQQILLLRKNGLNDRDKMNRTALHLACANGHPEVVTLLVDRKCQLNVCDNENRTALMKAVQCQEEKCATILLEHGADPNLADVHGNTALHYAVYNEDISVATKLLLYDANIEAKNKDDLTPLLLAVSGKKQQMVEFLIKKKANVNAVDKLESSHQLISEYKEERIPKHSSQNSNSVDESSEDSLSRLSGKPGVDDSWPTSDDEDLNFDTKNVPKPSLAKLMTASQQSRKNLEATYGTVRTGNRTLFEDRDSDSQDEVVVESLPTTSIKVQCFSHPTYQSPDLLPKPSHKSLANPGLMKEEPTKPGIAKKENGIDIIESAPLEQTNNDNLTYVDEVHKNNRSDMMSALGLGQEEDIESPWDSESISENFPQKYVDPLAGAADGKEKNIGNEQAEDVFYIPSCMSGSRNFKMAKLEDTRNVGMPVAHMESPERYLHLKPTIEMKDSVPNKAGGMKDVQTSKAAEHDLEVASEEEQEREGSENNQPQV

SEQ ID NO: 10980 - DNA, 2826 bp, Homo sapiens
  CDS (18)..(1307)
gatgtcatgcaggcaagatggcggaaggggaggacgtgggatggtggcggagctggctgcagcagagctaccaagcagtcaaagagaagtcctctgaagccttggagtttatgaagcgggacctgacggagtttacccaggtggtgcagcatgacacggcctgtaccatcgcagccacggccagcgtggtcaaggagaagctggctacggaaggctcctcaggagcaacagagaagatgaagaaagggttatctgacttcctaggggtgatctcagacacctttgccccttcgccagacaaaaccatcgactgcgatgtcatcaccctgatgggcacaccgtctggcacagctgagccctatgatggcaccaaggctcgcctctatagcctgcagtcggacccagcaacctactgtaatgaaccagatgggcccccggaattgtttgacgcctggctttcccagttctgcttggaggagaagaagggggagatctcagagctccttgtaggcagcccctccatccgggccctctacaccaagatggttccagcagctgtttcccattcagaattctggcatcggtatttctataaagtccatcagttagagcaggagcaggcccggagggacgccctgaagcagcgggcggaacagagcatctctgaagagcccggctgggaggaggaggaagaggagctcatgggcatttcacccatatctccaaaagaggcaaaggttcctgtggccaaaatttctacattccctgaaggagaacctggcccccagagcccctgtgaagagaatctggtgacttcagttgagcccccagcagaggtgactccatcagagagcagtgagagcatctccctcgtgacacagatcgccaacccggccactgcacctgaggcacgagtgctacccaaggacctgtcccaaaagctgctagaggcatccttggaggaacagggcctggctgtggatgtgggtgagactggaccctcaccccctattcactccaagcccctaacgcctgctggccacaccggcggcccagagcccaggcctccagccagagtagagactctgagggaggaggcgcccacagacttacgggtgtttgagctgaactcggatagtgggaagtctacaccctccaacaatggaaagaaaggctcaagcacggacatcagtgaggactgggagaaagactttgacttggacatgactgaagaggaggtgcagatggcactttccaaagtggatgcctccggggagctggaagatgtagagtgggaggactgggagtgagggagccagagggagcagctcccccacccatggcatctctcgcctccctcgctcgtctcagcccagccctggaagactgagaatgttcccccaaatctcctctgccaaccagagctctgggcacagattctggtggctccctgctggccctcttgggcctctgctcacacctgggaaggggctctctaaatcccggccagaaactctgacttgtgccaacaataggatgacccaagggagaggaaacctatcctcctcaccagaagagcctgtgtttttctgctgaacacccactgttcctgaggactcctgctgggaagtcccaagggatagttctagcccttctgcctgtgtagacagaagctaaaccaccagtctctctcggaggaagctgagacaacatactctgtccatacataagcaggcagggagggccatgccacctacccttggctaaacagggacagtgaacacattttggttcctatcccagtgggtaagaggcacttatctctgggaaatttgcctctcttgggactctccccctcccaggcattttccattcctggaaaggctcctttggggttcagaatccagagaccaaaccctgacccacctccttcctttcctccagcccacgctggtctgtccccatgccttcccagggcttcttcatgtcagatgcacccaagtccttagcccagctgtgccacctgcaggagttcgctcttgcgtttcttcccctccccaagaagggagggggctacttcaggcccttctgtgtgttgcctggcaggataccttgtccaaccagctacccacctcaactcccctgtagtttaggacacaaaacagctaccagcggtacagagcggtgatcaaagccgagtacttacaactctggtaagcctagcttctccgcctcagcccttctgcttctggaagggctatcctgggggtgaacttgaaactctcatcaggcttctgcaaaagctcttcttcctgaagacagacccagcctttgtgctctcaccctccactctggtaaagctgcacctctgggggaatgaggggctgcaggaatctctggagagcctggtgcttcacgatgctgctctggtgattcttgtacctaatctggtgtgctcaccaatgagtgaaagggatcgtgggtcagggacaccgagagagtgaggtcacttccacttcaaaccttcagtgagggggtgggatggagagaatgctgaatcttttttttgacgggatggggtttttctctttgtaattatttctttagtttaattaaccttttggttgtttgtgcaatattatatattttaaattataatgcatctccccagagtattttgtagctgggaaaagaaaaaaggaaaaaaagaaaaaaagattctaacagctgttagttttataattaaaaaagaaagaaaaaagaactttgtcctgaaccttttacagacttgccgttaacagcattaaagtgattcacccgaagctg

SEQ ID NO: 10981 - protein, 430 aa, Homo sapiens
MAEGEDVGWWRSWLQQSYQAVKEKSSEALEFMKRDLTEFTQVVQHDTACTIAATASVVKEKLATEGSSGATEKMKKGLSDFLGVISDTFAPSPDKTIDCDVITLMGTPSGTAEPYDGTKARLYSLQSDPATYCNEPDGPPELFDAWLSQFCLEEKKGEISELLVGSPSIRALYTKMVPAAVSHSEFWHRYFYKVHQLEQEQARRDALKQRAEQSISEEPGWEEEEEELMGISPISPKEAKVPVAKISTFPEGEPGPQSPCEENLVTSVEPPAEVTPSESSESISLVTQIANPATAPEARVLPKDLSQKLLEASLEEQGLAVDVGETGPSPPIHSKPLTPAGHTGGPEPRPPARVETLREEAPTDLRVFELNSDSGKSTPSNNGKKGSSTDISEDWEKDFDLDMTEEEVQMALSKVDASGELEDVEWEDWE

SEQ ID NO: 10982 - DNA, 3410 bp, Homo sapiens
tgtacattatgtatgataatgtatgcacattttcttatttttaacttcagggccatatgtggtgctgttgtcggagcaggtgaaaagtctgagtgtgtttaatttgcttgacaaacattaggctggggcttgtcaagtggagtatagtgaatgccaatctttatttactccttattgattaccccaaactctaaacatctgcataccttgtataaatttccacttatgaagctgaaattgatgaatgaaagcccatgccatttcccggggattggtacatttcaggagtgaatcacaatcaattattgtcataggactattgaaatataaagggagagctgggagggagggcccagcgccctgctctcacgattgattcaggcaggagcctgttccgaaccgtgtgtgccagattagcccgtgacttcatgacgagcatgggaagtatgctaattaacggctggctgccggcgccctcccctaaaatgggaaaatacatatttgggggttatgatttgatggcgacgttcaagtgcgttgtcacagattgggaaagcgttttcatcaagctggcttgttatgcctcgtttcgatgtggtttaagcagcagtcttattaggttaaccctgctcagtgaaagcaagcaggcttactttctgattagataaaatgtgcaggcataatgggaaaagtcattaagtgatgaatgtactcttagacatggactaatcatactctatttatgtagctggttcgtagctatgaccctctcgtgtgattcttgtgctatatttatggtcagtggtgattatcattaatttgtaacgcacataaacattcatgcaacacggctcactctctgagccgtcacaggaggcctcattcccggtctggacccatggtgttgctcacctcacaggtgtccggcatccgtggcaccaaaatccccaaataagtggaaatcgccaaacagctcattgcacttggctcctatggttccaatgacaacagttttatatggaaattgagttcatcaaattaattattcactgcttttacgggagtgggttccaaagcaggggcatgtgcacactgtgaagacctacccctctcctgtttccttgggggcaccccagcaccgcctcctggccccaggtagtttcataagggctccaaagaggaacccgactaagagccccgctactcatcagttggagcctgggacccggggagagacccgggatcatcctgctcagtcaagtttacttgactctgtcatttcttgccgctgctgagaaatgcttcccctgccagtgtcccagccctgggtcctcaggcaggccgttggccagagagaggcgggcccatcaatctcccttaacagcctgattggctgcaggtcagctgagaggaaaaggtttgagattgggacgggtttagccaggaatctcggaatttcccggataattgggggagagtgacgccaagctcttcctgtcacttttagatatttctgaactacctctgtaatgaattggaatgcctcttaccagggcctcagagacgccgtgagccactgaagtttatgctctccaattatccagaaggattctcaaaagtgggctgtgggcctctgagctctgttgtgcttgtaatacatggcatcacctccttgggtggcagaccaccgggccacggatccacaaaggatggcgcggcctgctggggaccctgtattggtacagacatcactgcaagtctgactcagagctaattgcagatagttcatttaactctgacttctgcaaaaatggatgtaaatatggagggaaacacacaacagtcgttttcgtgaagaacggccttaggacaaagacaaagaataaaaaatgtcttttgtatttacttgaaacaaatgaatggtatcaggtgaaaaatatctgtctgtgcttgttcagatttaaggcctacaaatttgcaccttattccaatttcctgcatgcacgggaggaagtgcgaatagcttattcagaggcagattaatgcaaaagagctgagagggcacataaatctacaagtagtgacttgtaccatcatgtaggtgtaatgattatcaaactggaatcagggctcagagtatcagcttagcacagagaaaatttgcttgatgggagagtagtaaagtcatgctataatatatccacatactgtgactaaattttatagttcatgaagcatattagtattacactatatcccggtacattcaaaaggtgatttccatttagatgctcatttttcatgaagataaatatgacatgaatcataatttccctgaagtaaatattacaaataataaaatactcaggcaagcaagttgaggaatgacagtaatgttttccatttgtatggtaagtggcgaaccttgtggcctatcaagtaacaaattgaatgtttaatctttctccatgcagattgaggatggcaaagtagcgcggtctcacaacaaattgagagttctctggtgactcgtggagtatcagctcttttgccttcagaggccaatagagggtgtcagcagagctttgtcaaaatagatcacgagcatgaagttgtaaaattgcaatttacaacaaaaagactttgggataacgggcaaatcttaggcatgctaaatacatagcaaatatttagagaggctttgtaagcaatttaaatattgttaggggaagttgcttagcatctgtggagcatcccagcggtaaagaaagaaatgtatcctatcaaatggtaaatagtctattccaaatgataaaaatattctttagatactagctgatcgagttaaactaattggttgacggtgccttaaagccgtgcccagtattaggctggcggaggccccgctgtgcacgtcacaccttatggtgttaatggcgctctttgtgctacatcatctttgccgatttgccctcacattttggagtccctccgggccttggggatcctggtgcagcaacagcttgtttccctgggatctcgatgctggcctggagccggcctgccgcctggggtctcggcagtccaggccacagttcagggtcacttgtaccacacagcccggggatgttccttctgctgaaggttctgttgtatattaattttaagttgcagtgtctgcactgcaagatgacaccactcgcattttgattaaggattttatacatgaaaaaattttcattatctgagttcccagagacctccctgattggttgcctgtctgacccacagctgtgtctccaagcgtcggggtaaggactcgggcacatgagtgtgccctgcactacctctggtacatgaacaattaatggggcttttgactctcagggaagtcaagactcttcataacc

SEQ ID NO: 10983 - DNA, 1816 bp, Homo sapiens
attcagaatgaatagaatttacactaacatgctatataaaatgttaaagtctgatgctgtgaaagcaatctagtgctatatttctacctcctcatttgtcttaattatttggtaagtgggattatgatgagtaactggaggggcttagaaacaaaaactggatgaaagagtatgcatgaagaaaagcttctttgataaatgtggagttcttcattataaatatatattcatgaattcacagataagtacttaaagaacagacagtttacttggcctaaaaatattttgatgtttactcaaaaagtacctcttcaggtcttgagaacatggaaaagaattgagtgcttttaaatactttttagaaagtaatcataaaagtaaattgaatttcaaacctatttggcttctgttttgtgaacctttgaactatatgtatgtgtataagggtatacacatacatatatggcatataacaagtgtacacatatacacataacaagtgtagaagtatatattacatacatacactcactctgtctggtataggctaattttgaagaactcccataagtttctgctgcttctcccataactgctgccaccaccatcagaattcataatcaaacctaacctttttgtttggggcaccaaatctgaagacaaaattaatttgcaccagtaaacttcaagctgctttctttcttgaaaactaaacgtttaacgtataatgtctgtttggatactgttccaaattgttgattgcatgtggttaatgttgcattagagcactttgcaattgcataattcattaatgttttgtgagcttgcatttgtgagttattggatgatcagactgaattttgtcaagtatcacattgtacatcttgcctagatgtcgatgactgcaagtaataatacagtttataatgaaactatctacaattcttgttttagcacatctgttatccgtaaaacacctgtaaccagcttttttaatttattatttgaattttaggatagcgaatcactaatttttagttgctgaggttggcattttagtgattattaagcacttctgtcagtctttgaaaaaagaacgtattttttgtgctttgaagatctctgaagaatttcttttataatagaatgggcatgtattgtaacagttttatgtcaaatgatctgtgctgtagaaaaacattaacccttgttcaaaaaagaaatggataaacttggcctttctaagtggtaagaatgacctgtcactataatatactgtatgtttacattttatttaaatttaatctcttatgtatagggtgataaccttccccagaaacaacagtgattgcgattgttttctagaaacttctttaaagtgccacatttggcagtacaaatgagtctgagtgtaatagcccagagatttatatatagttgaatgtctaaaatggtaaaatgtgccactgtgtcaagttacagtggcttatgtttttcatagtaattcaaatgaacttcctatttttgatagtaaatgtcatttaatagtatacttgccatttgagcctcactgcaaaattagtgcagaggagaaaacaatttttaatgtaatcttgattttacctcatatactgtacattccaaaaactctaaactttttaaagattatagatacactaccaaacatatcaccttaaaattgtataaggctgaatgaacttcatacaaatgaaaaaaatctcataaaaatacataaactatgtagcaaaagtatctgcaaaatccatggaaaataaaagttgtatcattctttttg

SEQ ID NO: 10984 - DNA, 1394 bp, Homo sapiens
  CDS (337)..(867)
gacatcgacctagtggtgtttgggaagtgggagaacctacccctctggactctggaagaagctcttcggaaacacaaagtcgcagatgaggattcggtgaaagttttagacaaagcaactgtacctattattaaattaacagattcttttactgaagtgaaagttgatatcagctttaatgtacagaatggcgtgagagcagctgacctcatcaaagattttaccaagaaatatcctgtattgccatacttggttttagtattgaaacaattcctattgcagagggaccttaatgaagtatttacaggtggaattggttcttatagtctctttttaatggcagtcagtttccttcagttacatcccagggaagatgcttgcatccccaatacaaactatggtgttctcttaatagaattttttgaattatatggacgacacttcaattatttaaagactggcatccggataaaggatggtggttcatatgtggccaaagatgaagtacagaaaaatatgctagatggctacaggccatcaatgctttatatcgaagatcctttacaaccaggtaacgatgttggaaggagttcatatggggccatgcaagtgaagcaggcctttgattatgcctacgttgttttgagtcatgctgtatcaccaatagcaaagtactatcccaacaatgaaacagaaagcatactaggtagaataattagagtaacagatgaagttgccacatatagagattggatatcaaagcagtggggcttgaagaatagacctgagccttcatgcaatggaaatgaaactcttcatcaggtccagtgtcgtcctcttctgccacacagtccagctctagtgacgtagattccgatgcaacaccatgcaaaaccctgaaacagctgctttgccgtccgtccactgggaaccgagtagggtcgcaagatgtatccttggagtcctctcaggcagttgggaaaatgcaaagcacccaaaccactaacacatccaacagcaccaacaaatctcagcatggatcagcaaggctctttcgttcttccagcaaaggcttccaaggtacaactcaaacaagccatggttccttgatgacaaacaaacaacatcaaggcaaatccaataatcagtattaccatggcaaaaagaggaaacacaagagggacgcgcccctctcagacctctgtagatagtcagcgctgcgcggtggactgtcttctctgtgcaatgatctcatgctcaggacagttgcgcagggactcctgggagatattcaggagcctcacactgttcagacgttgacttagcaactgcgttttttcccagctcgccacagaatggatcatgaagactgacaactgcaaaaaaaacaaaac

SEQ ID NO: 10985 - protein, 177 aa, Homo sapiens
MAVSFLQLHPREDACIPNTNYGVLLIEFFELYGRHFNYLKTGIRIKDGGSYVAKDEVQKNMLDGYRPSMLYIEDPLQPGNDVGRSSYGAMQVKQAFDYAYVVLSHAVSPIAKYYPNNETESILGRIIRVTDEVATYRDWISKQWGLKNRPEPSCNGNETLHQVQCRPLLPHSPALVT

SEQ ID NO: 10986 - DNA, 1254 bp, Homo sapiens
  CDS (69)..(650)
gctggtgcgcgccggagcccaaattccaagtggaaactgcaggcgcacgagggaggaacgcgtggagcatgaaaaggcagggggcctcctctgagcgaaaacgagcgcggataccgtccgggaaggccggagcagcaaatggatttctcatggaagtttgtgttgattcagtggaatcagctgtgaatgcagaaagaggaggtgctgatcggattgaattatgttctggtttatcagaggggggaactacacccagcatgggtgtccttcaagtagtgaagcagagtgttcagatcccagtttttgtgatgattcggccacggggaggtgattttttgtattcagatcgtgaaattgaggtgatgaaggctgacattcgtcttgccaagctttatggtgctgatggtttggtttttggggcattgactgaagatggacacattgacaaagagctgtgtatgtcccttatggctatttgccgccctctgccagtcactttccaccgagcctttgacatggttcatgatccaatggcagctctggagaccctcttaaccttgggatttgaacgcgtgttgaccagtggatgtgacagttcagcattagaagggctacccctaataaagcgactcattgagcaggaggtggtataacagacagaaatctacaaaggatccttgagggttcaggtgctacagaattccactgttctgctcggtctactagagactcgggaatgaagtttcgaaattcatctgttgccatgggagcctcactttcttgctcagaatattccctaaaggtaacagatgtgaccaaggtaaggactttgaatgctatcgcaaagaacatcctggtgtagccagacctctctgagagacatggatatcacaggatgaaggtagaactataatctgcaattctctatgacacagctttaaccttcttctctggccaggacagtcgcaatctttgttttaagtttcacatggccatggagaatgtgcccaagaagaaaaagaatttgaaacagagatacagtcacttcctttgcttagtcttaccagtgattgtcatcatggttaaagctggtctgtgcttcttccatagacagaagcttagtctgttttcagtggaattaattgatgaactgggaaaattttaactgcatggtatgaattcagagtgtgacttaagggtcaattcaaagcagtattttgacttttcatttgtaaaataaaaatttccactatt

SEQ ID NO: 10987 - protein, 194 aa, Homo sapiens
MKRQGASSERKRARIPSGKAGAANGFLMEVCVDSVESAVNAERGGADRIELCSGLSEGGTTPSMGVLQVVKQSVQIPVFVMIRPRGGDFLYSDREIEVMKADIRLAKLYGADGLVFGALTEDGHIDKELCMSLMAICRPLPVTFHRAFDMVHDPMAALETLLTLGFERVLTSGCDSSALEGLPLIKRLIEQEVV

SEQ ID NO: 10988 - DNA, 1498 bp, Homo sapiens
  CDS (314)..(628)
cagaaaagttaccaaacagtggtaaccataacaagtaccaacaatgaactatggggagggaggagaatctgatttccagagttaccacattataatactattcaaaatgtcacatttttagcaaagattacatgacaaggaaaaaccagaaaagtatggcccatacacaggtaaaaaaagaaattaatagaaactacccctgaagaagcacagacttcggatgtacaaaacaaagacttttcatcaactcttttagatatgctagaagagctaaaggaaaccatggacagagaacaaaaaaattaggaaagcaatgtctcatccaatacagaatatcaataaagagattgaaattgtagaaaagaaccaaatagaaattctggagttgaaaagtattataactaaaactgaaaattcactagaggtattcagcagcagactggagaagtcagaagaaagaatcaacaggcttcaagataggtcaattaagattatacagtctgaggagcagaaaggaaaaagaatgaagaaaaatgaacagagcataaaagacctctgggactctatcaagcataccagtatatgcatgaggggagtcccagaaggagaagaaagagagaaagggacataatatttgaagaaataatggtagaaaatgtcccagctttgatgaaatacatgaatctagatattcaagaggctcaaagaaccctaaatagggtaaactcagaaagacccacaccggaatgcaaaagtgagctgggtgtggtggcacgtgccggtggtcccagctactcgagaggctaaggcaggaaaatcgcttgaacccaggaggcagagattgcggtgagccgggattgcgccagtgcactccagctgggcgacagagcgagattccatctcgaaaaaaaaaaaaaaaaaaaactattgctgcagtcattcagatggaaatggggaaagaataatattaactgatttcaaaaaggacttgaagatgtgaatcatctattttgctgaagaaatcttaactctttgaaattactttttgttgctgttgtcatactcttaggtgccaaactgcggtaaattttttatcagtgaagtggaagcatgtgttttgttgttttgggaatttttatcaagtatcttcagagaagattacttcctgctttatcttcaaaaaccggaaaggaagggtcaaagaaaagacagtagctggccggtcatggtggctcatgcctgtaatcccaacactttgggaggctgaggtgggcagatcacctgaggttgggagttcgaggccagcctgaccaacgtggagaaatgccgtctctactaaagatgcaaggattggccgggcatggtggcgcgtgcctgtgatcccagctgctcaggaggctgaggcaagagaatcgcttggacctgggaggtggaggttgcggtgagctgagatcacgccattgcactccagcctgggcaacaagcgaaactctgtctc

SEQ ID NO: 10989 - protein, 105 aa, Homo sapiens
MSHPIQNINKEIEIVEKNQIEILELKSIITKTENSLEVFSSRLEKSEERINRLQDRSIKIIQSEEQKGKRMKKNEQSIKDLWDSIKHTSICMRGVPEGEEREKGT

SEQ ID NO: 10990 - DNA, 1907 bp, Homo sapiens
  CDS (446)..(1087)
ataagggaaaaaaactccattaaaaagcccagctttcctccatgttagatgtgacttggaaaatgagaaagatttagcaaaattccaccgtgtcttttgccaggctagagacagggagagcagagtaaaaccctcaggctgctgaaatttctaggctgttaggaagcccctcgaattctgtgaaaatgagggtttcttaactcacactgagagcggaaaggggcagacccttttcataactccctcaagtgtgtgttacctttctttaccagcatggtaagcaacaggacatatcccagcctcggacatgtctgtatgatccaaggtacccaaagtcagacagagtaaactcaagcctggcactggctttctgccgcttcatgtgctttggaaaaagcaggagaagcaatagcagcaggagtccccagcagctggagccgcaagaatgaactgcaaagagggaactgacagcagctgcggctgcaggggcaacgacgagaagaagatgttgaagtgtgtggtggtgggggacggtgccgtggggaaaacctgcctgctgatgagctacgccaacgacgccttcccagaggaatacgtgcccactgtgtttgaccactatgcagttactgtgactgtgggaggcaagcaacacttgctcggactgtatgacaccgcgggacaggaggactacaaccagctgaggccactctcctaccccaacacggatgtgtttttgatctgcttctctgtcgtaaaccctgcctcttaccacaatgtccaggaggaatgggtccccgagctcaaggactgcatgcctcacgtgccttatgtcctcatagggacccagattgatctccgtgatgacccaaaaaccttggcccgtttgctgtatatgaaagagaaacctctcacttacgagcatggtgtgaagctcgcaaaagcgatcggagcacagtgctacttggaatgttcagctctgactcagaaaggtctcaaagcggtttttgatgaagcaatcctcaccattttccaccccaagaaaaagaagaaacgctgttctgagggtcacagctgctgttcaattatctgaggttgtctgggacctgcctccaccccatccagggatgagaatggcagccaatctctgtggccaagctccagccaaaaaggagggcacgaccagaaaggaactccctttgcacggaggcttgccccatcaccctctgagccctcccaacacagcacactagtcagcccactgccacgacctccctgccagccagaagcatccgtactgcacgctgtctgagaatgctgggcctggattgcagacagtgccgctgctgatcgcatcaaaaacaaagtcaaaggccatctcacattttacaaatccccagctcatgaacgtgaagctgataggaaatcaccccagggaacccgaaaaagaaacttgattcctctattgctggccttacttgatgtcttttataaaacttgggactacaatactaacctttttttctgaatctgctgttctacccatgtgtctcacattcatttgtattatttcaagaaatgtactaatttccagttcactcaggccttactaatccataccaaattagcctaaagacaaggcattttatattcatttctattttcagcatgtttctaccaaagctattagaaccaacacgtacctctgaatgcccgattataagaagacatgagaagactttaaaagttttggaaatttacagagccatgatttttgaacctaattgaaagaaaaccatctgaattgttgcaggtccacatttttgccaaagatacactctatagatgcttagtagtggcctgatttttttccatgtattgccacgacaaactaaaaatgaactgtgttt

SEQ ID NO: 10991 - protein, 214 aa, Homo sapiens
MNCKEGTDSSCGCRGNDEKKMLKCVVVGDGAVGKTCLLMSYANDAFPEEYVPTVFDHYAVTVTVGGKQHLLGLYDTAGQEDYNQLRPLSYPNTDVFLICFSVVNPASYHNVQEEWVPELKDCMPHVPYVLIGTQIDLRDDPKTLARLLYMKEKPLTYEHGVKLAKAIGAQCYLECSALTQKGLKAVFDEAILTIFHPKKKKKRCSEGHSCCSII

SEQ ID NO: 10992 - DNA, 2504 bp, Homo sapiens
  CDS (319)..(870)
gatgcttctaaattgtgatcactttcaggaggcagcactgcagctggaaggatgcgagcgacctagggtggagtggctgaggcggcagatctgaacttgcggaggataagaacccaaactttgactacatcagtccgcacctcgccagtgaagcaaaggacgggttatctttttttttttctaagactcaaacttgggcacttgatcccttttcttggattgctttggaggagacgatttgctggcaacgttgggaacagtcaggactgtgttgtaactcttacttttaaagcgacagtagaggatcagactttttaaatgtttggaattcaagatactttaggaagaggaccaactctgaaagagaaatcgctgggcgcggagatggattcggtcaggtcctgggtccggaatgtcggagtggtggacgctaatgtcgccgcgcagagcggggtcgccctgtcccgggcccactttgagaaacagcctccttccaacttgaggaaatccaacttctttcacttcgtcctggcgctctatgacaggcagggccagccggtggagatcgagcggacggccttcgtggactttgtggagaatgacaaagaacaaggcaacgagaagaccaacaacggcactcactacaagttacagctcctctacagcaacggtgtccgcacggaacaggacctctatgtcaggctcatcgactcggtcaccaagcagcccatcgcttacgagggacagaataagaatccggaaatgtgccgagttctcctgacgcacgaagtgatgtgtagtcgatgctgcgaaaagaaaagctgtggaaaccgaaatgagactccatcggacccagtcataattgacaggtagggggaaaaagtgatttttcaatcatttttggttccttttcttcatgaacctcaactctgagtactgatccatggagctttgctgtcaagttggtttcatgttatttcaagtcactaaggtcatccaacaaaggcctcctcatgctggcctttcttggaagaagccagaatcttcctttggaacacgtgtctctaaatctgtggtggagtcttttccaggtgcaccagcttcagcctaataagtagtatgtgtggtgcaggatataagcgatggcacctctcctttcgggcagggtatggtctcaatcagttttctagaagaagcaatgtgccccaagttaagtggcacccactttattattctcggtgattgctgcttggctggaagattatcaattcagattacggtttaggggattatggcaagctctctgctgtgttcagggagattcctttctaccatggaggattgcattctgtgttctatgttatattcagaatgggaaagattctttgggacaagacactaattcactgaaatgtgatttaggcatcctcagctgtctgttttttgtgattggaaacagaacttacaaaccaatgaagaaataccaaattaacttccagaaatcatgtaatttttaagaaaccccatattcccatccctaatttttttctctttcgttaaaaaacggaataattccctattgcttctttctttgggttttcacatttctagccaggtcctgaaatggattggagagaccacagtctccaaagttgttattccaatattccaacgaattctcagttgggagaatggaacctctggcattcttcccagaaagccagcttggtttcttcgtggaaagtatagcatagcctaggaactgaggaggctggaattctgatcttgtcctagcttctgaccttggacaaagcactcagcatctttgttcttcaataatataatgatgggttaggaggtgcagtcactgctgtaggcttcaagaggctactgaaatatcaatggcagctttgcagtgttctctgagatgcttgaagaggatgatgggcaaatataaaatgtttgttggatgtgtatagtgtctttgccattttagaaggttccagtgagctgcgttttagggagctattggggttgctctggtcttttttgaaagtacagagaagcttaaatatatagagttgcaaggactctttggagtcagtcattttcctcatctagctgaaaaatctgaacgctgagcggtggcatgacttgcccgtggttgtgcagctggttgggcagagctggcattagaacacagctgtccttacttccaggctgggtgccgtaactcacgcctgtaatcccagcacttaggaagaccgaggtgggcagatcacttgaggtcgggggtttgcgaccagcctggtcaacatagtggaccccagactttactaaaaatacaaaaattagtcaggcatggtggcacatgcctgtaatcccagctacttgggaggctgaggcaggaaaatcgcttgaacccaggaggcacagattgcagtgagccaagatcacgccactgcactccagcctgggtgacagagacagtgagactctgtctc

SEQ ID NO: 10993 - protein, 184 aa, Homo sapiens
MFGIQDTLGRGPTLKEKSLGAEMDSVRSWVRNVGVVDANVAAQSGVALSRAHFEKQPPSNLRKSNFFHFVLALYDRQGQPVEIERTAFVDFVENDKEQGNEKTNNGTHYKLQLLYSNGVRTEQDLYVRLIDSVTKQPIAYEGQNKNPEMCRVLLTHEVMCSRCCEKKSCGNRNETPSDPVIIDR

SEQ ID NO: 10994 - DNA, 1349 bp, Homo sapiens
  CDS (148)..(459)
aaggtcgacagcccggacgtgaagaggtgcctgaatgccctagaggagctgggaaccctgcaggtgacctctcagatcctccagaagaacacagacgtggtggccaccttgaagaagattcgccgttacaaagcgaacaaggacgtaatggagaaggcagcagaagtctatacccggctcaagtcgcgggtcctcggcccaaagatcgaggcggtgcagaaagtgaacaaggctgggatggagaaggagaaggccgaggagaagctggccggggaggagctggccggggaggaggccccccaggagaaggcggaggacaagcccagcaccgatctctcagccccagtgaatggcgaggccacatcacagaagggggagagcgcagaggacaaggagcacgaggagggtcgggactcggaggaggggccaaggtgtggctcctctgaagacctgcacgagtgagtgtcccgggccgtggggtttggactcctgagcggcagcggtgtgacgcgcaccctgggtccgagccgctcctcctgtgccagtccctctgggatgggtcccagggatgtcgtccttactcgggcctcccaccttcacagctgaccccagggccccgctggctggcacttccggcggcccctacagagaggcagctccagggctttgagctgcctgcccctggcctcctgggaaggtggcttcttgccgagcctccagggtggcccaggtaggtaggccccgagcacaggcacccggctatctgacggtgcctgtgcccatcactgtgggctgctgtctggtacaaggctcagtggagtcactcacttacccagcagctgccttgtgctatgcctggctggcgccagcgtggggaccctggagatggttgtggtctctagtggcagaagacaggcagataggagggcggcactcgagcctcaggtgccacaacgggggtacactcctcggtgcccatcccacccaaccgccctacaggcagggcaggggcgggagggcatcctcacaccgcctttgctgttcccaccagcagcgtacgggagggtcccgacctggacaggcctgggagcgaccggcaggagcgcgagagggcacggggggactcggaggccctggacgaggagagctgagccgcgggcagccaggcccagcccccgcccgagctcaggctgcccctctccttccccggctcgcaggagagcagagcagagaactgtggggaacgctgtgctgtttgtatttgttcccttgggtttttttttcctgcctaatttctgtgatttccaaccaacatgaaatgactataaatggttttttaatgaaaaaag

SEQ ID NO: 10995 - protein, 104 aa, Homo sapiens
MEKAAEVYTRLKSRVLGPKIEAVQKVNKAGMEKEKAEEKLAGEELAGEEAPQEKAEDKPSTDLSAPVNGEATSQKGESAEDKEHEEGRDSEEGPRCGSSEDLHE

SEQ ID NO: 10996 - DNA, 1876 bp, Homo sapiens
  CDS (218)..(1036)
ggggggagaaattacagactctcagactgaggatagttatgacgaagccattaccagtgaaggcaatgtaactgcagaagatagtgaggatgaagatgaagacaaaatttggcccccatgtattagagtaattgtcattagatcacctgtgttgcagataggatcactctttatcattactgctgtaaaccctgctacaattggaagagaaaaggatatggaacatactctccgaatccctgaagttggtgtcagtaagtttcatgcagaaatttattttgaccatgacttacaaagttatgtccttgtggatcaaggcagtcaaaatggcacaattgttaatggaaaacagattcttcagccgaaaactaaatgtgacccttacgtacttgagcatggagatgaagtcaaaattggagaaactgtcttatcctttcacattcatcctggcagtgatacctgtgatggctgtgaaccagggcaggttagagcccaccttcgccttgataagaaagatgaatcttttgttggtccaacactaagtaaggaggaaaaagagttggaaagaagaaaagaattaaagaaaatacgagtaaaatatggtttacagaatacagaatacgaagatgaaaagacattgaagaatccaaaatataaagatagagctggaaaacgtagggagcaggttggaagtgaaggaactttccaaagagatgatgctcctgcatctgttcattctgaaattactgatagcaacaaaggtcggaagatgttggagaagatgggttggaagaaaggagagggcctggggaaggatggtggaggaatgaaaacgccgatccagcttcagcttcggcgaacacatgcaggcttggggacaggcaaaccatcctcatttgaagatgttcaccttctccaaaacaagaacaaaaaaaactgggacaaagcacgagagcggtttactgaaaacttcccagaaactaagcctcaaaaagatgacccagggaccatgccttgggtaaaagggactttagagtgaaggctaatcatagaaagaaaacctctagtttttttaaaaatagaatttggaaacttattttttctccccaaaagaatcagcagcacaggggaactatgtcacagtttacctcttcctgattcagaaatgtgtatggtttgcagcttttaaaaaccatttttttaaaactaataaatagtgactgaaccaatttatgcagtaaatagactaaagttcacagggcacggatgagtttatcaaacttcgttattttatcttcatttacaacatccatataagcaactagccatataagcaaaattcatagaactactaatgacttaagtgtacatctgttcttgtctccatatattcatgtaagatgcacaacaaaagaaacatcagaagtttataaaaataaatctgactatacgcatcctcatttattccctttagaacctaggtaaaaaatgttgcgaaaacatgggtagtggcgcatacattttgttatccttgaaatagcctaagtaatgttattgaagaactaatgaacaggtaacatattgtagaaaattagtctttcattgttttcttctgtgaagaatctgttgctatgtactgtatattcagcatttatatttggtttgtttcatagctaatgaggtatttagatatgaacaactgaatacatattgaaatagtgtgctggcttttgtagttttgataaagaccattgcaggcaatggaattgtgccagagaaatctgatttctagtacaaaaggaatacttagccagggcctcaagctcaagatacttattgaaaacatcctcaattgcaataaaaacattataacatg

SEQ ID NO: 10997 - protein, 273 aa, Homo sapiens
MEHTLRIPEVGVSKFHAEIYFDHDLQSYVLVDQGSQNGTIVNGKQILQPKTKCDPYVLEHGDEVKIGETVLSFHIHPGSDTCDGCEPGQVRAHLRLDKKDESFVGPTLSKEEKELERRKELKKIRVKYGLQNTEYEDEKTLKNPKYKDRAGKRREQVGSEGTFQRDDAPASVHSEITDSNKGRKMLEKMGWKKGEGLGKDGGGMKTPIQLQLRRTHAGLGTGKPSSFEDVHLLQNKNKKNWDKARERFTENFPETKPQKDDPGTMPWVKGTLE

SEQ ID NO: 10998 - DNA, 2775 bp, Homo sapiens
  CDS (2355)..(2618)
gttttactatgttgttggctattttatcgttgagttgtaagagttctttgtatattctagatacaaatcccttatcaggtatatgacttgcaaatatcttctcccattctgtgtgttcctttttgactttcttgattgtatgccttgaattaaaaaaaatgcctaattttgatgaattccaagtttatcattttttttaattttttcacctgtgcttttggtgtcatctaaggaggttttgcctatgcggtcatgaatatttactcatctgttttcttctaagagtgataatagtttcagctcttatattgagatatatgatatattttgagttagtttgtgtgtgtgtggtgtgaggtaggggttcagcttcattcttttgcatgtggatatccagttgtctcagtatcaattgttgaaaagacatttcccccttggatagtcttggtgctcttgtcaaaaaccaaataactgtaaatggagcaattgtagtttgaatggaatgggtcagcacttggtggcagcaggggtcttggctatgtagtttcataagctcccactcctggagagcctctgttttcctctcaaagccaggtttttctgtctcgctgcgttttggtgcctgaaaggcttgggtgggcatggtacctggagtactgttgttcggagcacaaagtgaggagaaaagaccactctactttgtgggaggtccttggggcagtttgggcagcagtgcctcccccaggagtcagggtccccaccccagaggaatgtccacagagcagagccattggcctgagctggactgaaaaagaaagagccaggtggggagaggatttgatttctcccttggtctaaagcaggcagctgacattgggtgagggaatggggcaggcctccatgtgctatcgggaatccccaggaggtccctacagaaaacttccacccccagcccagcttgtttatcacagcccttcagtggtagcttcctcctgtggcttgatccaaacgggggctgcatatgtggccaaaatgcacataaccctgtgaggcacagcatagcagcttatcttccctgaaagtggaaggacaaaagcaggacaaagatgaccaagccagggtgggagagaggggaggagacactggaaggggaggtgaaggggcagactagggaggccaggaccaaggcagactctcatgcaccaggcatattctgcccagccaagggctctggcattcagatgagggagagggagaggaaagaggagagaatccagtgagaccaatccatgaagtgtcgggaggaccctggaagcaaaggctctggactcaggtggcatcaatgggactaccagtttccagtgaatatgtgggagtggcctaggtccagctcaatcagaagcccatttgttcaaggccctggtattactgaaggcccagccctgtctcacctgccagaaagcacgtggcctctccctggctaggctaagggctggttgacggcatcataaaaggaatctgcctgggcgccctcaatttgtttcagtttcctcccccaaggccaagaagggattgggttgcctctgttgttgttgctgctgctgctgctgctgctgctgctgggggttggaaaagaggaatttgtgtgaccagatccccttattgtatagaagaagagaaatgtgagcattcagagatggtgagatgtcagacacccagccacacagccagtgagagacatgttggggacagggccaggcctgccagttcatggcccaggggtctttctcatgagatcaactgaccagtgtgtcttagcacctgccatgcaaatagaaggccctactgctgtcatctccacgtattccagaattactcagctgttctatgcaagccaagtcaacaccaatgtcataaaggagagactaaagtaattctctacacagcacatacacggcatatatggcctgtatgcttcctggacagccaacaggggtgccgagggagtgagtccctcagccttgcctggggccttgctgatacttcagtttgcctcacaaacacggttaccttccgtgacatgaaggaggcacacgcgggttgacccctgaccctgtctgcttgttagaatcacgtcgggaacccgggacaggcttagaagcccaggtcccacctcccacctgctgaatccaaatctccagagcgtggcctgggaaatcaaatttgtcagcttccttcccaggggactttgatacatccaccccagtggaaaccagcagcctcctttagtcaagcgaatgtttccctgactgtcaccttctccccctgtataagatgcagattgttagcggtaaatggtacctggattccaacctcagttctccactgcagttggggagatctggccagggcaagccacactgctccttcaggcacagccttgttcatcccgcactcacctgtgttctcttcctctctgtaggacgcacaagaccagccactgctaccgcatcacgtaccgccacatggaacggactctgtcccagagagaggtcaggcacatccaccaggccttgcaggaggctgcagtccagctgttgggtgtggagggcaggttctgatgtcaccacttcactcaggctgcagccctcttggggctccaggatttgctgaaagagaaaaagatatggtttgtgaactggggcatcaatcatcttttgacaaatggatcagttttaggactttcagaaaataaaagatcgctcttgaaaagct

SEQ ID NO: 10999 - protein, 88 aa, Homo sapiens
MVPGFQPQFSTAVGEIWPGQATLLLQAQPCSSRTHLCSLPLCRTHKTSHCYRITYRHMERTLSQREVRHIHQALQEAAVQLLGVEGRF

SEQ ID NO: 11000 - DNA, 1705 bp, Homo sapiens
atctaaaatgcttttgttttaaatggacaaaatttgccaaacacctttttacctttctgcctggaaaaatgttttgatgtgttggctttccacctcctgatttttgtgtgtggctccttcccctaccccctcccgccccgccaaatgttgttgtacactgccttgtctgtttcatttccacgtgtgggttcactgaccacattagctggtagctcctggtattgtatgcttcctatccagaatttgttccatagaaaacctgtgtcttcaacatacttgctttgaaattattttgatctgtatcagcaggaataggttttgagatcctggatattaacttctgggtgccactctctctagaagctaattgactgatttgtggtggaggcgagatgagagtctatacatttgacctatttcacagagcttaccttgcaagctattgaaatgcaaatacagactagcttagagattctaagaattcacacattcagttctttgtttttttctgaaaaataagcattcaaatttcatgcacattctattattcatgtgccttatatttaggttccgcttgtatgtctagataaatcttatcaccattatttaaaatttcatgaatgaaactttgcatctttaatactaacactagcctagaccaatcaaaataatttgaaatgcagcccttaaatgaactcctccgtgtgtctgtatatatacatttacatatacacctttgccaatgccttatctaccactgtcttttaaatctactccatgtaaaatggggaacgattcaaaacctcttttatattgttgtgcctcagaaaaaaatggaatctttggaatgtgctgcttaaaaggcttctatgagatagcacattaatgtcaaagcacattttctttgtttgatagttgtcacgttagtggtcctgaaacagaatactcttttccgtgctgtccattcatttgtatttttaagtcatccaccacttttcatttgtcaagcacttgaaaaagaatattgtgtgtcagcaagatagttcctctgtcatttgatctacaagttagccttcctgaacagttaatgccttcagaatcctttttttctctgagctatggtcgcttaacagagaggagaatgattttcttagccagatccaagactccctcaactgagtctactgcctaatgcctattggtgctagcactaacattttctgatacagtcttcaatatgtgatgaggctgagtatccggcattaagtttggaagaaggaacatagacttaagtgaagttctttgttaagccttatgtccccatagagtgttgatgatggtttgaattgagtcactttctgtcactttctgggagccatatcaaaaaagactttaccagttctctttgctgcctttgaagttctgtaatttctaggtagggtcaattttctgggaaaaataacaaatattcatgggaattttgatacacagcctgggtgacagagcgagactccatctcaaaaaataaaacaacaacaacaacaaaaacacaaatattagctggaggtggtggtgggagcctgtaatcccagctacttgggaggctgaggcactagaatcacttgaactagggaggcggaagttgcagtgagctgagattgtgccactactctccagcctgggtgctggaacaagactccttctc

SEQ ID NO: 11001 - DNA, 1715 bp, Homo sapiens
  CDS (136)..(1353)
acacccgacgctctggcccacacagacgctactctgtagcatctcaggttccctctggctgcactctggaggaccacactcgttttctttttggctgccagaggcccccgcatccaccgctgagctgggagaaagatggcggcagccgtgcgacaggatttggcccagctcatgaattcgagcggctctcataaagatctggctggcaagtatcgtcagatcctggaaaaagccattcagttatctggagcagaacaactagaagctttgaaagcttttgtggaagcaatggtaaatgagaatgtcagtctcgtgatctcgcggcagttgctgactgatttttgcacacatcttcctaacttgcctgatagcacagccaaagaaatctatcacttcaccttggaaaagatccagcctagagtcatttcatttgaggagcaggttgcttccataagacagcatcttgcatctatatatgagaaagaagaagattggagaaatgcagcccaagtgttggtgggaattcctttggaaacaggacaaaaacagtacaatgtagattataaactggagacttacttgaagattgctaggctatatctggaggatgatgatccagtccaggcagaggcttacataaatcgagcatcgttgcttcagaatgaatcaaccaatgaacaattacagatacattataaggtatgctatgcacgtgttcttgattatagaagaaaattcattgaagctgcacaaaggtacaatgagctctcttacaagacaatagtccacgaaagtgaaagactagaggccttaaaacatgctttgcactgtacgatcttagcatcagcagggcagcagcgttctcggatgctagctactctttttaaggatgaaaggtgccagcaacttgctgcctatgggatcctagagaaaatgtatctagataggatcatcagaggaaatcaacttcaagaatttgctgccatgctgatgcctcaccaaaaagcaactacagctgatggttccagcatcttggacagagctgttattgaacacaatttgttgtctgcaagcaaattatataataatattaccttcgaagaacttggagctcttttagaggtccctgcagctaaggcggaaaagatagcatctcaaatgataaccgaaggacgtatgaatggatttattgaccagattgatggaatagttcattttgaaacacgagaagccctgccaacgtgggataagcagatccaatcactttgtttccaagtgaataaccttttggagaaaattagtcaaacagcaccagaatggacagcacaagccatggaagcccagatggctcagtgaatccttgcagaacttctgtgcacatgacatctttttccatgttgtgcagatcagtttcactatctccaaagcatttgcatcatgaccttatacatttcaatcccttttatgctggattccgtttaaagaagacattattagagcaggaagtacaagcatttaaaatatgtagttcccatatatttcagggtctctgtgtattaagctaactcagatgttttgaaagctttttctttaaacagaggtgaaatatctgtggctaaaaagtttgagatttgtgataactttgtagtcatgtaaaacttaagtgcttcatgcctctccaaatgtggttattctaataaatggagaaatgagcc

SEQ ID NO: 11002 - protein, 406 aa, Homo sapiens [sequence omitted]

SEQ ID NO: 11003 - DNA, 1582 bp, Homo sapiens
  CDS (5)..(529)
aattatggcgacctccgcgacgtcgccgcacgcgcctggttttccagctgagggtagatgcggttactatgtggaaaagaagaaacggttctgcaggatggtggtggccgcagggaaaagattttgtggtgaacacgctggagccgcggaggaagaagatgctcggaaaagaatcctgtgtcctttagatccaaaacacacagtatatgaagatcaactagcaaagcatttgaaaaaatgtaactcaagagagaaaccaaaacctgatttctatattcaagatattaatgcaggcttaagagatgaaacagaaatacctgaacaattagttccaatttcttctctatctgaagagcagttggaaaagttaattaagaaattgagaaaagcaagtgaaggcttgaattctacacttaaagatcatattatgtcccatccagcattacacgatgcacttaatgaccctaaaaatggcgattctgcaaccaagcacctgaaacagcaggtatgtttaggctatagtaactactaaacatggcctttgttcatttgttaaaactgttttaaatgtaattattaataagattttattttgtttacctttgagggtaccaaatatttccatttcaaaaatatatagaaacatatacaaaaaattgagggcatggatgtgattctgagtaccgtatattaaatatttaaaggcaagagagaaaaattttaagtcaaatacaaattatcaatgtaagcatactgccttatgcagaaattaccttgctgttttcccatttgaaccaaatgtgtttactctagtttataaaataatcttgtgaagtttgcaggcttctattttaggtaacattgaaaatttaaagttacttggtccaagaagatgctttgttgagtttggagcgggaaagggaaaattatctcattgggttgatattgccttaaaagatgctgaaaaagttcacttcatcctagtggaaaaggtgaccacaagattcaaggtggatggaaaacacagaaagaaaaattcagtgtttgaaagacttcaaattgatattcaacacttgtgtttgaacaagattcctgtgttaagagaagaaaaactacctgtggtaggaattggaaagcatctgtgtggtatggcaacaggtacgtaaacatactgataatgtttacattaatgcattaagttttggcctaacctggccccaaccatttcagtggtctcttttgaatagatatcttatgtttacaactcaataatctttatagagcactggccctgtgctttattagatgcatagctttcctatttatctgctcatattggccattttgcaggatgaattaagagttttgtatgtaaatactgcatcacattagaccttaaagttctttgggttaaatttcaaccagaaaaggaaaataagaccatttatggaaactgtatgattccacctagaagctactgattttttagagtagttgcttagaaagaactcagaaacctcttctactaaaagactattgtgtttcaggattctggggaaaaagaaaaaaataaatgttagac

SEQ ID NO: 11004 - protein, 175 aa, Homo sapiens
MATSATSPHAPGFPAEGRCGYYVEKKKRFCRMVVAAGKRFCGEHAGAAEEEDARKRILCPLDPKHTVYEDQLAKHLKKCNSREKPKPDFYIQDINAGLRDETEIPEQLVPISSLSEEQLEKLIKKLRKASEGLNSTLKDHIMSHPALHDALNDPKNGDSATKHLKQQVCLGYSNY

SEQ ID NO: 11005 - DNA, 2089 bp, Homo sapiens
gaactttatagttttttcaaaatggcagatacttgccttatcagagcagaaggttagcttggtgattgtacaagtgttgtcaatttctagtttatacttaatattcctttttctcacctgctacttacatcaccaaacactcacacagtctgattataaaatattgagactgacagtcatatagaaccagtttcataacctcattaccatgtacacccagctcagtacctctccagactgcaaaccctttgagggttccggcctggcttttctttatatttggggaaatgttagagaaaacagcatctaaaactggaaaccttgacttaaattagccatttcttctcatcctaaattgagagacatgagttctaaatggcagagaccatttataggagaatgccaaagagagcagaagagaatgggaagcctttcccacagcagaaactttccacagcagagacaatagactgatccctatcacatcccctaaatatttcttctgacacctggatgggttttgacaatcatagaagcaaactggacagagtgccatttacttctgtgccatttcatactggggctttgcacagaataggaaatgcattgtctaggttcctctagacctctaggttcccttctattctcagaagaaacttaagttatgcttgagtataacttgagtaggggccaggtaggggcagcattgtgggattcagccacaatggtgtgattcaatctgccctctggtctttggttccatttaacgtgcatttattgagcagctaacttgagtcagcactgtactaggtgctatataccagggatgtacaaaacagatttgatgttgctgattaagaaagtatctgtacaagttacaaactcacctcccagagcacttgccctggagccctggagcttgccccagtcttcctcctttctaagatcaccacttacccaactgggaagagatcttggtctgcttgttttccatacctctctggtaggaggcaaagcgatctgcttgaaaatatgtctgaaagataatcagcaaataatttcaaatcttggaactgtcattatgaatttactgccattagattgtattgaggtccctgaagtcatggataaccagaagggggaatttgaagattccatttaataaaaagaagttgatacaaagaagctaagatatataataaaatttcatagttggaagagaacatgatgcttctgtattccaattactgattataccttttgttcatagtcttttaaatctgagctctttggcaatcccatttcagccgctggtctcattaggtaccatcctttctccctcagaattaattttcgcttctggaatcagaatgtcattcttaagggtctcccttattagtacctttaggaccaagttcaaactacctagcaggacataacaggcccttcacaatataactccattctattattttgacctcttctctccaacctcctttatgcactagccacagtaagtgtctgctattcacacttcagcacatatgtctctatgctttcatgcctctgtagaagttgtgccttctgcctgcaacgcctctcacctccacactcaccacaattgcaccctccttcacttcctttccatcctttgaactcttgcctatgatccttttgtagttcataagcatgatgattgagtgttcatacacatgtgtgaggtatgtcgcccccaaaccttttatgacattggcacattacctgtctgacatgaaagaaaaataataataaaaattttaaaaatgggcagccaggcgccatggctcacgcctgtaatcccagcactttgggaggccgaggcgggcggatcacgagatcaggagatcgagaccatcctggctaacacaatgaaacaccgtctctactaaaaatacagaaaattagccaggcgtggtggcgggcacctgtagtcccagctactcgggaggctgaggcaggagaatggcgtgaacctgggaggcagagcttgcagtgatccaagatagcaccactgcactcctgcctgggcaaaagagcaagactccatctc

SEQ ID NO: 11006 - DNA, 1709 bp, Homo sapiens
gaaagaaaaagaaaaaagaaagagagattccaaccagcctttcttccctggttccctgacagctcagagttaaccattgtgcccctaagcctaacagcagctggagctgatagcctttcacagggcctgccagcagccttggagaaaccacgagcccatttaacaggcaggacgctgaggctctgataacaagtgcggtttcggacaagagcgggagaggagatggagaaacagaccctcgtgcgtggctggtggggatggaacaaggcccagcctggcagcttctcacatggtaaacacggaattaccatagggcccagcaatcccactcctggggatagaccccacagaactgacagcagggactgaaagaggtgtttgcacacacaagtgcacagcggcatgattcccaacagccccagggtggaagccaccccaggcgcccatcagtggataaacacagcatggtccaaccagacagtggaatattacgcagccatgaaaaggaagggaatccagacacgggctacagcgtggatgaaccttgaggacctcacgctcagtgagaggatccagacacaaaaggacgtatcctgtgtgatcccactcctgggaagtccctagagtcgtcagattcacagagacaggaaataggatgagtgagtgccaggggctggggagggggacagggagtgagtgtttcatggggacagagtttcagtttgggaagaggagaaagttctggagaggatggtggtgatggcggcacaacattgtagtgagaaaagagagagggagaggaagggctgaaagccccaagccccatcttccggctccagcgtcatatgagatgcgtgttcccgcggcctcaccgttgagtttgaaggcgtgatgtcagaatgcaggcccagcagggacaccccgggagatggtgggggtggctggcagggcgggtttcacctggactgcaccagcccaggtgtgacgggctctgggccagacccaggcacccaaggtgagaaggcagcatctctggtctcgggatacccaggcctccccgaggcggcagaactccggccgtacctcgcagcagctggtccgtggcacccatggtatgtcccattcatgcagtgcctttccagcctcttccagaaagaatttaattcacccgttcgcatatgaccacgggagaatcgcttgaacctgggagacggaggttgcagtgagccatgatcgcaccactgcactccagcctaggcgacagggcaagactctgtctcaaaacaaaaaaaaaaaaaaaaaaaggagaaatttccagaacaggcagatccacagagaatatgcatggatgtgtggttggaggagacgggggtgactgctaatgcggacggggtttccatttaaggcgatgaaacagttctggaattcagccagcacagtggctcacacctgtaatctcagcaacctgggagtccgaggtggggggattgcttgagaccaggagttcaagaccagcctgggcaatatagtgagaccccatctctagaagaaaagaattttaagttagccgtgcatgctggttcatgtctgcagccccagctactctggaggctgagatgggaggatcgcttgagcccaggaattcaaggcttcaccgagataaggaggtgccactgtagtccggcctgggcaacagatcgttaactctt

SEQ ID NO: 11007 - DNA, 2297 bp, Homo sapiens
  CDS (78)..(1337)
agcctcggggcttgacgggattgtggcggtcctctctcccaattcggaagctacagctacctccggacgctctcaagatggcgacctctctgggttccaacacctacaacaggcagaactgggaggatgcggacttccccattctgtgccagacatgtcttggagaaaacccatatatccgaatgaccaaagaaaagtatgggaaggaatgcaaaatctgtgccaggccattcacagtgtttcgctggtgccctggagtccgcatgcgtttcaagaagactgaagtgtgccaaacctgcagtaaattgaagaatgtctgtcagacctgcctcttagacctagagtatggcctgcccatccaggttcgtgacgcaggattgtcttttaaagatgacatgccaaagtcagatgtcaacaaagagtactatacacagaatatggagagagagatttctaactctgatggaacacggccagttggcatgctggggaaagccacatctaccagtgacatgctgctcaaactggcccggaccacaccctactacaaaaggaatcgaccccacatttgctccttctgggtgaaaggagagtgtaagagaggagaggaatgtccatacagacatgagaagcctacagatccagatgacccccttgctgatcagaatattaaagaccgttattacggaatcaatgatcctgtagctgacaagcttctaaagcgggcttcaacaatgcctcggctggacccaccagaggataaaactatcaccacactatatgttggtggtctaggtgataccattactgagacagatttaagaaatcatttctaccagttcggagagatccggacgatcactgttgtgcagagacagcagtgtgctttcatccagtttgccacacggcaggctgcagaagtggctgctgagaagtcctttaataagttgattgtaaatggccgcagactgaatgtgaaatggggaagatcccaggcagccagaggaaaagaaaaagagaaagatggaactacagactctgggatcaaactagaacctgttccaggattgccaggagctcttcctcctcctcctgcagcagaagaagaagcctctgccaactacttcaacttgcccccaagtggtcctccagctgtggtgaacattgctctgccaccgccccctggcattgctccacccccacccccaggttttgggccacacatgttccacccaatgggaccaccccctcctttcatgcgggctccaggaccaatccactatccttctcaggaccctcagaggatgggagctcatgctggaaaacacagcagcccctagcaccttgtcaccactctggggctctgtggaagaaagggcacttaaaactcccagtaaatcttggaataaatatatttttccttcccttgtagtttccatggtagctgaatgtgctcagatgtgagcagtcagagactgacagccatgctttcctatacttgttcaaaggatcgatggaccgtaaataagctgccattaacacatctggttactgctgtaacatgactaataaaaccgaacgcctgttccccttacccgtgtgggggacacgcagatgagtgaattggaatgtccagcagagttaccctcccaattatatgttcattttgtatattttttggtcgggggaaaaattgacctgcagtaaaaaaacctttgaccatttttatgtccattggatactttcctttttatcatcttaaaaaaagataactagtactaatcattgtagtggcctaagtgtgatttaactcttgaagtcacaccctccgaaagatgagtagaaaccagcaccagcacagcccagatcttctctttcctctccttttcctcatttattcctaaaggaatctgaccattttacgtctctacggcccaaaaaaagacaaaaataaaaattcctttttattcctgtcaactggatggaaacacaaatttcatggagctgtgtaccatcgaagaaacctggtgtctggcatgaaattactgtaaagaacttcctgtaaaacacgttctttaacaaactgaaatgaaaagcattggagcgtctgaatgaaagacgtgacctcctgctgggactctgatggtcttcagcattcaccttcgtgtgtcttcagtgtctcattgtcatccctgcttctgtttggtcttagagtgtttggatataactgaattgtagatggtaaaggaaatttgatgtgttttttgtttttaaataattaaaacgggtcaattttt

SEQ ID NO: 11008 - protein, 420 aa, Homo sapiens
MATSLGSNTYNRQNWEDADFPILCQTCLGENPYIRMTKEKYGKECKICARPFTVFRWCPGVRMRFKKTEVCQTCSKLKNVCQTCLLDLEYGLPIQVRDAGLSFKDDMPKSDVNKEYYTQNMEREISNSDGTRPVGMLGKATSTSDMLLKLARTTPYYKRNRPHICSFWVKGECKRGEECPYRHEKPTDPDDPLADQNIKDRYYGINDPVADKLLKRASTMPRLDPPEDKTITTLYVGGLGDTITETDLRNHFYQFGEIRTITVVQRQQCAFIQFATRQAAEVAAEKSFNKLIVNGRRLNVKWGRSQAARGKEKEKDGTTDSGIKLEPVPGLPGALPPPPAAEEEASANYFNLPPSGPPAVVNIALPPPPGIAPPPPPGFGPHMFHPMGPPPPFMRAPGPIHYPSQDPQRMGAHAGKHSSP

SEQ ID NO: 11009 - DNA, 1244 bp, Homo sapiens
  CDS (35)..(1102)
tcgttggttccggaggtcgctgcggcggtgggaaatgctggcgcgcgcggcgcggggcactggggcccttttgctgaggggctctctactggcttctggccgcgctccgcgccgcgcctcctctggattgccccgaaacaccgtggtactgttcgtgccgcagcaggaggcctgggtggtggagcgaatgggccgattccaccggatcctggagcctggtttgaacatcctcatccctgtgttagaccggatccgatatgtgcagagtctcaaggaaattgtcatcaacgtgcctgagcagtcggctgtgactctcgacaatgtaactctgcaaatcgatggagtcctttacctgcgcatcatggacccttacaaggcaagctacggtgtggaggaccctgagtatgccgtcacccagctagctcaaacaaccatgagatcagagctcggcaaactctctctggacaaagtcttccgggaacgggagtccctgaatgccagcattgtggatgccatcaaccaagctgctgactgctggggtatccgctgcctccgttatgagatcaaggatatccatgtgccaccccgggtgaaagagtctatgcagatgcaggtggaggcagagcggcggaaacgggccacagttctagagtctgaggggacccgagagtcggccatcaatgtggcagaagggaagaaacaggcccagatcctggcctccgaagcagaaaaggctgaacagataaatcaggcagcaggagaggccagtgcagttctggcgaaggccaaggctaaagctgaagctattcgaatcctggctgcagctctgacacaacataatggagatgcagcagcttcactgactgtggccgagcagtatgtcagcgcgttctccaaactggccaaggactccaacactatcctactgccctccaaccctggcgatgtcaccagcatggtggctcaggccatgggtgtatatggagccctcaccaaagccccagtgccggggactccagactcactctccagtgggagcagcagagatgtccagggtacagatgcaagtcttgatgaggaacttgatcgagtcaagatgagttagtggagctgggcttggccagggagtctggggacaaggaagcagattttcctgattctggctctagcttccctgccaagattttggtttttatttttttatttgaactttagtcgtgtaataaactcaccagtggcaaacc

SEQ ID NO: 11010 - protein, 356 aa, Homo sapiens
MLARAARGTGALLLRGSLLASGRAPRRASSGLPRNTVVLFVPQQEAWVVERMGRFHRILEPGLNILIPVLDRIRYVQSLKEIVINVPEQSAVTLDNVTLQIDGVLYLRIMDPYKASYGVEDPEYAVTQLAQTTMRSELGKLSLDKVFRERESLNASIVDAINQAADCWGIRCLRYEIKDIHVPPRVKESMQMQVEAERRKRATVLESEGTRESAINVAEGKKQAQILASEAEKAEQINQAAGEASAVLAKAKAKAEAIRILAAALTQHNGDAAASLTVAEQYVSAFSKLAKDSNTILLPSNPGDVTSMVAQAMGVYGALTKAPVPGTPDSLSSGSSRDVQGTDASLDEELDRVKMS

SEQ ID NO: 11011 - DNA, 759 bp, Homo sapiens
atattccatggagaccctggctggaggattgcaggagagtcccaggaggcaggactgccaatggcaccaggcttcgcagccatgcacctgcagccctcaggcagcactgtccattgtcatacgagtgtggcaggtgtgaggcatcgcatctgctcaccccggggataatgcacagcagctacaggcagatttcgggccagagagcaaccgagtgagccttgcagcctctgctgccagcacaggcttgttccttcaacactggtggagagagacacgctgtcatcaggcccaagaaatactgccttccccatcctatccccggtcactgggtgcccgcagagtgtcccagaggagggagggagggaccctccactggttcaaatggcctgttctcagagatgcagcaatggaccctcgtgaatactgaactgataatcatgggaaggagactggctctcctggattccctcatgattcctctgagtgacaatgtgatgttggccgactgtgtcttcttcagaatatcatatacacttgaggtctccaggagcctccaattacattattttcctggctcatacagtgacaagtaattcttatcctggattcctcgttactgagacttttcttgccttttttgttagcttatgatttattctaggacttcctccaacaggttatacttaactgtctacctcagtctctggaagttttaaaaatgttcagctaaataaaagaagtagattctccctggaaacc

SEQ ID NO: 11012 - DNA, 771 bp, Homo sapiens
  CDS (63)..(506)
gtcactgcaaggcgccgggggacacgttggctgcgttttcggcgggcttcccgggtacaaaaatggctgtggctagcgatttctacctgcgctactacgtagggcacaagggcaagtttgggcacgagtttctggagttcgaatttcggccggacggaaagcttagatatgccaacaacagcaattacaaaaatgatgtgatgatcagaaaagaggcttatgtgcacaagagtgtaatggaagaactgaagagaattattgatgacagtgaaattacaaaagaagatgatgctttgtggcctccccctgatagggttggccgacaggagcttgaaattgtaattggagatgagcacatatcttttaccacatcaaaaataggttctcttattgatgtaaatcagtcaaaggatcctgaaggccttcgagtattttactatttggtacaagacttgaaatgtttagttttcagtcttattggattacacttcaagattaaaccaatttaaattgtatgttttcaggctgtttgtatatttaattaagggatgggaggggttatttgtcatttacagtattggggtttttatgaatgtgaagcaaacaaaaaaaatttgtatgtaaactgaaaataagaaaatacattagcaagcttaatggttatccttacttgagtccacatgggttggacagtccccacacacattaaattctgtaaatgaaagccaccttttgttaaaaatttgctctaataaaacataccaaatcctg

SEQ ID NO: 11013 - protein, 148 aa, Homo sapiens
MAVASDFYLRYYVGHKGKFGHEFLEFEFRPDGKLRYANNSNYKNDVMIRKEAYVHKSVMEELKRIIDDSEITKEDDALWPPPDRVGRQELEIVIGDEHISFTTSKIGSLIDVNQSKDPEGLRVFYYLVQDLKCLVFSLIGLHFKIKPI

SEQ ID NO: 11014 - DNA, 1309 bp, Homo sapiens
  CDS (127)..(531)
aacaagaggggtcaagtgacacaaccagctgactcccgtagaggaagacactgtggaggccagttctggagctattgcagcctcggttgcccggccggggacccgagccgaaaagttatcgtcagaatgtcgggcaaagaccgaattgaaatctttccctcgcgaatggcacagaccatcatgaaggctcgtttaaagggagcacagacaggtcgaaacctcctgaagaaaaaatctgatgccataactcttcgatttcgacagatcctaaagaagataatagagactaaaatgttgatgggcgaagtgatgagagaagctgccttttcactagctgaagccaagttcacagcaggtgacttcagcactacagttatccaaaatgtcaataaagcgcaagtgaagattcgagcgaagaaagataatgtagcaggtgttactttgccagtatttgaacattaccatgaaggccaaagcagtggaactactggtggaactagcttctctgcagacttcttttgttactttggatgaagctattaagataaccaacaggcgtgtaaatgccattgaacatgtcatcattccccggattgaacgtactcttgcttatatcatcacagagctggatgagagagagcgagaagggttctataggttaaagaaaatacaagagaagaaaaagattctaaaggaaaaatctgagaaggacttggagcaaaggagagcagctggagaggtgttggagcctgctaatcttctggctgaagagaaggacgaggatcttctatttgaataatctttcctgttctggttctttgagaaaccctaacactggcttcattttaattcacagtgtgtaggtttgatttgtgtggctatttattttttggcctaagaatttcactggttgtaaaatttacctagatgtctatttatgggattacttttgcagaatcataatttagcaaccatttatcatggatgaaagagatacctttgggagatgtacagcagaaaaaaaggagaaatgaagactggagaaacaaaatatgttatatatttgccaataattcacatgctgcctcagtgtcctcagatcccaggctgcacataaggtccatttgcctgagtattattacatacctccttctccagaaaactttcaagttcacagccttgcgttgtccatctttaatacacttagttgttggttttaataattaaggaaacaggacctacctatacctgtgccaacagggggcactatccctctgtaaagaacaaatcaaaaagtattttgtgttgt

SEQ ID NO: 11015 - protein, 135 aa, Homo sapiens [sequence omitted]

SEQ ID NO: 11016 - DNA, 499 bp, Homo sapiens
  CDS (21)..(497)
gacgcagttagtcggctgcaatggcgccggtgaggcggtccgcgaagtggcggcctggtggtattgaggcgcgtggtgaaggggtttccactgtcgggtacaggaataagaatgtgagacagaagacatggcggcctaaccacccgcaagccttcgtggggagcgttcgcgagggacaaggctttgcttttcgaagaaaactgaaaatacagcaaagttacaagaaattgctacggaaggaaaagaaggctcaaacgtcactggaatctcaattcacagatcgatacccagataatctgaaacatctctatttagctgaagaggaaagacataggaagcaagcaagaaaagtcgaccatcctttgtcagaacaagttcaccagccgttgcttgaagaacagtgtagcattgacgagcctttatttggagatcagtgtagctttgaccagcctcagccagaagaacaatgtattaaaacagtaaactcctttacaattcc

SEQ ID NO: 11017 - protein, 159 aa, Homo sapiens
MAPVRRSAKWRPGGIEARGEGVSTVGYRNKNVRQKTWRPNHPQAFVGSVREGQGFAFRRKLKIQQSYKKLLRKEKKAQTSLESQFTDRYPDNLKHLYLAEEERHRKQARKVDHPLSEQVHQPLLEEQCSIDEPLFGDQCSFDQPQPEEQCIKTVNSFTI

SEQ ID NO: 11018 - DNA, 925 bp, Homo sapiens
cacagctatgaataagctttcaggttttattaaaacctagaggaaaaaatcaggaatgacctgaatctcaacccaaatattaaacaaaatccacataatccctcatttcaatttccaattccattaagggaccctctctttttggatggcagagatggttttttaatgaaatcccaccatctatctgagtgagtctggcaggctttttagttcctgagttaaatttgtaatagaaccaaggcaatgctgctgactttgatatgtatgactcagtctttcaatatgtggttttcaaaaaattgttgaagacgtgacttcatagcaatatatagagaataaattaaaatcagcagattgagttttcaacattgcaaaatcagttttttacctctttcctaccaatttcacattttgcagaaacttgttcacatttccaacaatatcagaattagaaaacagttcagataacaagaaagattaagaattagggaaattctgatatcaccataaagcactattttacatttagagattacatttaagataaagtcatcatacacaaaaacaataaatatttataactttctctataaggtccgcatatactgtatatattgaaacaatctgaatgactagtagatttcatatgaccattgttatttccactttctccaatacttgtattttatgctacatgtaatgaagttggacctttttattatttagtaattcctatatgttcctatacttttcattttcaagatgattgctctattgtttcatgttgtttctagcaatatatctccatgagatatgcactctgtttcatattgaaaagtataaaatttatctttcaattcctgtgtgtgtatcctatggttatctgtatgtattattttctattctaataaaatttataacaagc

SEQ ID NO: 11019 - DNA, 798 bp, Homo sapiens
  CDS (136)..(441)
atcgctctcccgggcttagaaggcccggctactgacgcgcagtgccagaccttacccctcacggtccttaagtctcggtcgccctcgcctcgcagcctgccacccgcgctcagctgcccgcctcctcagccagccatgctggagcatctgagctcgctgcccacgcagatggattacaagggccagaagctagctgaacagatgtttcagggaattattcttttttctgcaatagttggatttatctacgggtacgtggctgaacagttcgggtggactgtctatatagttatggccggatttgctttttcatgtttgctgacacttcctccatggcccatctatcgccggcatcctctcaagtggttacctgttcaagaatcaagcacagacgacaagaaaccaggggaaagaaaaattaagaggcatgctaaaaataattgaggttttcatgattcagcacctgcttttgtttctgtgagatgagctaaattgctttcataccccagataagagctaaaaccacctaatgctcttatggcacaactgtgtatagatttagttctctttatacttcatttctagcccagttgggttttgatttatataagtagtttagaccttctcttcataatcttgctctgagatggggaacagaacacacaagtatgaagtttctttcaggtgtaaataatgaaaaataaatgcctcataaatgatagtacaatgtaactatcaaagttttataattcattatgagttaaccattttaatgtttccaattaaacctcatagtgc

SEQ ID NO: 11020 - protein, 102 aa, Homo sapiens
MLEHLSSLPTQMDYKGQKLAEQMFQGIILFSAIVGFIYGYVAEQFGWTVYIVMAGFAFSCLLTLPPWPIYRRHPLKWLPVQESSTDDKKPGERKIKRHAKNN

SEQ ID NO: 11021 - DNA, 978 bp, Homo sapiens
  CDS (30)..(674)
tcttccgggtggggccccgggccgaggcgatggcgccctgggcgctcctcagccctggggtcctggtgcggaccgggcacaccgtgctgacctggggaatcacgctggtgctcttcctgcacgataccgagctgcggcaatgggaggagcagggggagctgctcctgcccctcaccttcctgctcctggtgctgggctccctgctgctctacctcgctgtgtcactcatggaccctggctacgtgaatgtgcagccccagcctcaggaggagctcaaagaggagcagacagccatggttcctccagccatccctcttcggcgctgcagatactgcctggtgctgcagcccctgagggctcggcactgccgtgagtgccgccgttgcgtccgccgctacgaccaccactgcccctggatggagaactgtgtgggagagcgcaaccacccactctttgtggtctacctggcgctgcagctggtggtgcttctgtggggcctgtacctggcatggtcaggcctccggttcttccagccctggggtctgtggttgcggtccagcgggctcctgttcgccaccttcctgctgctgtcccacttcttctgtggatggccctcagggtcctgggagaccctctgggctgaggaggaggaagagggcagcagcccagctgtttagggttgctggaggccgggctaccgtcttgtgcctgaaaaccacggggcctgtccccagctggggtgagcgctcagagggcctggggccctcactcctgcccacgcctcccagaccccagaacggagcttcaagtcagacagatccctgccttggtgggcagttctgccttccaaggaagaaggggaagaaaaggacctgtgggtggctcaggcccaagcagaccccgggctccaccccagccccgcccaggctgctgccagtgcacacttttacaaatttaatataaagcaagtccagtctt

SEQ ID NO: 11022 - protein, 215 aa, Homo sapiens
MAPWALLSPGVLVRTGHTVLTWGITLVLFLHDTELRQWEEQGELLLPLTFLLLVLGSLLLYLAVSLMDPGYVNVQPQPQEELKEEQTAMVPPAIPLRRCRYCLVLQPLRARHCRECRRCVRRYDHHCPWMENCVGERNHPLFVVYLALQLVVLLWGLYLAWSGLRFFQPWGLWLRSSGLLFATFLLLSHFFCGWPSGSWETLWAEEEEEGSSPAV

SEQ ID NO: 11023 - DNA, 1191 bp, Homo sapiens
  CDS (11)..(409)
agggggaaaaatgcggcctttgactgaagaggagacccgtgtcatgtttgagaagatagcgaaatacattggggagaatcttcaactgctggtggaccggcccgatggcacctactgtttccgtctgcacaacgaccgggtgtactatgtgagtgagaagattatgaagctggccgccaatatttccggggacaagctggtgtcgctggggacctgctttggaaaattcactgaaacccacaagtttcggttgcacgtcacagctctggattaccttgcaccttatgccaagggttttggggtggcagccaaatctacacaagactgcagaaaagtagaccccatggcgattgtggtatttcatcaagcagacattggggaatatgtgcggcatgaagagacgttgacttaaaacgaagccattccaaggacagacggctgtatggaaaggccgagctttgtttcctgtgtttgtgtggactccaccatcatgttgaattttgtcaacactctggcctcttcagggacttcttatttactgtactctctatcactgacaaatgcaggctggattcttattatatacagagatggctcaaaaatggggtttcagatctttgtgacgaaatagaatactgtttcatatttgaatcagagggcttcttgttctgagaaataggttcaaaatcattggaaccaggaacaagaatagcttattgttatctgtgataacactgtcttctaaacacaaggattttcttttttattaatatgcaacatagacattgccataacagaataataaaccacatgtggggttttaaaatgaaatttggctaataggagcaattcagctatttttctatacagtaattggtgtgtggtatagaagaaaaacgggttcaaaccccacttctgccacctaccagctatatggccttgaatgagtcattcagctttaataaggttcattttcttctgtttaaaaagacacaaaacttgaaaatcagctttggccatctacctgagaattagaaagtctgatttttggaattagaaatcatgattgtaggctgggcacagtggctcgcgcctgtaatcccagcactttgggaggccaaggcggacggatcacttgaggttaggagtttgagaccagcctggccaacatggtgaaaccccatctctact

SEQ ID NO: 11024 - protein, 133 aa, Homo sapiens [sequence omitted]

SEQ ID NO: 11025 - DNA, 1215 bp, Homo sapiens
  CDS (82)..(528)
gacatttttggcgccggccccagcctgagcggggacggcggccgggagggcgcggcccgggttcccgttccccgcggagccatgcggtacaacgagaaggagctgcaggctctgtcccggcagccggccgagatggcggccgagctgggcatgaggggccccaagaagggcagcgtgctgaagcggcggctggtgaagctggtggtgaatttcctcttctactttcggacagacgaggccgagcccgtcggagccctgctgctggagcgctgcagagtcgtccgggaagagcccggcaccttctccatcagcttcattgaggaccctgagaggaagtatcactttgagtgcagcagcgaggagcagtgtcaggagtggatggaggctctgcgtcgggccagctacgagttcatgcggagaagcctcatcttctacaggaacgaaatccggaaggtgacgggcaaggaccccctggaacagttcggcatatccgaggaggccaggttccagctgagtggcttgcaggcgtgagcgcagggcacggtggtcagcgtgcagcgggacgggactggccctgcccagccatgaatcgcttggccatgcctggatctgttttgttttggtttttggtttttgggtcagggcttcactgtgttgcccaggctagagtgcagtggtgccacagctcactgtgaccttgaccttctggactcaagtgatcctcctgcctcagcttcccaagtagcggggatcacaggcatgagccgccacacccggccatcacacctggattttcagtgggaggtttttggtttggagacatccaaagcctgaagccaggtgggtgtgggcaggggctgcattttatgaaactgcccagcaagctgcgctccctggggccccaggatccacctaactggcctggcacctggtgccacgtgctgctgccgccaggatatgcgccttcccacaggtgccctgcctgagttgtgtgcatccaggggcctggtgagcccccaggctggtggcatggcccccctgccccgtgctgaatgaatgtacagagccagacaaagctgtgaatggcctaggggctgagtcccacaccagctgtgaattctcctgcagacaggagggccctggctgtgcacctggggaagtggttgccctggggccagggtgcttgttctgttcaaataaaggtacctcttttcc

SEQ ID NO: 11026 - protein, 149 aa, Homo sapiens
MRYNEKELQALSRQPAEMAAELGMRGPKKGSVLKRRLVKLVVNFLFYFRTDEAEPVGALLLERCRVVREEPGTFSISFIEDPERKYHFECSSEEQCQEWMEALRRASYEFMRRSLIFYRNEIRKVTGKDPLEQFGISEEARFQLSGLQA

SEQ ID NO: 11027 - DNA, 2221 bp, Homo sapiens
  CDS (266)..(1456)
gcttgctaaccacaaaacccgccaggccggtgcgggagctgcggagcatccgctgcggtcctcgccgagacccccgcgcggattcgccggtccttcccgcgggcgcgacagagctgtcctcgcacctggatgacagcaggggcgccggggtcctctcgacgccagagagaaatctcatcatccgtgcagccttcttaaagcaaactaagaccagagggaggattatccttgacctttgaagaccaaaactaaactgaaatttaaaatgttcttcgggggagaagggagcttgacttacactttgggaatcagaggcaatgagcccgtatatacttcaactcaagaagactgcattaattcttgctgttcaacaaaaaacatatcaggggacaaagcatgtaacttgatgatcttcgacactcgaaaaacagctagacaacccaactgctacctatttttctgtcccaacgaggaagcctgtccattgaaaccagcaaaaggacttatgagttacaggataattacagattttccatctttgaccagaaatttgccaagccaagagttaccccaggaagattctctcttacatggccaattttcacaagcagtcactcccctagcccatcatcacacagattattcaaagcccaccgatatctcatggagagacacactttctcagaagtttggatcctcagatcacttggagaaactatttaagatggatgaagcaagtgcccagctccttgcttataaggaaaaaggccattctcagagttcacaattttcctctgatcaagaaatagctcatctgctgcctgaaaatgtgagtgcgctcccagctacggtggcagttgcttctccacataccacctcggctactccaaagcccgccacccttctacccaccaatgcttcagtgacaccttctgggacttcccagccacagctggccaccacagctccacctgtaaccactgtcacttctcagcctcccacgaccctcatttctacagtttttacacgggctgcggctacactccaagcaatggctacaacagcagttctgactaccacctttcaggcacctacggactcgaaaggcagcttagaaaccataccgtttacagaaatctccaacctaactttgaacacagggaatgtgtataaccctactgcactttctatgtcaaatgtggagtcttccactatgaataaaactgcttcctgggaaggtagggaggccagtccaggcagttcctcccagggcagtgttccagaaaatcagtacggccttccatttgaaaaatggcttcttatcgggtccctgctctttggtgtcctgttcctggtgataggcctcgtcctcctgggtagaatcctctcggaatcactccgcaggaaacgttactcaagactggattatttgatcaatgggatctatgtggacatctaaggatggaactcggtgtcccttaattcatttagtaaccagaagcccaaatgcaatgagtttctgctgacttgctagtcttagcaggaggttgtattttgaagacaggaaaatgcccccttctgctttccttttttttttttggagacagagtcttgctctgttgcccaggctggagtgcagtagcacgatctcggctctcaccgcaacctccgtctcctgggttcaagcgattctcctgcctcagcctcctaagtatctgggattacaggcatgtgccaccacacctgggtgatttttgtatttttagtagagacggggtttcaccatgttggtcaggctggtctcaaactcctgacctagtgatccaccctcctcggcctcccaaagtgctgggattacaggcatgagccaccacagctggcccccttctgttttatgtttggtttttgagaaggaatgaagtgggaaccaaattaggtaattttgggtaatctgtctctaaaatattagctaaaaacaaagctctatgtaaagtaataaagtataattgccatataaatttcaaaattcaactggcttttatgcaaagaaacaggttaggacacctaggttccaattcattcacattcttggttccagataaaatcaactgtttatatcaatttctaatggatttgcttttctttttatatggattcctttaaaacttattccagatgtagttccttccaattaaatatttgaataaatcttttgttactc

SEQ ID NO: 11028 - protein, 397 aa, Homo sapiens
MFFGGEGSLTYTLGIRGNEPVYTSTQEDCINSCCSTKNISGDKACNLMIFDTRKTARQPNCYLFFCPNEEACPLKPAKGLMSYRIITDFPSLTRNLPSQELPQEDSLLHGQFSQAVTPLAHHHTDYSKPTDISWRDTLSQKFGSSDHLEKLFKMDEASAQLLAYKEKGHSQSSQFSSDQEIAHLLPENVSALPATVAVASPHTTSATPKPATLLPTNASVTPSGTSQPQLATTAPPVTTVTSQPPTTLISTVFTRAAATLQAMATTAVLTTTFQAPTDSKGSLETIPFTEISNLTLNTGNVYNPTALSMSNVESSTMNKTASWEGREASPGSSSQGSVPENQYGLPFEKWLLIGSLLFGVLFLVIGLVLLGRILSESLRRKRYSRLDYLINGIYVDI

SEQ ID NO: 11029 - DNA, 1739 bp, Homo sapiens
gagtctctgaggaaggaatgtgatttggcagtcagggtactaagcatgggtgggaactcctgccttataaaaattgtttttgtgttcttaaagataatatgttgtttttctgttttttgttttttccattttatggggaatttaaaaaccattcttgtatcagaaggtgaattaggcgcatggtctttgttttattaataatttccactagagggtgttctcaggtcactttgcagtgaagtggacttagttcctccttgttctgtacaaaatgtctccagactttgtaaaggagctgcccagtttggcctcctgtcccgaaaagaccctaataactaggcagagtgttgtcctgctttcttcgtctcgtaggatgtgctatgattggtgccaggcctcactaacacaggggctacctgtctcttattctcagcacctgtgtcctgagatacgctgcctgagacagagagagtccctcattaacagcctgtgtggctgtcagctttttgcctaaattgtgattcagatgcttttgttctctctcctttcacttattgccacagttgaggaaaagtgtcagattaccctgcagcaagacaagccaaggactgggagaaaaaaaaaaccactctggaggcaactgagaaaatcactgcttttggataggaatcagtagggtggctgttttccctttgttgaatctactagagtgacaggaaggactcccagccctttcagtaactatcaggagccctgaaacggtagaggcactgccatccttgtgggatactcaaagcccacagggcttttccctccctattgcatcttctgatgctccccacacctaccctccacctctccacctctgtggtgttcccatttgtgtgtttcccatctgtggagccagactgagcaatagcttagcagcgagtcagggacagctgccactttccacagagccacaggatgggcagagcagggacccagggaatgaatagccagtggacaaacagtcttgagctctgttcagccagagtgatgggccctgccagttaaggggctgtgtcttcatccttgaagacagatgtgcaatattgaccctgcctctccccagggctttgtggaaagatagttgagggctttagtgagatcacactcagagtggggcaattccagcatttatcctggctgcgtttcattgcgttgtctgtgaagtataatttctgggccagaattgctcagttgcatttgatccaggactatagattggaaatgggtcatcattgttttctgttgtgattatagccattctagtaggcgtttaaggtcatggcctgcagaaaatgatgtaagaactagttcttaatctttcagatcaagctaatgatgatatggaaccttgagttcgaattgattggtttacttggaaaaaaacatgtttgaaaattgcaaaagttccgccgggcgcggtggctcatgcctgtaatcccagcactttgggaggccgagacgggcggatcacgaggtcaggagatcgagaccatcttggctaacacggtgaaaccccgtttctactaaaaatacaaaaaattagccaggcgtgttggcgggcgcctgtagtcccagctacctgggcggctgaggcaggagcatggcgtgaacccaggaggcggagcttgcagtgagctgagatcatgccactgcactccaacctgggggacacagcaagactccgtctc

SEQ ID NO: 11030 - DNA, 1646 bp, Homo sapiens
  CDS (64)..(1092)
cttgtatataaaaatgctaaatgtacgttgaaacgatacaccaatcagacttttgataaagtgatggggcccatgttggatgctgctacaaggaaacctatctggcgacatgaaatcttagatgcagatggtatttgttctccaggtgagaaagtagaaaacaaacaagtgcttgtaaataagtccatgcccacagtgactcagattcctttggaaggaagtaatgtaccacagcaaccacagtacaaagatgtacccataacctacaaaggagcaacagactcatatattgaaaaagtgatgatatcttcaaatgctgaagatgcttttctgatcaaaatgctgctgagacagacaaggcgtccagaaattggagacaaattcagcagtcgtcatgggcaaaaaggtgtttgtggcttgatcgtcccccaggaagacatgccattttgtgattctggcatctgtccggacatcatcatgaacccacacggcttcccatcacgaatgacggtggggaagctcattgagctgctggctggcaaggccggtgtgctggacggcagattccactacggcactgcgtttggaggcagtaaagtgaaggatgtgtgtgaggacctcgtttgccatggttataactacttggggaaagactatgttacatccggcatcacaggtgagcccttagaagcatacatctattttggccccgtgtactatcagaagctgaaacacatggtgctagataaaatgcatgcccgggcccggggcccacgagccgtccttaccaggcaacccactgaaggacggtctcgtgatggtggcttgcgtctcggggaaatggaacgtgactgtttaatcggttatggagccagtatgcttttgctagagagactaatgatttcaagtgatgcctttgaggttgatgtctgtgggcagtgtggacttctggggtattctggctggtgccattactgcaagtcatcctgccacgtgtcttccctccgtattccgtatgcctgcaagctgctcttccaggaactacagtctatgaacatcatccccaggttaaaactgtccaagtacaatgaatgaggatggaaaaaatgattattaaagagaacgagtgatacatccaatgcaacggaaagcagaagggatttaggactacgtctcctcctgtgaagaattcccttgcgtattctctctctaaaacaaccaaaaaaaaatggagaggctttttatatactctaagactggctaaacaaccttgatcattgagcctcgagccatgggagagatgctgaccatgtggactgcaaggctgcttgattcacagatggatgtgacctaaaggataaataagctattacttatgtgctgatctcttgacattcactcattagaagaccttactccttcaagcaaatgtttggggtcaaatttaccatatcttctggctaaccatattcaagattcttctgaaacttggaggatgtaaagaatccatttgatttggtcagcctggcttttgtcgtggtggctggctcggataaattttcccaacaattaaatcttgcctttacacacccaaactttgtaattttagtcttggtgaaatataatgaatttgttcctaccttgtc

SEQ ID NO: 11031 - protein, 343 aa, Homo sapiens [sequence omitted]

SEQ ID NO: 11032 - DNA, 1482 bp, Homo sapiens
  CDS (247)..(1071)
tttttactgtttgccggaacagcgcacggctcagttgtcgtctgggatttgagagaagactcaaggctgcattactctgtgacgctgagcgatggcttctggacgttccggaccgccacgttttccaccgatggaatccttacctcagtaaaccaccgaagccctcttcaagcagtagaacctatctcaacgtccgtccacaaaaagcagagctttgtgctttcacccttttctactcaagaagaaatgtcaggtttgtccttccacatcgcttccttggatgagagtggggttctcaatgtatgggtggttgttgaattaccaaaggcagacatcgcaggttcaataagtgatttaggtctgatgcctggagggagggtcaagctggtacatagtgctctgatccagttgggtgacagtctttctcataaaggtaatgaattttggggcactacacaaacactgaatgttaaatttctgccttcagatcctaatcactttattattggcacagacatgggtctcataagccatggcacaagacaagatttgagagtggctcccaaactattcaaacctcagcaacatggtataagaccagtgaaagttaatgtcattgatttttcaccatttggagaaccaatatttttggccggctgttcggacggaagcatcaggctgcaccagctgagctccgcgtttccgctcctgcagtgggacagcagcacggacagccatgcggtcaccggcctgcagtggtccccaaccaggcctgccgtgttcctggtgcaggacgacacatccaacatctacatctgggacctcctccagagcgatctgggtcctgtcgccaaacagcaggtctcccccaacaggctggtggccatggctgcggtgggtgagcctgagaaggctggtggcagcttcctggccctggtgctggccagggcgtctggctccatcgacatccagcacctgaagaggcggtgggcggccccggaggtggacgagtgcaacaggctgcgtctgcttttgcaggaagccctgtggccagagggaaaactgcacaagtagcgggtgtggctgagaggaccgcgtttctgtaatgacccagatttaaaagacataaggtggataattctacatttgtgtgcaagtatatttatgtatatagactatgtatattctgtatataatttattttacatgaatatttctttggtattcccagtaaatacatgactacttttgagtggaaacaaagaacattctagcatttacaaaacttccaggggaatgtagagccacgtccagggtgctcttttctgagagtatttcgagttatttttagaacagtttaaatattgtcacattactgctagattttaaacagcctaccatgaaaatgtatcttaatgaactattttcttatgcataaagtatgtgaacacacgtctaaattaaaaggaattactccaccgc

SEQ ID NO: 11033 - protein, 275 aa, Homo sapiens
MSGLSFHIASLDESGVLNVWVVVELPKADIAGSISDLGLMPGGRVKLVHSALIQLGDSLSHKGNEFWGTTQTLNVKFLPSDPNHFIIGTDMGLISHGTRQDLRVAPKLFKPQQHGIRPVKVNVIDFSPFGEPIFLAGCSDGSIRLHQLSSAFPLLQWDSSTDSHAVTGLQWSPTRPAVFLVQDDTSNIYIWDLLQSDLGPVAKQQVSPNRLVAMAAVGEPEKAGGSFLALVLARASGSIDIQHLKRRWAAPEVDECNRLRLLLQEALWPEGKLHK

SEQ ID NO: 11034 - DNA, 1298 bp, Homo sapiens
ttttttgtagagatgagctctcactatgtcacccaggttcgtctcaaactcctgaaccctagtaattctcctatctcagcctcccaaagtgctagggttacagacatgagccactgtgcctgtctagacttgtactttcaactgtccatttctccctgtctgtcccatgggcactcatgaaaaaacagaatgctcccaactttattcatcttccaagcctgtagctcttggtatactcactgttgcaagtcagaagcttgatttcatcattgatgtttttctcacgtttcacatctcactcatcaccaagtcatgttggtgttaatttctgattaacccttgaatttaccgtcttctcatcctctgtacaaaagcctcaagtgagggtcaaattcaacattatcctgatctagacagcccccattctcaatccacccttttccaagttgattgcccaaggacttctaacaataaactctcttttgcaccacagacttctttgaaaatatacatgctgttgaccctctctgtagaaaaccgcacacataaaacttaccaacagatttcattggttcttgggttctcccgaagcctatccatggtttatagattaagaattgatgaggtagctgggcacagtggctcacacctacgatcacagcacttcgggaggctgaagcaagcagatcacttgaggtcaggagtttgagaccagcctggccaacatggtgaaaccctgtctctactaaaaatacaaaaagtagccagccgtgatgacaggcacctgtaatcccagctactcgggaggctgaggcatgagaattgcctgaacccgggaggcggaggttgcagtgggcctggatcatgccactgcactccagcctgggcagcagagcaagactctgtctcaaaaggggaaaaaaaaaattgctgatgtgacccatgaagggaactcattttcctcgtaattttggactgccacacattggtacctttagttctctgaaggcccacgtttttatcattaagacctatttgttagctagtagagctttatgttcgctgtccatgaaaccttctgtaaccacagtgactacgagtagttctttctctattgaattattaggtccagaatagaagatgtcattgtacactttatttccctcacactgtgttatgctctgatgtgctatgcttagctatctgtcagagattagtaaattataaaactcatgtgtactacttaagtttatatcttatgctagtttataagaacaattaaaaggacttagaagatt

SEQ ID NO: 11035 - DNA, 1149 bp, Homo sapiens
tattagaagttggatttctggtgaaagggtttgagtgtttttgaggctttggcacagaatacccagctggtcccagaaaggtggttcccatttacctgcccgaaggtaattcacccttactgatactgagtactgttttctaaaagaacattaaaaattggataggttaaaaacaggtgaatacatttttttagttgcatttttttggttacccgtgagagtgaacatgttgccatgtgtttgctgacctcctaaatggtctatttgctcctacctttgtaccccaaaagtctgctctcaagatggtagccagaatgatcctttttgagacataagtcaaaatttcactcttctccttaaagctctgcaatggttctcaggttaaaggccaaagtcctgttcaaggcctccagggtcctcaccacttggtcccttgctctttctgttctagccaacttggccttctcctgcccctccgccgcaccatggcaatttcccctgctctgtgtggtcaactacctgaatctgttcaaagctttgctcaaatgtctccttcctgatgagacctccccagcccctgagctccccatgccccactcctgatcgccttacttaacccttctttttcttttttgccagtagtacttatcaccgtctaaaatacttcataatttacttgtttattgtttgcccctctccaatagaatgtaagctccttggggcagggacctttgtcctttgtcttgttcactgctgtgtcccatgtgtaaacttgtctggcacagaagaggtgctcgataaatatttgttgagtgaatgaatggtaaattttctgttcatattctttgactattttctattgtaatgttcatctttttagtattggtttataagatgtatatttagcaccttttcatatatcactctttgtcacatattatgcaactaatttgtcatttccatcaatttttaaaatactttcttgatgcttcatttttaagctgtcagattattaatcttttctttatggtcttggactttattgttgcataaccgctgccttcaccaggaacatataaattttcaattaaatgttcttctgagattttatgatttcactttttatattaaactcttcattttgtcttc

SEQ ID NO: 11036 - DNA, 3111 bp, Homo sapiens
  CDS (944)..(2230)
aagatggccgccccggctcgggctgttttcagatgcttcaagtgttgtgaacagagacttgtttggattatgcatttctcagctagactaaataaatgctagcaatggatacgtgcaaacatgttgggcagctgcagcttgctcaagaccattccagcctcaaccctcagaaatggcactgtgtggactgcaacacgaccgagtccatttgggcttgccttagctgctcccatgttgcctgtggaagatatattgaagagcatgcactcaagcactttcaagaaagcagtcatcctgttgcattggaggtgaatgagatgtacgttttttgttacctttgtgatgattatgttctgaatgataacgcaactggagacctgaagttactacgacgtacattaagtgccatcaaaagtcaaaattatcactgcacaactcgtagtgggaggtttttacggtccctgggtacaggtgatgattcttatttcttacatgacggtgcccaatctctgcttcaaagtgaagatcaactgtatactgctctttggcacaggagaaggatactaatgggtaaaatctttcgaacatggtttgaacaatcacccattggaagaaaaaagcaagaagaaccatttcaggaaaaaatagtagtaaaaagagaagtaaagaaaagacggcaggaattggagtatcaagttaaagcagaattggaaagtagcctccaagaaagagtttacgtttacaagggctcgctcagtcgaccataatagaaatagtttctgttcaggtgccagcacaaacgccagcatcaccagcaaaagataaagtactctctacctcagaaaatgaaatatctcaaaaagtcagtgactcctcagttaaacgaaggtcaatagtaactcctggtgtaacaggattgagaaatttgggaaatacttgctatatgaattctgttcttcaggtgttgggtcatttacttatttttcgacaatgttttttaaagcttgatctgaaccaatggctggctatgactgctagcgagaagacaagatcttgtaagcatccaccagtcacagatacagtagtatatcaaatgaatgaatgtcaggaaaaagatacaggttttgtttgctccagacaatcaagtctgtcatcaggactaagtggtggagcatcaaaaggtagaaagatggaacttattcagccaaaggagccaacttcacagtacatttctctttgtcatgaattgcatactttgttccaagtcatgtggtctggaaagtgggcgttggtctcaccatttgctatgctacactcagtgtggagactcattcctgcctttcgtggttacgcccaacaagacgctcaggaatttctttgtgaacttttagataaaatacaacgtgaattagagacaactggtaccagtttaccagctcttatccccacttctcaaaggaaactcatcaaacaagttctgaatgttgtaaataacatttttcatggacaacttcttagtcaggttacatgtcttgcatgtgacaacaaatcaaataccatagaacctttctgggacttgtcattggagtttccagaaaggtatcaatgcagtggaaaagatattgcttcccagccatgtctggttactgaaatgttggccaaatttacagaaactgaagctttagaaggaaaaatctacgtatgtgaccagtgtaactcaaagcgtagaaggttttcctccaaaccagttgtactcacagaagcccagaaacaacttatgatatgccacctacctcaggttctcagactgcacctcaaacgattcaggtggtcaggacgtaataaccgagagaagattggtgttcatgttggctttgaggaaatcttaaacatggagccctattgctgcagggagaccctgaaatccctcagaccagaatgctttatctatgacttgtccgcggtggtgatgcaccatgggaaaggatttggctcagggcactacactgcctactgctataattctgaaggagggttctgggtacactgcaatgattccaaactaagcatgtgcactatggatgaagtatgcaaggctcaagcttatatcttgttttatacccaacgagttactgagaatggacattctaaacttttgcctccagagctcctgttggggagccaacatcccaatgaagacgctgatacctcgtctaatgaaatccttagctgatccaaagacaatggggttttcttcctgtgatttatatatatactttttaaaagactgatgtaccattttaaacttcattttttcttgtgaatcagtgtatactacatttatacattttatatctaacaatttttttttttacaaagtataaatgtatatatcaactgaaggtaactacttttttcatatttggagttttaaacttttggtgtttacctcagactgatgttacctcttttatatttttatgtcttaattggctcggatgatgaacttgtgcaatcttctaccaacaaagttcaagtggcatcattttatatacatgtatctttttcaggtattttctatacaaattcttaatagatggaaaattagactctactttggtcactaatagtctttcatttgtatattgaagttaccttgccccttggagttattgaagtgacatgtcaaggtatcacctaaatattcttcagtcacactcactggtatttctgaggctttgtgtgttaacaggccttgtaattgacattattttggttaatgtaaccccaaaattgctttagtaattgctctttggcatagtcaaactataaatgaaaatggcagctttacaaatagtatatttaagtgaactctggaactatggacatgaaaaaaatgatggctgggatttatgatttttgtctggcagcaaacaggtttgtccagaagtctaataattaagcagtcataaaaagtctgaatttagtaaaccagtgtatgatgttattcaaatagtttaccttgggtatgagttcattttataatgtctgatgacattagatctcttaaaactttatgtattttttttagttcaaaggaatagagtcttg

SEQ ID NO: 11037 - protein, 429 aa, Homo sapiens
MNSVLQVLGHLLIFRQCFLKLDLNQWLAMTASEKTRSCKHPPVTDTVVYQMNECQEKDTGFVCSRQSSLSSGLSGGASKGRKMELIQPKEPTSQYISLCHELHTLFQVMWSGKWALVSPFAMLHSVWRLIPAFRGYAQQDAQEFLCELLDKIQRELETTGTSLPALIPTSQRKLIKQVLNVVNNIFHGQLLSQVTCLACDNKSNTIEPFWDLSLEFPERYQCSGKDIASQPCLVTEMLAKFTETEALEGKIYVCDQCNSKRRRFSSKPVVLTEAQKQLMICHLPQVLRLHLKRFRWSGRNNREKIGVHVGFEEILNMEPYCCRETLKSLRPECFIYDLSAVVMHHGKGFGSGHYTAYCYNSEGGFWVHCNDSKLSMCTMDEVCKAQAYILFYTQRVTENGHSKLLPPELLLGSQHPNEDADTSSNEILS

SEQ ID NO: 11038 - DNA, 1692 bp, Homo sapiens
  CDS (182)..(562)
ctagtgttaaattggaaaatatcaataattaagagtattttacccaaggagtcctctcatggaagtttactgtgatgttccttttctcacacaagttttagcctttttcacaagggaactcatactgtctacacatcagaccatagttgcttaggaaacctttaaaaattccagttaagcaatgttgaaatcagtttgcatctcttcaaaagaaacctctcaggttagctttgaactgcctcttcctgagatgactaggacagtcggtacccagaggccacccagaagccctcagatgtacatacacagatgccagtcagctcctggggttgcgccaggcgcccccgctctagctcactgttgcctcgctgtctgccaggaggccctgccatccttgggccctggcagtggctgtgtcccagtgagctttactcacgtggcccttgcttcatccagcacagctctcaggtgggcactgcagggacactggtgtcttccatgtagcgtcccagctttgggctcctgtaacagacctctttttggttatggatggctcacaaaatagggcccccaatgctatttttttttttttaagtttgtttaattatttgttaagattgtctaaggccaaaggcaattgcgaaatcaagtccgtcaagtacaataacatttttaaaagaaaatggatcccactgttcctctttgccacagagaaagcacccagacgccacaggctctgtcgcatttcaaaacaaaccatgatggagtggcggccagtccagccttttaaagaacgtcaggtggagcagccaggtgaaaggcctggcggggaggaaagtgaaacgcctgaatcaaaagcagttttctaattttgactttaaatttttcatccgccggagacgctgctcccatttgtggggggacattagcaacatcactcagaagcctgtgttcttcaagagcaggtgttctcagcctcacatgccctgccgtgctggactcaggactgaagtgctgtaaagcaaggagctgctgagaaggagcactccactgtgtgcctggagaatggctctcactactcaccttgtctttcagcttccagtgtcttgggttttttatactttgacagcttttttttaattgcatacatgagactgtgttgacttttttttagttatgtgaaacactttgccgcaggccgcctggcagaggcaggaaatgctccagcagtggctcagtgctccctggtgtctgctgcatggcatcctggatgcttagcatgcaagttccctccatcattgccaccttggtagagagggatggctccccaccctcagcgttggggattcacgctccagcctccttcttggttgtcatagtgatagggtagccttattgccccctcttcttataccctaaaaccttctacactagtgccatgggaaccaggtctgaaaaagtagagagaagtgaaagtagagtctgggaagtagctgcctataactgagactagacggaaaaggaatactcgtgtattttaagatatgaatgtgactcaagactcgaggccgatacgaggctgtgattctgcctttggatggatgttgctgtacacagatgctacagacttgtactaacacaccgtaatttggcatttgtttaacctcatttataaaagcttcaaaaaaaccc

SEQ ID NO: 11039 - protein, 127 aa, Homo sapiens
MLKSVCISSKETSQVSFELPLPEMTRTVGTQRPPRSPQMYIHRCQSAPGVAPGAPALAHCCLAVCQEALPSLGPGSGCVPVSFTHVALASSSTALRWALQGHWCLPCSVPALGSCNRPLFGYGWLTK

SEQ ID NO: 11040 - DNA, 1881 bp, Homo sapiens
  CDS (141)..(1214)
ttttgatgagcgggatcttcaatattcatgttattttctcctttggtcttatatgattgttacctttatgaagctttagtgattacaaagcactttttttgtccatttttacctgagctttgtaaactctgatttgcaggatggctggctgtggtgaaattgatcattcaataaacatgcttcctacaaacaggaaagcgaacgagtcctgttctaatactgcaccttctttaaccgtccctgaatgtgccatttgtctgcaaacatgtgttcatccagtcagtctgccctgtaagcacgttttctgctatctatgtgtaaaaggagcttcatggcttggaaagcggtgtgctcttcgtcgacaagaaattcccgaggatttccttgacaagccaaccttgttgtcaccagaagaactcaaggcagcaagtagaggaaatggtgaatatgcatggtattatgaaggaagaaatgggtggtggcagtacgatgagcgcactagtagagagctggaagatgctttttccaaaggtaaaaagaacactgaaatgttaattgctggctttctgtatgtcgctgatcttgaaaacatggttcaatataggagaaatgaacatggacgtcgcaggaagattaagcgagatataatagatataccaaagaagggagtagctggacttaggctagactgtgatgctaataccgtaaacctagcaagagagagctctgctgacggagcggacagtgtatcagcacagagtggagcttctgttcagcccctagtgtcttctgtaaggcccctaacatcagtagatggtcagtcaacaagccctgcaacaccatcccctgatgcaagcacttctctggaagactcttttgctcatttacaactcagtggagacaacacagctgaaaggagtcataggggagaaggagaagaagatcatgaatcaccatcttcaggcagggtaccagcaccagacacctccattgaagaaactgaatcagatgccagtagtgatagtgaggatgtatctgcagttgttgcacagcactccttgacccaacagagacttttggtttctaatgcaaaccagacagtacccgatcgatcagatcgattgggaactgatcgatcagtagcagggggtggaacagtgagtgtcagtgtcagatctagaaggcctgatggacagtgcacagtaactgaagtttaaataaaaatgtcttcagctccatgctcaaggttgaaagggttacctgtaaatttctgcccacataacattatactcatccctagtagtgcattttgggagttggggtgggaaggggtatgggaaggatagactcataattaaaatgtctaacatgtctctgttgagaaatttatttaatgtaaggaacttgggtgttaatagttgagagctgtttagtaataacccagttttcttgaggtctgtttactttatactttttaaaaacttctgtagttcttttggccagtgtgtttgtattatctgtgcattaatggtcctcatctgactcctgcattgtgtcttatttttctgcatggattggcataagaccattactaaaatttggcacctgtgagatgtttgatattatgaacaggaaacataatttaatgtatgaatagatgtgaatttgggatttcaaaatagatgaataacaactattttatagtaaagttattgaaatggaaatgaaaacagccagtaacttatgtttcagaatgtttgtaacacacttcatggtgttcccataggctttgctgtctagtcttatagtttgaggtttttttggtctgcatttttctttttgattacaaaatttataatttaataaatactagagtttatc

SEQ ID NO: 11041 - protein, 358 aa, Homo sapiens [sequence omitted]

SEQ ID NO: 11042 - DNA, 1661 bp, Homo sapiens
  CDS (23)..(1444)
cctgctgaccaccgacgacgccatggtctccatcgaccccaccatgcccgcgaattcagaacgcactccgtacaaagtgagacctgtggccatcaagcaactctccgagagagaagaattaatccagagcgtgctggcgcaggttgcagagcagttctcaagagcattcaaaatcaatgaactgaaagctgaagttgcaaatcacttggctgtcctagagaaacgcgtggaattggaaggactaaaagtggtggagattgagaaatgcaagagtgacattaagaagatgagggaggagctggcggccagaagcagcaggaccaactgcccctgtaagtacagttttttggataaccacaagaagttgactcctcgacgcgatgttcccacttaccccaagtacctgctctctccagagaccatcgaggccctgcggaagccgacctttgacgtctggctttgggagcccaatgagatgctgagctgcctggagcacatgtaccacgacctcgggctggtcagggacttcagcatcaaccctgtcaccctcaggaggtggctgttctgtgtccacgacaactacagaaacaaccccttccacaacttccggcactgcttctgcgtggcccagatgatgtacagcatggtctggctctgcagtctccaggagaagttctcacaaacggatatcctgatcctaatgacagcggccatctgccacgatctggaccatcccggctacaacaacacgtaccagatcaatgcccgcacagagctggcggtccgctacaatgacatctcaccgctggagaaccaccactgcgccgtggccttccagatcctcgccgagcctgagtgcaacatcttctccaacatcccacctgatgggttcaagcagatccgacagggaatgatcacattaatcttggccactgacatggcaagacatgcagaaattatggattctttcaaagagaaaatggagaattttgactacagcaacgaggagcacatgaccctgctgaagatgattttgataaaatgctgtgatatctctaacgaggtccgtccaatggaagtcgcagagccttgggtggactgtttattagaggaatattttatgcagagcgaccgtgagaagtcagaaggccttcctgtggcaccgttcatggaccgagacaaagtgaccaaggccacagcccagattgggttcatcaagtttgtcctgatcccaatgtttgaaacagtgaccaagctcttccccatggttgaggagatcatgctgcagccactttgggaatcccgagatcgctacgaggagctgaagcggatagatgacgccatgaaagagttacagaagaagactgacagcttgacgtctggggccaccgagaagtccagagagagaagcagagatgtgaaaaacagtgaaggagactgtgcctgaggaaagcggggggcgtggctgcagttctggacgggctggccgagctgcgcgggatccttgtgcagggaagagctgccctgggcacctggcaccacaagaccatgttttctaagaaccattttgttcactgatacaaaaaaaaaaaaaaggaattcatgatgctgtacagaattttatttttaaactgtcttttaaataatatattcttatacgg

SEQ ID NO: 11043 - protein, 474 aa, Homo sapiens
MVSIDPTMPANSERTPYKVRPVAIKQLSEREELIQSVLAQVAEQFSRAFKINELKAEVANHLAVLEKRVELEGLKVVEIEKCKSDIKKMREELAARSSRTNCPCKYSFLDNHKKLTPRRDVPTYPKYLLSPETIEALRKPTFDVWLWEPNEMLSCLEHMYHDLGLVRDFSINPVTLRRWLFCVHDNYRNNPFHNFRHCFCVAQMMYSMVWLCSLQEKFSQTDILILMTAAICHDLDHPGYNNTYQINARTELAVRYNDISPLENHHCAVAFQILAEPECNIFSNIPPDGFKQIRQGMITLILATDMARHAEIMDSFKEKMENFDYSNEEHMTLLKMILIKCCDISNEVRPMEVAEPWVDCLLEEYFMQSDREKSEGLPVAPFMDRDKVTKATAQIGFIKFVLIPMFETVTKLFPMVEEIMLQPLWESRDRYEELKRIDDAMKELQKKTDSLTSGATEKSRERSRDVKNSEGDCA

SEQ ID NO: 11044 - DNA, 1411 bp, Homo sapiens
  CDS (11)..(571)
aaacaaagagatgccacccctgtgtgatggctttggtacccgaacactgatggttcagacattttcccgttgcatcttgtgttccaaggatgaagtggacttggatgagttattagctgctagattggtaacgtttctgatggacaattaccaggaaattctgaaagtccctttggccttgcagacctctatagaggagcgtgtggctcatctacgaagagtccagataaaatacccaggagctgatatggatatcactttatctgctccatcattttgccgtcaaattagtccagaggaatttgaatatcaaagatcatatggctctcaggaacctctggcagccttgttggaggaagtcataacagatgccaaactctccaacaaagagaaaaagaagaaactgaagcagtttcagaaatcctatcctgaagtctatcaagaacgatttcctacaccagaaagtgcagcacttctgtttcctgaaaaacccaaaccgaaaccacagctgctaatgtgggcactaaagaagcctttccaaccatttcaaagaactagaagttttcgaatgtaataatacttccacagcaacaggtgctagagaccactgttgttgttttgagtgaatggtggttaggagaaagactttggtggtggaagaaagaaaagcataaaacaaagactactgaaatatagataaagattgccttagtttttaaaaatgtttggccattagtatttttataaaactcaatgctagttttaagtgtataaattggttaaaatttatgagtcaaatatatagtgataatgttaacatgtttgtaattgctacagaatttaagggtatttttatctctgtgctttctttttcatggtgtttattaaataattgtgtatatacatcctagctactgatatctttattatagccttaagacttaattttaagtcttaaaaatagcgtgtatacttgaataagaaagacactgggtactgttactgtgatgctattgacttagtagccaattatcatttctcctgtataaattccagtttttattgctgcacataaattttttaatgtcttatattgtgatagctatgtcttttattgcagatttattggatgttatgacagattttactaaagctagtgtttttataacatatatattagttgatgtttacctataagtggagtagattttcatctgcctgcaatggtataatttcagtcttagctaaaaatggaaagttgaactggataaattctttgggtacccttagacctctgattctaagtcaaatgcaaatgggttaaataaaatgagactacttcctttataaatatattttcatccttttgaaagtaagtgaaatgtaaataaacttattttttttaaaaatg

SEQ ID NO: 11045 - protein, 187 aa, Homo sapiens
MPPLCDGFGTRTLMVQTFSRCILCSKDEVDLDELLAARLVTFLMDNYQEILKVPLALQTSIEERVAHLRRVQIKYPGADMDITLSAPSFCRQISPEEFEYQRSYGSQEPLAALLEEVITDAKLSNKEKKKKLKQFQKSYPEVYQERFPTPESAALLFPEKPKPKPQLLMWALKKPFQPFQRTRSFRM

SEQ ID NO: 11046 - DNA, 1553 bp, Homo sapiens
  CDS (23)..(1063)
ctacatcaaaactcctcggaagatgttccggcacacggacagcctctttcccatcctactgcagacgttatcggatgaatcggatgaggtgatcctgaaggacctggaggtgctggcagaaatcgcttcctcccccgcaggccagacggatgacccaggccccctcgatggccctgacctccaggccagccactcagagctccaggtgcccacccctggcagagccggcctactgaacacctctggtaccaaaggcttagaatgttctccttcaactcccaccatgaattcttacttttataagttcatgatcaaccttctcaagagattcagcagcgaatggaagctcctggaggtcagaggccctttcatcatcaggcagctgtgcctcctgctgaatgcggagaacatcttccactcaatggcagacatcctgctgcgggaggaggacctcaagttcgcctcgaccatggtccacgccctcaacaccatcctgctgacctccacagagctcttccagctaaggaaccagctgaaggacctgaagaccctggagagccagaacctgttctgctgcctgtaccgctcctggtgccacaacccagtcaccacggtgtccctctgcttcctcacccagaactaccggcacgcctatgacctcatccagaagtttggggacctggaggtcaccgtggacttcctcgcagaggtggacaagctggtgcagctgattgagtgccccatcttcacatatctgcgcctgcagctgctggacgtgaagaacaacccctacctgatcaaggccctctacggcctgctcatgctcctgcctcagagcagcgccttccagctgctctcgcaccggctccagtgcgtgcccaaccctgagctgctgcagaccgaagacagtctaaaggcagcccccaagtcccagaaagctgactcccctagcatcgactacgcagagctgctgcagcactttgagaaggtccagaacaagcacctggaagtgcggcaccagcggagcgggcgtggggaccacctggaccggagggttgtcctctgacaggcctggcacggaggagggcccaccgagtggtcccatgaaacactaagggtcgtcacgccctcccgaggagctcaaggacctgcctgtcaggaccagggctgggcctgccaacccagggcagtgttggggccggaggctgctgtgtctgcccaagctcctctcagagtccagtccccaggcctccagcgctgtcagctgcaccctggcattctcacagagctggctgcccacccagtggggggctatagcctcagagaccactcatcctctggaatcaacctctttctaataccctcttggaaaaagagcttgcccctcctccagcacactagagctctggccttgtgtgtatatgtatacatacgtgaacacatgcctgtgtgtgtgtgtgtgtgtgtgtacttgtatgcacgtaggcaccagcacaaagatctgaatgatgcaccccacccccaccccaataaagaaataacagaaaaccctc

SEQ ID NO: 11047 - protein, 347 aa, Homo sapiens
MFRHTDSLFPILLQTLSDESDEVILKDLEVLAEIASSPAGQTDDPGPLDGPDLQASHSELQVPTPGRAGLLNTSGTKGLECSPSTPTMNSYFYKFMINLLKRFSSEWKLLEVRGPFIIRQLCLLLNAENIFHSMADILLREEDLKFASTMVHALNTILLTSTELFQLRNQLKDLKTLESQNLFCCLYRSWCHNPVTTVSLCFLTQNYRHAYDLIQKFGDLEVTVDFLAEVDKLVQLIECPIFTYLRLQLLDVKNNPYLIKALYGLLMLLPQSSAFQLLSHRLQCVPNPELLQTEDSLKAAPKSQKADSPSIDYAELLQHFEKVQNKHLEVRHQRSGRGDHLDRRVVL

SEQ ID NO: 11048 - DNA, 1416 bp, Homo sapiens
  CDS (1)..(897)
atgagcatcaccgaggagatggcggaaaagatgaccgtggccaaggactcctcggacctgcctgaggagtcgcggcgggagctgctggagcagatagcagactgctgcatgcgccagggcagctaccacctggccaccaagaagtacacgcaggccggcaacaagctgaaggccatgagggcgctgctcaaatccggagacacggagaaaatcacgttcttcgcgagcgtgtccaggcagaaggaaatctacatcatggctgctaactacctgcagtccctggactggcggaaggagccggagatcatgaagaacatcatcggcttctacaccaaggggcgggccctggacctcctggctggcttttatgacgcttgtgcccaggtggagattgatgaataccagaactacgacaaagcccacggggcgctgaccgaggcctacaagtgcctggccaaggccaaggccaagagccccctggaccaggagaccaggctggcgcagctgcagagcaggatggcactggtgaagaggttcatccaggcccgcaggacgtacacagaggaccccaaggagtccatcaagcagtgtgagctgctcctggaggaaccagacctggacagcaccatccgcatcggggacgtctatggcttcctggtggagcactacgtgcggaaggaggaataccagacggcctacagattcctggaggagatgcggcggcggcttcccttggccaacatgtcctactacgtgagcccgcaggccgtggacgccgtgcaccgggggctgggtctcccactgccacgcaccgtccccgagcaggtccgccacaacagcatggaggacgccagggagctggacgaggaggtggtggaagaggcagatgacgacccctgaggggcctgggccccaggaccagcgtgctgctgcagaaaggcatcttctggaatttttttgtcagctgtggcaaagccagcatttttgctgggaaaaaacatgtctgtgttggaatacgcgacagagctgggcgagaacgcagcggcccgggccggcggagggtgtgacccgtctgcaccttgctctgtcccacctgcctctgggtgcccggcagctccactagatttttggattcattcctttgaagggagtcgggttcacccttccatcgtattctcccaactacacattgtaaagcctgagaaacttctagaacctcaggaagctgcagctggagggctggggcacctgcccccctgctccccacacatcatatcctccccatactcctgcagggcccacggctcctgagcaacagctgggacacccgggccttggcggctgcaccccctgctaggctctgcccaccggccaccaacactcctgtaattccaataaagcagtttattttctgag

SEQ ID NO: 11049 - protein, 299 aa, Homo sapiens
MSITEEMAEKMTVAKDSSDLPEESRRELLEQIADCCMRQGSYHLATKKYTQAGNKLKAMRALLKSGDTEKITFFASVSRQKEIYIMAANYLQSLDWRKEPEIMKNIIGFYTKGRALDLLAGFYDACAQVEIDEYQNYDKAHGALTEAYKCLAKAKAKSPLDQETRLAQLQSRMALVKRFIQARRTYTEDPKESIKQCELLLEEPDLDSTIRIGDVYGFLVEHYVRKEEYQTAYRFLEEMRRRLPLANMSYYVSPQAVDAVHRGLGLPLPRTVPEQVRHNSMEDARELDEEVVEEADDDP

SEQ ID NO: 11050 - DNA, 1356 bp, Homo sapiens
  CDS (29)..(460)
ctgggtctggcttcagggcacagacttcatgccggaccccagctccgagtggctgtaccgggtgacggtggccaccatcctctatttctcctggttcaacgtggctgagggccgcacccgaggccgggccatcatccacttcgccttcctcctgagtgacagcattctcctggtggccacctgggtgactcatagctcctggctgcccagcgggattccactgcagctgtggctgcctgtgggatgcggctgcttctttctgggcctggctctgcggcttgtgtactaccactggctgcaccctagctgctgctggaagcccgaccctgaccaggtagacggggcccggagtctgctttctccagaggggtatcagctgcctcagaacaggcgcatgacccatttagcacagaagtttttccccaaggctaaggatgaggctgcttcgccagtgaagggataggtgaacggcgtcctttgaagcaggatcagacccagccagcagagatggagagtgactctgttggcagaaggcaggcgaggataagctaacgatgctgctgtggcctctatgcactcagcaagagcgggacgcctgtgctgggccgggcaccagggatggtgctgagtcgggcagaggcctcctttcaaggagttcacagtgaacaagatgagaagggctgggccctggagggtcaagagccccaattatgtacaagacactttgggaggaaagaagactaccttttccccctgccattggtatagctggtgccccaaaacttccacctccctccctggccacctctaaaatgactggtataggtgctgccccaccccttagctcccctatcctgggctaggaggccacaggggctgtcctctagaattcttccttccctcccccacaccattcattcaattcatgaaacaaatctttgccaagagcagtttatgtgccaggaacatcattctgtccctgcaacctggaacaagaccagctaccagcctagcttcatccgctacttgcaccaaccagtcccgggttagatcccaaatgctagaagccagggatgcccaactctgggtggccccagtcagaacctctgggatctcagtgaagctggcctggcctctgctcctgctctcaaggggctgcttttcaaccaagagccttgtgagcctggtctgagccttgcacagccactgagtattttttttgccttagccagtgtacctcctacctcagtctatgtgagaggaagagaatgtgtgtgcctgtgggtctctacaagtgacagatgtgttgttttcaacagtattattaggttatgaataaagcctcatgaaatcctc

SEQ ID NO: 11051 - protein, 144 aa, Homo sapiens
MPDPSSEWLYRVTVATILYFSWFNVAEGRTRGRAIIHFAFLLSDSILLVATWVTHSSWLPSGIPLQLWLPVGCGCFFLGLALRLVYYHWLHPSCCWKPDPDQVDGARSLLSPEGYQLPQNRRMTHLAQKFFPKAKDEAASPVKG

SEQ ID NO: 11052 - DNA, 1465 bp, Homo sapiens
  CDS (278)..(703)
taaaaaacccgctccagcacccccgaaaccgggcaacccacctcctggccaccccgggggccagagttcttcaggaacatctcagcatccacccagtctgtcaccaaagccacccacccgaagcccctctcctcccacccagcacacgggccagcctccaggccagccctccgccccctcccagctctcagcaccccggaggtactccagcagcttgtctccaatccaagctcccaatcacccaccgccgcagccccctacgcaggccacgccactgatgcacaccaaacccaatagccagggccctcccaaccccatggcattgcccagtgagcatggacttgagcagccatctcacacccctccccagactccaacgccccccagtactccgcccctaggaaaacagaaccccagtctgccagctcctcagaccctggcagggggtaaccctgaaactgcacagccacatgctggaaccttaccgagaccgagaccagtaccaaagccaaggaaccggcccagcgtgcccccacccccccaacctcctggtgtccactcagctggggacagcagcctcaccaacacagcaccaacagcttccaagatagtaacagggtttcagaaccgcatcgcagcatctttcctgaaatgcactcagactcagccagcaaagacgtgcctggccgcatcctgctggatatagacaatgataccgagagcactgccctgtgaagaaagccctttcccagccctccaccacttccaccctggcgagtggagcaggggcaggcgaacctctttctttgcagaccgaacagtgaaaagctttcagtggaggacaaatgagggcctcactgtgcgggacctggccttctgcacggcccaaggagaacctggaggccaccactaaagctgaatgacctgtgtcttgaagaagttggctttctttacatgggaaggaaatcatgccaaaaaaatccaaaacaaagaagtacctggagtggagagagtattcctgctgaaacgcgcataggaagcttttgtccctgctgttaatgcgggcagcacctacagcaacttggaatgagtaagaagcagtgcgttaactatctatttaataaaatgcgctcattatgcaagtcgcctactctctgctacctggacgttcattcttatgtattaggagggaggctgcgctccttcagacttgctgcagaatcattttgtatcatgtatggtctgtgtctccccagtcccctcagaaccatgcccatggatggtgactgctggctctgtcacctcatcaaactggatgtgacccatgccgcctcgttggattgtcggaatgtagacagaaatgtactgttcttttttttttttaaacaatgtaattgctacttgataaggaccgaacattattctagtttcatgtttaatttgaattaaatatattctgtggttt

SEQ ID NO: 11053 - protein, 142 aa, Homo sapiens
MHTKPNSQGPPNPMALPSEHGLEQPSHTPPQTPTPPSTPPLGKQNPSLPAPQTLAGGNPETAQPHAGTLPRPRPVPKPRNRPSVPPPPQPPGVHSAGDSSLTNTAPTASKIVTGFQNRIAASFLKCTQTQPAKTCLAASCWI

SEQ ID NO: 11054 - DNA, 1166 bp, Homo sapiens
  CDS (159)..(470)
aggctcttaggctccacccggccctgaacagctggcttgtcttggagtctcttgtgccaccctccccaggaacagtggcttccttgtattggcgccagcgatgatgggccagctctgtgctaaacggagtcttgctctgttgcccaggctggagtgcaatggtgcgatctcggctcactgcagtctccgcctcttgggttcaggctcatccacctgcagacatggggcgcagaaagtcaaaacgaaagccgcctcccaagaagaagatgacaggcaccctcgagacccagttcacctgccccttctgcaaccacgagaaatcctgtgatgtgaaaatggaccgtgcccgcaacaccggagtcatctcttgtaccgtgtgcctagaggaattccagacgcccataacgtatctgtcagaacccgtggatgtgtacagtgattggatagacgcctgcgaggcggccaatcagtagcgacacagaggacccgccccctgagcagccccgcgtactgtggatccagctgttcggttctggtccagagacattccaggggtccagggtgtgggtcctgggctgtcacagccgtgtgtgtgtgtgtgtgtgtgtgtgtgtgtgtgtgtgtgtgtgtagtgggtgtgcgtgtgggtgtgggtgtgagtgagtgtgggtgtgtgtggctgcacgtgtcactggggtggccgtgagtgtgtgctcacaggtacgcggtggtgtcgggttcctgggcctgaggggcctgaactgatctcacttggctccgaaagcctttgctgtgttccctgcagcccctggccccccagccttggggctctggctccccccggcggaattgggggactgtttcctgacatcctggacaagggaagcccactagaggctggaacaggacctctccagcctcctcaccagcaccgtgcccatctcaactggacttcccgccctccttctccaccttctagtgcccgtggccggggattcaaagccgccgttccccaggtccctgggctgggccctgacagggagccgcccccctccccatggtaaccaggaagcccgtttcatgttcagttgcttttgtaaaggaagcaagggctgggatggggacagctgtcaatcacaagcccttaaataaagcagccagcgcac

SEQ ID NO: 11055 - protein, 104 aa, Homo sapiens
MVRSRLTAVSASWVQAHPPADMGRRKSKRKPPPKKKMTGTLETQFTCPFCNHEKSCDVKMDRARNTGVISCTVCLEEFQTPITYLSEPVDVYSDWIDACEAANQ

SEQ ID NO: 11056 - DNA, 1336 bp, Homo sapiens
  CDS (73)..(1131)
cagctggcggccagtgctggcttcaggaggttgattacagtggcccttcaccgaggtcagcagtatgaaagcatggaccacatccaagctgagctgtcggctagagtcatggagctggccccagctgggatgcccacccagcagcaggtcccctttctgtctgtgggtggggacattggggtccggaccgttcagcaccaagactgcagccccttgagcggtgactatgtcattgaggatgtgcaaggggatgacaagcgatacttccgtcgactgatcttcctcagcaacaggaatgtggtgcagtccgaagccaggttgctgaaggatgtgtctcacaaagcccagaagaagcggaaaaaggacaggaagaagcagcggcctgctgatgcggaggacctccctgcagccccggggcagtccattgataagagttacctgtgttgtgaacaccacaaagccatgatcgctggccttgccctgctgagaaacccagagctactcctagagatcccactggcattgttggtggtaggcctgggcgggggcagcctccccctctttgtccacgatcaatttccaaagtcctgcattgatgctgtggagatcgatccctccatgttggaagtggccacccagtggtttggcttctcccagagtgaccgaatgaaggtccacattgcagatggcctggactatatcgccagcttggcaggaggaggagaagcacggccttgctacgatgtcataatgtttgatgttgacagtaaggacccaacactgggaatgagttgtccgcccccagcatttgtggagcaatcttttctacagaaggttaaaagcatcttgactcctgaaggtgtttttattctcaaccttgtgtgccgagacttggggctaaaagactcagtgctggctgggctcaaggcagtgttccccctcctatatgtctggcgaattgagggtgaagtgaatgagatcctgttctgtcagctgcaccctgagcaaaaacttgccacaccagagctcctagaaacagcccaggctttggagcggaccctgaggaagcctgggaggggttgggatgacacgtatgtcttgtcagatatgctcaagacggtgaaaattgtgtgactgcttaggccaagcagccctcctgcctagactgaccttggactcccagcctgccagagaatgaagaaatacaacgcacagtacttttgaagcttcgtatttttcttggtttcacactcagctacatgtgacctccagcttggtgaggttgcctgaagattagggaaaataaaaatgtccttcccatcttgtcctcttcagt

SEQ ID NO: 11057 - protein, 353 aa, Homo sapiens [sequence omitted]

SEQ ID NO: 11058 - DNA, 1636 bp, Homo sapiens
  CDS (8)..(391)
aaaaaatatgccccagatggcaaactttgtatacaacatgtacatgcatttgatacagactacacatcattatcatcagactttattacaactaccacctgctatggtagaagagggtgaggaagttcaaaatcaagaaacagaattggaaacagaagaagaggccatgactgttcaagctgacatcatacccagtccaacagacaccagctgccgtcaagaaactccagcctttcaaactgacaccacccccagtgagacaggagccacttccactccagaagccatccttgctttatctgagaccacccctactgtggtaggagctgtatctgcaccggcagaagctaacacacctcaggatgccacatctgccccagaagagaccaagtagccaaactgtagtccttctaaaggaggacatggcagtcaaaaagtctgagtaaagctgttttttgtattttatatttgcttctgccattttactgtcactaattaatgtttagttcttatatttgttaactgatttcggtgtcttgaatatatttttttaaattatgtgtatgaacaattctagtttcatttgttcaatcagaagagcaaataaccattcctttcatgttttgatcactgagtgtgtctgtaatcatacctacattaaaatcattttctatgaatatataatatatacttcacatttttagtgaacttctctaaagaagaggacagaatatactggacttaaccacgaatacccttgagtgtccaaattgggaaggaacttgtttcttctgttatactatcaaatgcttaaattctgtttccttttttcttacctttgtttgctgtctttatgtaaagatattattagcagtaagatacaggtttcttcaatctatcaaagtggttacatgcatttccttctctcaaatcttagaatgccttagaatcacctaagatgtctgtttattcttgaggcacacctcagactgaatgagtcagaatctcaggattagagcctaggaatctatattttaggaggttctccacaccactaatgtttgggttgctggcagagtggcatcagccaaggctggttaggctgagccaggatttgtcatcagctaaataggaggactctgccaaatcaatctgggcaagaagcaggatcctgagtctgggcaatgagagtcagagaacttaactcctgtgtgcagggtagaattttcccatggcagaaattctgagttttctgccttatttttcttgggataaccagccacagggagaccttcaggtaaaatgtggttcaaatatgggaaggcagaggtacctgggaccttgctactcaagtatgatttgtgaaccaacagcatcaacatcgtattgaagtttgttatttatagaaatgcagaagtttgggctctgctccaaacctattaaatctaaatctacattgcaacaaagtccccaggtgattcacaggcactttgtagtttgagaggcactgtactaagattactgtgttgtcttcacatgaatgaggcttaatgtagaattaccagtgaatgtgactaatgttttctgacaagggacctctgcttacaaggtccctgggcatggtgcccagaactgg

SEQ ID NO: 11059 - protein, 128 aa, Homo sapiens
MPQMANFVYNMYMHLIQTTHHYHQTLLQLPPAMVEEGEEVQNQETELETEEEAMTVQADIIPSPTDTSCRQETPAFQTDTTPSETGATSTPEAILALSETTPTVVGAVSAPAEANTPQDATSAPEETK

SEQ ID NO: 11060 - DNA, 1425 bp, Homo sapiens
  CDS (129)..(1277)
cggaggctctaaaaagaaataaacttaagaaatcagagattaagaaagaagactatgttttaactaaatttaatgttcagaaaaccagatttggcttaactgaagcaggagatctgtctgctgaagacatgaagaaaatccgccatctctctctgattgaattgactgccttttttgatgcctttggaattcaactgaaaaggaacaaaacagagaaagtaaaaggacgagacaatgggatttttggagttccacttacagtcctcctggacggtgaccgaaagaaagaccctggagtgaaagttcccctggtattacaaaaattttttgagaaagttgaggaatcaggtctggaatctgaaggaatttttcgactttcaggatgtactgctaaagtcaagcaataccgtgaagaacttgatgccaagtttaatgctgataaatttaaatgggacaaaatgtgccatagagaagctgcagtaatgttgaaagcgtttttcagagaactacccacctctctcttccctgtggaatatatacctgccttcatcagtctaatggaaagagggcctcacgtcaaagtacagtttcaagccttacacctcatggtcatggcgctgcctgatgccaacagagatgcagctcaggccctcatgacattcttcaataaagtgattgccaatgaatcaaaaaaccgaatgagtctgtggaacatttctacagtgatggcaccgaaccttttcttcagtagaagcaaacactctgattatgaagaattactgttagcaaacactgcggcccacatcatccgcctaatgcttaagtaccagaagattttgtggaaggttccgtctttcttaatcactcaagtaagaagaatgaatgaagccacgatgctattgaagaagcagctcccaagtgtcaggaagctgctcaggaggaagaccctcgagcgggagactgcaagccccaagacttcaaaggtactgcaaaaatcaccctcggcaagacgaatgtctgacgtgccggaaggagtcatacgggtccatgctccacttctctccaaggtgtccatggccattcaactcaacaatcaaaccaaagccaaagacatattggcaaaatttcaatatgaaaacagaatactgcactggcagcgagctgcactttccttcctaaatggaaaatgggttaaaaaagaaagagaagagtcgacagagaccaacaggagccccaaacatgtattcctcttcactattggcctggacatctccacataggcagtcatatagagacttgaaatatcattcaagggatttgggtatccagtagacttttagttacatatactacaaaactgactttgtactctcaagtagacctttcgtagaaagaaaatgtttctaataaaaatgtattagaact

SEQ ID NO: 11061 - protein, 383 aa, Homo sapiens
MKKIRHLSLIELTAFFDAFGIQLKRNKTEKVKGRDNGIFGVPLTVLLDGDRKKDPGVKVPLVLQKFFEKVEESGLESEGIFRLSGCTAKVKQYREELDAKFNADKFKWDKMCHREAAVMLKAFFRELPTSLFPVEYIPAFISLMERGPHVKVQFQALHLMVMALPDANRDAAQALMTFFNKVIANESKNRMSLWNISTVMAPNLFFSRSKHSDYEELLLANTAAHIIRLMLKYQKILWKVPSFLITQVRRMNEATMLLKKQLPSVRKLLRRKTLERETASPKTSKVLQKSPSARRMSDVPEGVIRVHAPLLSKVSMAIQLNNQTKAKDILAKFQYENRILHWQRAALSFLNGKWVKKEREESTETNRSPKHVFLFTIGLDIST

SEQ ID NO: 11062 - DNA, 1952 bp, Homo sapiens
  CDS (794)..(1648)
cagatagtagcgatagtgagtatatcagtgatgatgagcagaagtctaagaacgagccagaagacacagaggacaaagaaggttgtcagatggacaaagagccatctgctgttaaaaaaaagcccaagcctacaaacccagtggagattaaagaggagctgaaaagcacgtcaccagccagcgagaaggcagaccctggagcagtcaaggacaaggccagccctgagcctgagaaggacttttccgaaaaggcaaaaccttcacctcaccccataaaggataaactgaagggaaaagatgagacggattccccaacagtccatttgggcctggactctgattcagagagcgaacttgtcatagatttaggagaagaccattctgggcgggagggtcgaaaaaataagaaggaacccaaagaaccatctcccaaacaggatggcattggctagttgtaggtaaaactccaccatccacgacggtgggcagccattctcccccggaaacaccggtgctcacccgctcttccgcccaaacttccgcggctggcgccacagccaccaccagcacgtcctccacggtcaccgtcacggccccggcccccgccgccacaggaagcccagtgaaaaagcagaggccgcttttaccgaaggagactgccccggccgtgcagcgggtcgtgtggaactcatcaactgtccagcagaaggagatcacacagagcccatccacgtccaccatcaccctggtgaccagcacacagtcatcgcccctggtcaccagctcggggtccatgagcacccttgtgtcctcagtcaacgctgacctgcccatcgccactgcctcagctgatgtcgccgctgatattgccaagtacactagcaaaatgatggatgcaataaaaggaacaatgacagaaatatacaacgatctttctaaaaacactactggaagcacaatagctgagattcgcaggctgaggatcgagatagagaagctccagtggctgcaccagcaagagctctccgaaatgaaacacaacttagagctgaccatggcggagatgcggcagagcctggagcaggagcgggaccggctcatcgccgaggtgaagaagcagctggagttggagaagcagcaggcggtggatgagaccaagaagaagcagtggtgcgccaactgcaagaaggaggccatcttttactgctgttggaacaccagctactgtgactacccctgccagcaagcccactggcctgagcacatgaagtcctgcacccagtcagctactgctcctcagcaggaagcggatgctgaggtgaacacagaaacactaaataagtcctcccaggggagctcctcgagcacacaatcagcaccttcagaaacggccagcgcctccaaagagaaggagacgtcagctgagaaaagcaaggagagtggctcgacccttgacctttctggctccagagagacgccctcctccattctcttaggctccaaccaaggctctgaccattcccggagtaataaatccagttggagcagcagtgatgagaagaggggatcgacacgttccgatcacaacaccagtaccagcacgaagagcctcctcccgaaagagtctcggctggacaccttctgggactagcagtgaatcgggacacaaaccacccaccccattgggagaaaaacccagacgccaggaaaagaagaaacaacaaaggcaggagaacagccactttcagacttgaaaatgacaaaaccctcagttgagcctgagcccccggcgcgggggctgctacactacaggacacccagcatcggctttgactgcagactgttcacccacacgagccctgtgcttttggtgtaaataatgtacaatttgtggatgtcattgaatctagaggactttcccctttttatatttgtattaactttaacttatt

SEQ ID NO: 11063 - protein, 285 aa, Homo sapiens [sequence omitted]

SEQ ID NO: 11064 - DNA, 1880 bp, Homo sapiens
  CDS (15)..(1526)
gcgtgccgggtgtcatggcggcctgcaggtactgctgctcgtgcctccggctccggcccctgagcgatggtcctttccttctgccacggcgggatcgggcactcacccagttgcaagtgcgagcactatggagtagcgcagggtctcgagctgtggccgtggacttaggcaacaggaaattagaaatatcttctggaaagctggccagatttgcagatggctctgctgtagtacagtcaggtgacactgcagtaatggtcacagcggtcagtaaaacaaaaccttccccttcccagtttatgcctttggtggttgactacagacaaaaagctgctgcagcaggtagaattcccacaaactatctgagaagagaggttggtacttctgataaagaaattctaacaagtcgaataatagatcgttcaattagaccgctctttccagctggctacttctatgatacacaggttctgtgtaatctgttagcagtagatggtgtaaatgagcctgatgtcctagcaattaatggcgcttccgtagccctctcattatcagatattccttggaatggacctgttggggcagtacgaataggaataattgatggagaatatgttgttaacccaacaagaaaagaaatgtcttctagtactttaaatttagtggttgctggagcacctaaaagtcagattgtcatgttggaagcctctgcagagaacattttacagcaggacttttgccatgctatcaaagtgggagtgaaatatacccaacaaataattcagggcattcagcagttggtaaaagaaactggtgttaccaagaggacacctcagaagttatttaccccttcgccagagattgtgaaatatactcataaacttgctatggagagactctatgcagtttttacagattacgagcatgacaaagtttccagagatgaagctgttaacaaaataagattagatacggaggaacaactaaaagaaaaatttccagaagccgatccatatgaaataatagaatccttcaatgttgttgcaaaggaagtttttagaagtattgttttgaatgaatacaaaaggtgcgatggtcgggatttgacttcacttaggaatgtaagttgtgaggtagatatgtttaaaacccttcatggatcagcattatttcaaagaggacaaacacaggtgctttgtaccgttacatttgattcattagaatctggtattaagtcagatcaagttataacagctataaatgggataaaagataaaaatttcatgctgcactacgagtttcctccttatgcaactaatgaaattggcaaagtcactggtttaaatagaagagaacttgggcatggtgctcttgctgagaaagctttgtatcctgttattcccagagattttccttctctttccgccatctttccgcgccgccacaatggtgcgcatgaatgtcctggcagatgctctcaagagtatcaacaatgccgaaaagagaggcaaacgccaggtgcttattaggccgtgctccaaagtcatcgtccggtttctcactgtgatgatgaagcatggttacattggcgaatttgaaatcattgatgaccacagagctgggaaaattgttgtgaacctcacaggcaggctaaacaagtgtggggtgatcagccccagatttgacgtgcaactcaaagacctggaaaaatggcagaataatctgcttccatcccgccagtttggtttcattgtactgacaacctcagctggcatcatggaccatgaagaagcaagacgaaaacacacaggagggaaaatcctgggattctttttctagggatgtaatacatatatttacaaataaaatgcctcatggac

SEQ ID NO: 11065 - protein, 504 aa, Homo sapiens
MAACRYCCSCLRLRPLSDGPFLLPRRDRALTQLQVRALWSSAGSRAVAVDLGNRKLEISSGKLARFADGSAVVQSGDTAVMVTAVSKTKPSPSQFMPLVVDYRQKAAAAGRIPTNYLRREVGTSDKEILTSRIIDRSIRPLFPAGYFYDTQVLCNLLAVDGVNEPDVLAINGASVALSLSDIPWNGPVGAVRIGIIDGEYVVNPTRKEMSSSTLNLVVAGAPKSQIVMLEASAENILQQDFCHAIKVGVKYTQQIIQGIQQLVKETGVTKRTPQKLFTPSPEIVKYTHKLAMERLYAVFTDYEHDKVSRDEAVNKIRLDTEEQLKEKFPEADPYEIIESFNVVAKEVFRSIVLNEYKRCDGRDLTSLRNVSCEVDMFKTLHGSALFQRGQTQVLCTVTFDSLESGIKSDQVITAINGIKDKNFMLHYEFPPYATNEIGKVTGLNRRELGHGALAEKALYPVIPRDFPSLSAIFPRRHNGAHECPGRCSQEYQQCRKERQTPGAY

SEQ ID NO: 11066 - DNA, 1725 bp, Homo sapiens
  CDS (467)..(937)
tctgaaatatggcattgccctcctcatcttacaggtggaaaaactgaagcttgagataagcaacctaaacagtatcacacagctaatgaggagtcaaatgcaggcctgcctgtccccaaagtccagattcttcctttcctagaatgtcagggctagggaagtgctgagaccctctggtctacccccaccccctaattttatgaaagacaaggataaagtcccagggaaacaatgtgttcaaggctacccagtgacgcatgaccccatacaggctctataaggatgttacactcggtcatctctacatgcctggtacctagcacaggatcctggtacattggaggtgcttgagtaactgtgaatacaggaacatagtcatttaatagcaaagctagagccctgtcccccaaggccagcttactgcctcccctccccctcacgcctggcatcccacctggatgtatgcatggttggtcggatgaaactcctccccaacaggattaggacactcgccctcacagcgataggcgttgtactgcttggggtagatgatccaggagccccatccgatcaggttgaagtccacctggaacttgaccttccgacacagttgacttctgtctggcaagtgatgtcgacggtgcctcttgccccactcccaggacagctgtccctcctgggcccgccaggagctctcggcttcccacagcaaggtggacccacccagctgcctctgctcctgcgagaggttggagtagagcataaggagcacattggtggcaggcggtgtggggggccgcggccagcactctccagctaccctggacatctgcttctccagggccccagggcgcttcagccacttggagagaggcctggtcacctccaaaaccatgctgcccaaggaaaaggtgacctgggacaaagtgacagtgaataggtccatctgaaaccgctctaagcagctgtctgaagcctgctctgtgtcgggctttggctggtggaaaatctcaatggcaagtgagccctcagtggggaggtccacagggctggacagctgcagccggagctcagcccatgccagatcctcttgttggctcaggaaggagaagtcaaaagcaaacgtccagttctgcccatccactgccacatctgggtaggagaaaaccaagaaggaaggagggtgagtgagggcctcccccagcctcagtcagtgtcacaaccaccatagctcttgctggaggccttaccttatatagaattaccttcgaattctcaccccaactctatgagttggtaagattttcgagtcccttttagagatgaggaaaactgaggctcagtgtggttaaaagatctgaccaaggtgtcattcttggaaggtggcagagccaagagtaaacctggatttgcccaactgccaagcccagactccgaattactgttcttccagtcccccttccaagataacttgcacagccagaggacagtcagtaaaaatgtgatgagttgcatctccccctcccctgtctcctcccatacatgaagtctggccagcatggagaaaccctgtctctactaaaaatacaaaattggctgggcgtggtggtttgcgcctgtaatcccagccactcgagaatcatttgaacccgggaggcagaggttgcagtgagccgggacagtgccattgcactccagcctgcacaacaagagtgaaactgtctc

SEQ ID NO: 11067 - protein, 157 aa, Homo sapiens
MVGRMKLLPNRIRTLALTAIGVVLLGVDDPGAPSDQVEVHLELDLPTQLTSVWQVMSTVPLAPLPGQLSLLGPPGALGFPQQGGPTQLPLLLREVGVEHKEHIGGRRCGGPRPALSSYPGHLLLQGPRALQPLGERPGHLQNHAAQGKGDLGQSDSE

SEQ ID NO: 11068 - DNA, 1790 bp, Homo sapiens
  CDS (502)..(1596)
agcgcgcggctgatacccgggactgggctgcggcggttagtcctctcccggccgccgtcgcctccgacatattgcccgcaggagctgcggcggcgaagcggagagcaccggggggaggagatgggaggacgaagaggtcccaacaggacatcttactgtcgaaatccgctctgtgagccgggatcctcggggggctctagtggaagccacacttccagtgcaccggtgaccagtgttcgttcccgcaccaggagcagttctggaacaggcctctccagccctcctctggccacccaaactgttgtgcctctacagcactgcaagatccccgagctgccagtccaggccagcattctgtttgagttgcagctcttcttctgctagctcatagcactcttcgtccactacatcaacatctacaagacagtgtggtggtatccaccttcccacccaccctcccacacctccctgaacttccatctgatcgacttcaacttgctgatggtgaccaccatcgttctgggccgccgcttcattgggtccatcgtgaaggaggcctctcagagggggaaggtctccctctttcgctccatcctgctgttcctcactcgcttcaccgttctcacggcaacaggctggagtctgtgccgatccctcatccacctcttcaggacctactccttcctgaacctcctgttcctctgctatccgtttgggatgtacattccgttcctgcagctgaattgcgacctccgcaagacaagcctcttcaaccacatggcctccatggggccccgggaggcggtcagtggcctggcaaagagccgggactacctcctgacactgcgggagacgtggaagcagcacacaagacagctgtatggcccggacgccatgcccacccatgcctgctgcctgtcacccagcctcatccgcagtgaggtggagttcctcaagatggacttcaactggcgcatgaaggaagtgctcgtcagctccatgctgagcgcctactatgtggcctttgtgcctgtctggttcgtgaagaacacacattactatgacaagcgctggtcctgtgaactcttcctgctggtgtccatcagcacctccgtgatcctcatgcagcacctgctgcctgccagctactgtgacctgctgcacaaggccgccgcccatctgggctgttggcagaaggtggacccagcgctgtgctccaacgtgctgcagcacccgtggactgaagaatgcatgtggccgcagggcgtgctggtgaagcacagcaagaacgtctacaaagccgtaggccactacaacgtggctatcccctctgacgtctcccacttccgcttccatttctttttcagcaaacccctgcggatcctcaacatcctcctgctgctggagggcgctgtcattgtctatcagctgtactccctaatgtcctctgaaaagtggcaccagaccatctcgctggccctcatcctcttcagcaactactatgccttcttcaagctgctccgggaccgcttggtattgggcaaggcctactcatactctgctagcccccagagagacctggaccaccgtttctcctgagccctggggtcacctcagggacagcgtccaggcttcagccaagggctccctggcaaggggctgttgggtagaagtggtggtgggggggacaaaagacaaaaaaatccaccagagctttgtatttttgttacgtactgtttctttgataattgatgtgataaggaaaaaagtcctatttttatactcccaac

SEQ ID NO: 11069 - protein, 365 aa, Homo sapiens
MVTTIVLGRRFIGSIVKEASQRGKVSLFRSILLFLTRFTVLTATGWSLCRSLIHLFRTYSFLNLLFLCYPFGMYIPFLQLNCDLRKTSLFNHMASMGPREAVSGLAKSRDYLLTLRETWKQHTRQLYGPDAMPTHACCLSPSLIRSEVEFLKMDFNWRMKEVLVSSMLSAYYVAFVPVWFVKNTHYYDKRWSCELFLLVSISTSVILMQHLLPASYCDLLHKAAAHLGCWQKVDPALCSNVLQHPWTEECMWPQGVLVKHSKNVYKAVGHYNVAIPSDVSHFRFHFFFSKPLRILNILLLLEGAVIVYQLYSLMSSEKWHQTISLALILFSNYYAFFKLLRDRLVLGKAYSYSASPQRDLDHRFS

SEQ ID NO: 11070 - DNA, 2311 bp, Homo sapiens
  CDS (48)..(1034)
tgagaacattaagaaaagattatgctcggtacagtaaagaggaagaaatggatgatatggatagagacctaggagatgaatatggatggaaacaggtgcatggagatgtatttagaccatcaagtcacccactgatattttcctctctgattggttctggatgtcagatatttgctgtgtctctcatcgttattattgttgcaatgatagaagatttatatactgagaggggatcaatgctcagtacagccatatttgtctatgctgctacgtctccagtgaatggttattttggaggaagtctgtatgctagacaaggaggaaggagatggataaagcagatgtttattggggcattccttatcccagctatggtgtgtggcactgccttcttcatcaatttcatagccatttattaccatgcttcaagagccattccttttggaacaatggtggccgtttgttgcatctgtttttttgttattcttcctctaaatcttgttggtacaatacttggccgaaatctgtcaggtcagcccaactttccttgtcgtgtcaatgctgtgcctcgtcctataccggagaaaaaatggttcatggagcctgcggttattgtttgcctgggtggaattttaccttttggttcaatctttattgaaatgtatttcatcttcacgtctttctgggcatataagatctattatgtctatggcttcatgatgctggtgctggttatcctgtgcattgtgactgtctgtgtgactattgtgtgcacatattttctactaaatgcagaagattaccggtggcaatggacaagttttctctctgctgcatcaactgcaatctatgtttacatgtattccttttactactattttttcaaaacaaagatgtatggcttatttcaaacatcattttactttggatatatggcggtatttagcacagccttggggataatgtgtggagcgattggttacatgggaacaagtgcctttgtccgaaaaatctatactaatgtgaaaattgactagagacccaagaaaacctggaactttggatcaatttctttttcataggggtggaacttgcacagcaaaaacaaacaaacgcaagaagagatttgggctttaacacactgggtactttgtgggtctctctttcgtcggtggcttaaagtaacatctatttccattgatcctaggttcttcctgactgctttctccaactgttcacagcaaatgcttggattttatgcagtaggcattactacagtacatggctaatcttcccaaaaactagctcattaaagatgaaatagaccagctctcttcagtgaagaggacaaatagtttatttaaagcatttgttccaataaaataaatagagggaaacttggatgctaaaattacatgaataggaatcttcctggcacttagtgtttctatgttattgaaaaatgatgttccagaaagattacttttttcctcttatttttactgccattgtcgacctattgtgggacatttttatatattgaatctgggttcttttttgacttttttttttcccaatccaacagcatccttttttttaaaagagagaattagaaaatattaaatcctgcatgtaatatatctgctgtcatcttagttggaccaacttcccatttatttatcttaaaactatacagttacatcttaattccatccaaagaagatacagtttgaagacagaagtgtactctctacaatgcaatttactgtacagttagaaagcaaagtgttaaatggagaagatacttgtttttattaaacattttgagatttagataaactacattttaactgaatgtctaaagtgattatcttttttccccccaagttagtcttaaatcttttgggtttgaatgaaggttttacataagaaattattaaaaacaaggggggtgggtaataaatgtatataacattaaataatgtaacgtaggtgtagattcccaaatgcatttggatgtacagatcgactacagagtacttttttcttatgatgattggtgtagaaatgtgtgatttgggtgggcttttacatcttgcctaccattgcatgaaacattggggtttcttcaaaatgtgtgtgtcatacttcttttgggaggggggttgttttcttctgtttattttctgagactcctacaggagccaaatttgtaatttagagacacttaattttgttaatcctgtctgggacacttaagtaacatctaaagcattattgctttagaatgttcaaataaaatttcctgacc

SEQ ID NO: 11071 - protein, 329 aa, Homo sapiens
MDDMDRDLGDEYGWKQVHGDVFRPSSHPLIFSSLIGSGCQIFAVSLIVIIVAMIEDLYTERGSMLSTAIFVYAATSPVNGYFGGSLYARQGGRRWIKQMFIGAFLIPAMVCGTAFFINFIAIYYHASRAIPFGTMVAVCCICFFVILPLNLVGTILGRNLSGQPNFPCRVNAVPRPIPEKKWFMEPAVIVCLGGILPFGSIFIEMYFIFTSFWAYKIYYVYGFMMLVLVILCIVTVCVTIVCTYFLLNAEDYRWQWTSFLSAASTAIYVYMYSFYYYFFKTKMYGLFQTSFYFGYMAVFSTALGIMCGAIGYMGTSAFVRKIYTNVKID

SEQ ID NO: 11072 - DNA, 2123 bp, Homo sapiens
  CDS (127)..(1647)
aaaaaaaaaaaaacatatcagaatcacactgtggtttttctgggatcagagaagggaatcatcttgaagtttttggccagaataggaaatagtggttttctaaatgacagccttttcctggaggagatgagtgtttacaactctgaaaaatgcagctatgatggagtcgaagacaaaaggatcatgggcatgcagctggacagagcaagcagctctctgtatgttgcgttctctacctgtgtgataaaggttccccttggccggtgtgaacgacatgggaagtgtaaaaaaacctgtattgcctccagagacccatattgtggatggataaaggaaggtggtgcctgcagccatttatcacccaacagcagactgacttttgagcaggacatagagcgtggcaatacagatggtctgggggactgtcacaattcctttgtggcactgaatggagtgattcgggaaagttacctcaaaggccacgaccagctggttcccgtcaccctcttggccattgcagtcatcctggctttcgtcatgggggccgtcttctcgggcatcaccgtctactgcgtctgtgatcatcggcgcaaagacgtggctgtggtgcagcgcaaggagaaggagctcacccactcgcgccggggctccatgagcagcgtcaccaagctcagcggcctctttggggacactcaatccaaagacccaaagccggaggccatcctcacgccactcatgcacaacggcaagctcgccactcccggcaacacggccaagatgctcattaaagcagaccagcaccacctggacctgacggccctccccaccccagagtcaaccccaacgctgcagcagaagcggaagcccagccgcggcagccgcgagtgggagaggaaccagaacctcatcaatgcctgcacaaaggacatgccccccatgggctcccctgtgattcccacggacctgcccctgcgggcctcccccagccacatccccagcgtggtggtcctgcccatcacgcagcagggctaccagcatgagtacgtggaccagcccaaaatgagcgaggtggcccagatggcgctggaggaccaggccgccacactggagtataagaccatcaaggaacatctcagcagcaagagtcccaaccatggggtgaaccttgtggagaacctggacagcctgccccccaaagttccacagcgggaggcctccctgggtcccccgggagcctccctgtctcagaccggtctaagcaagcggctggaaatgcaccactcctcttcctacggggttgactataagaggagctaccccacgaactcgctcacgagaagccaccaggccaccactctcaaaagaaacaacactaactcctccaattcctctcacctctccagaaaccagagctttggcaggggagacaacccgccgcccgccccgcagagggtggactccatccaggtgcacagctcccagccatctggccaggccgtgactgtctcgaggcagcccagcctcaacgcctacaactcactgacaaggtcggggctgaagcgtacgccctcgctaaagccggacgtaccccccaaaccatcctttgctcccctttccacatccatgaagcccaatgatgcgtgtacataatcccagggggagggggtcaggtgtcgaaccagcaggcaaggcgaggtgcccgctcagctcagcaaggttctcaactgcctcgagtacccaccagaccaagaaggcctgcggcagagccgaggacgctgggtcctcctctctgggacacaggggtactcacgaaaactgggccgcgtggtttggtgaaggtttgcaacggcggggactcaccttcattctcttccttcactttcccccacaccctacaacaggtcggacccacaaaagacttcagttatcatcacaaacatgagccaaaagcacatacctaccccatcccccacccccacacacacacacacatgcacacaacacatacacacacacgcacagaggtgaacagaaactgaaacattttgtccacaacctcacgggacgtggccagactgggtttgcgttccaacctgcaaaacacaaatacattttttaaaatc

SEQ ID NO: 11073 - protein, 507 aa, Homo sapiens
MSVYNSEKCSYDGVEDKRIMGMQLDRASSSLYVAFSTCVIKVPLGRCERHGKCKKTCIASRDPYCGWIKEGGACSHLSPNSRLTFEQDIERGNTDGLGDCHNSFVALNGVIRESYLKGHDQLVPVTLLAIAVILAFVMGAVFSGITVYCVCDHRRKDVAVVQRKEKELTHSRRGSMSSVTKLSGLFGDTQSKDPKPEAILTPLMHNGKLATPGNTAKMLIKADQHHLDLTALPTPESTPTLQQKRKPSRGSREWERNQNLINACTKDMPPMGSPVIPTDLPLRASPSHIPSVVVLPITQQGYQHEYVDQPKMSEVAQMALEDQAATLEYKTIKEHLSSKSPNHGVNLVENLDSLPPKVPQREASLGPPGASLSQTGLSKRLEMHHSSSYGVDYKRSYPTNSLTRSHQATTLKRNNTNSSNSSHLSRNQSFGRGDNPPPAPQRVDSIQVHSSQPSGQAVTVSRQPSLNAYNSLTRSGLKRTPSLKPDVPPKPSFAPLSTSMKPNDACT

SEQ ID NO: 11074 - DNA, 2356 bp, Homo sapiens
  CDS (33)..(779)
atttaaatggttcaattgatggcattcgccacatgtttacccctaagcttgaaataatgctggagcccaaggtctggagagaagctgctactcaagtgttctttgccttaggtctgggatttggtggtgtcattgccttttcaagctacaacaagagagacaacaactgccactttgatgctgtcctggtgtccttcatcaattttttcacttctgtcctggcaacattggtggtgtttgcagttctgggcttcaaagcaaatgtcataaatgagaaatgcattacacaaaattcagagacgatcatgaaatttttgaaaatggggaacattagtcaggatattattccccatcatatcaacctttcaactgttactgtagaagactatcatttagtttatgacatcattcaaaaagtgaaagaagaagagtttcctgctcttcatctcaattcctgtaaaattgaagaagagctaaataaagctgttcaggggaccggcttagcttttattgcctttacagaagcgatgacacattttcctgcatctcccttctggtcagtgatgtttttcctcatgctggtcaatctaggccttggcagtatgtttggaaccattgaagggattgtcacgcctattgtggacactttcaaagtgaggaaagaaattcttactgttatctgttgtcttctggcattttgtattggcctgatattgtgcaacgctctggaaattactttgttacaatgtttgatgattattctgctacactgcctctgctaattgtagtcattttggagaatattgctgtatgctttgtttatggcatagataagtttatggaagacctaaaagatatgctgggctttgctcccagcagatattactactatatgtggaaatatatttctcctctaatgctattatcattgctaatagctagtgttgtgaatatgggattaagtcctcctggctataacgcatggattgaagataaggcatctgaagaatttctgagctatccaacatggggactggttgtttgtgtctctctggttgtctttgcaatactcccagtccctgtagttttcattgttcgtcgcttcaaccttatagatgatagttctggtaatttagcatctgtgacctataagagaggaagggtcctgaaagagcctgtgaacttagagggcgatgatacaagcctcattcacggaaaaataccgagcgagatgccatctccaaattttggtaaaaatatttatcgaaaacagagtggatccccaactctggatactgctcccaatggacggtatggaatagggtacttgatggcagatattatgccagatatgccagaatctgatttgtagctgggggaaaagtcagtgggttttatttggttcatttttaccaatgaacattggccctagtaggagaagcattaggcttcacttatcagagggcaatctcaggtgttccgtggctgtgatctttaatcctaacagtatatgtcagttcaacttgagcattcttttggattctttggtttacatttgtgcagaaaggattgcagacaaatcttaggagggctgaggtacatgtttgccaggatttttttttaagtacctttggtgtattttcaaatatttctatctcttaaaaaaatggtattacctcagtttctaataatttctgggtttagtagtgttgacaattaaaaatggtatacattaaaatttataagtttgccttcagggtaacttccagtgtcacaatgagcagttctgtaagtgggtgcctctcagcacatttctatgaatatattatgtagataggctgtattgattttggtagcattgacaccttcttaggcaattagttgaagaaaactgcaaaatattttcttatgtaatagctgtatagagcaatagcaatcaaagcatgagaaggcactaacgctgggatgaaagatgagattcagaggtgactgagaatcatgtgagtgatggctgtatattttgtgtaaaatatatgtgtgaaaatgaactaagagtgagttactcagcactctcaagaattatgcagattctgcatttttcttatgccgtgtgcctaaaaacctacttgatatttattgtggtttcaagattattcatagtatatttatacaatatacttgcaatgcatttaagtacttaaagtactaatttgaaaacttgaagcaagatggcattttaattaatatatttctgttttgcttctgttttatgcaaatataaatcatttttaagtgattgttaaaattgtaatgcattacattttaatctacaaataaacaaagtttaaaaatgaat

SEQ ID NO: 11075 - protein, 249 aa, Homo sapiens
MFTPKLEIMLEPKVWREAATQVFFALGLGFGGVIAFSSYNKRDNNCHFDAVLVSFINFFTSVLATLVVFAVLGFKANVINEKCITQNSETIMKFLKMGNISQDIIPHHINLSTVTVEDYHLVYDIIQKVKEEEFPALHLNSCKIEEELNKAVQGTGLAFIAFTEAMTHFPASPFWSVMFFLMLVNLGLGSMFGTIEGIVTPIVDTFKVRKEILTVICCLLAFCIGLILCNALEITLLQCLMIILLHCLC

SEQ ID NO: 11076 - DNA, 2037 bp, Homo sapiens
  CDS (124)..(1650)
tgcaagtatgacttttgctggatttgccttgaagagtggaaaaaacatagttcgtccactggaggttattacagatgtactcgctatgaagtcattcaacacgtggaggagcaatccaaggaaatgactgtggaggctgagaaaaaacacaaacgatttcaggaacttgacagatttatgcactattatacaagatttaaaaaccatgagcatagttatcagctagaacaacgccttcttaaaacagccaaagaaaagatggagcaattgagcagagctctcaaagaaactgaaggaggctgtccagataccactttcattgaagatgcagttcatgtgctcttaaaaactcggcgcattctcaagtgttcttatccatatggatttttcttggaacctaaaagcacaaagaaagaaatttttgaactaatgcaaacagacctagaaatggtcactgaagaccttgcccagaaagtcaataggccttaccttcgcacaccccgccacaagatcatcaaagcagcatgccttgtacagcagaagaggcaagaattcctggcatctgtggctcggggagtagctcctgcagactcaccagaagctccaaggcgcagctttgctggtggaacatgggattgggaatatttaggatttgcatcaccagaggaatatgctgaatttcagtatcggaggaggcacagacaacgtcgtcgaggagatgttcacagtctactcagtaatcctccagaccctgatgagccaagtgaaagcactttagatattccagaaggcggcagcagcagccgcaggcctggcacatccgtggtaagttctgcatctatgagtgtgctgcacagctcttccctgcgtgactacacccctgccagtcgctctgaaaaccaggactctcttcaggctctgagttccttggatgaagacgatcccaatatacttcttgcaatacagttatcactgcaagagtctgggctggccctcgatgaagaaactagagacttcctcagtaatgaagcatccttaggtgcgataggcacttctttaccttccaggctggactctgtccccagaaatacagatagccctcgggctgcattgagcagctctgagcttttggaacttggtgacagcctcatgagactaggagcagagagtgacccattttcaactgacaccctgagctcacaccctctcagtgaggcaagaagtgatttctgtccctcatctagtgatcctgactcagctggccaggaccccaacatcaatgacaatcttctcggcaacatcatggcttggtttcatgacatgaaccctcagagtattgccctgattcctccagcaactacagaaatcagtgcagattcccagctcccctgtatcaaagacgggtcagaaggtgtgaaggatgtggaaatggtgctgccagaagattcaatgtttgaagatgccagtgtcagtgaaggtagaggaacccagatagaagaaaatcctttggaagaaaatattctggcgggggaagcagcatctcaagctggtgacagtggtaacgaggcagccaacagaggagatggttcagatgtttcaagtcaaacacctcaaacctcaagtgactggcttgaacaagtacatttagtgtgaactgcacacatctgggctctaaatgaattacaggtacagatggtatgctaggtggagtatgcttgatagagactttgattcacttaattccaactcagtgataaaccactgacattagggttgaatacagagaagttcccttgaatggtagcttcattttttattttaaccttacagggaatttcctttgtacttaattgaatagcttttcccctttttgctgacaaaaagaagagcaagagaaagagaaacaaaaatgaaataaataagtagtattccacactctaagaaaatgcagtcctctatttagcctaggcttgacaatacttaaattgaacatttaaactaaaggcttactccctaatctttgggtggctttccctt

SEQ ID NO: 11077 - protein, 509 aa, Homo sapiens [sequence omitted]

SEQ ID NO: 11078 - DNA, 1820 bp, Homo sapiens
  CDS (21)..(1820)
aactttcttctgatgaagagatgaaaatggcggagatgcgaccaccattaattgaaacctctattaaccagccaaaagtcgtagcacttagtaataacaaaaaagatgatacaaaggaaacagattctttatcagatgaagttacacacaatagcaatcagaataacagcaattgttcttctccatctcggatgtctgattcagtttctcttaatactgatagtagtcaagacacctcactctgctctccagtgaaacaaactcatattgatattaattccaaaatcaggcaagaagatgaaaattttaacagccttttacaaaatggagatattttaaacagttcaacagaggaaaagttcaaagctcatgataaaaaagattttaacttacctgaatatgatttgaatgttgaagagcgattagttctaattgagaaaagtgttgactcaacagccacagctgatgacactcacaaattagatcatatcaatatgaatcttaataaacttataactaatgatacatttcaaccagagatcatggaaagatcaaaaacacaggatattgtgcttggaacaagctttttaagcattaattctaaagaggaaactgggcacttggaaaatggaaacaagtatcctaatttggaatccgtaaataaggtaaatggacattctgaggaaacttcccagtctcctaataggactgaaccacatgacagtgattgttctgttgacttaggtatttccaaaagcactgaagatctctcccctcagaaaagtggtccagttggatctgttgtgaaatctcatagcataactaatatggagattggagggctaaaaatctatgatattcttagtgataatggacctcagcagccaagtacaaccgttaaaatcacatctgctgttgatggaaaaaatatagtcaggagcaagtctgccacactgttgtatgatcaaccattgcaggtatttactggttcttcctcatcttctgatttaatatcaggaacaaaggcaattttcaagtttgattcaaatcataatcccgaagagccaaatataataagaggccccacaagtggcccacaatctgcacctcaaatatatggtcctccacagtataatatccaatacagtagcagtgctgcagtcaaagacactttgtggcactccaaacaaaatccccaaatagaccatgccagttttcctcctcagctccttcctagatcagagagcacagaaaatcaaagttatgctaaacattctgccaatatgaatttctctaatcataacaatgttcgagctaatactgcataccatttacatcagagacttggcccagcaagacatggggaaatgtgggccatctcaccaaacgaccgacttattcctgcagtaactcgaagtacaatccagcggcaaagtagtgtgtcctccacagcctctgtaaatcttggtgatccaggctctacaaggcgggctcagattcctgaaggagattatttatcatacagagagttccactcagcgggaagaactcctccaatgatgccaggatcacagagacccctttctgcacgaacatacagcatagatggtccaaatgcatcaagacctcagagtgctcgaccctctattaatgaaataccagagagaactatgtcagttagtgatttcaattattcacggactagtccttcaaaaagaccaaatgcaagggttggttctgagcattctttattagatcctccaggaaaaagtaaagttcctcgtgactggagagaacaagtacttcgacatattgaagcc

SEQ ID NO: 11079 - protein, 600 aa, Homo sapiens
MKMAEMRPPLIETSINQPKVVALSNNKKDDTKETDSLSDEVTHNSNQNNSNCSSPSRMSDSVSLNTDSSQDTSLCSPVKQTHIDINSKIRQEDENFNSLLQNGDILNSSTEEKFKAHDKKDFNLPEYDLNVEERLVLIEKSVDSTATADDTHKLDHINMNLNKLITNDTFQPEIMERSKTQDIVLGTSFLSINSKEETGHLENGNKYPNLESVNKVNGHSEETSQSPNRTEPHDSDCSVDLGISKSTEDLSPQKSGPVGSVVKSHSITNMEIGGLKIYDILSDNGPQQPSTTVKITSAVDGKNIVRSKSATLLYDQPLQVFTGSSSSSDLISGTKAIFKFDSNHNPEEPNIIRGPTSGPQSAPQIYGPPQYNIQYSSSAAVKDTLWHSKQNPQIDHASFPPQLLPRSESTENQSYAKHSANMNFSNHNNVRANTAYHLHQRLGPARHGEMWAISPNDRLIPAVTRSTIQRQSSVSSTASVNLGDPGSTRRAQIPEGDYLSYREFHSAGRTPPMMPGSQRPLSARTYSIDGPNASRPQSARPSINEIPERTMSVSDFNYSRTSPSKRPNARVGSEHSLLDPPGKSKVPRDWREQVLRHIEA

SEQ ID NO: 11080 - DNA, 2000 bp, Homo sapiens
  CDS (161)..(1234)
aaatgcgtcaaacctcgacaaggtgctaacagacatcaaagctgacaaagaccaagccaacgatggtctttcctctgcattgctgatcttgtacttggattcagcaaggaaccttccgtcagggaagaaaataagcagcaacccaaatcctgttgtccagatgtcagttgggcacaaggcccaggagagcaagattcgatacaaaaccaatgaacctgtgtgggaggaaaacttcactttcttcattcacaatcccaagcgccaggaccttgaagttgaggtcagagacgagcagcaccagtgttccctggggaacctgaaggtccccctcagccagctgctcaccagtgaggacatgactgtgagccagcgcttccagctcagtaactcgggtccaaacagcaccatcaagatgaagattgccctgcgggtgctccatctcgaaaagcgagaaaggcctccagaccaccaacactcagctcaagtcaaacgtccctctgtgtccaaagaggggaggaaaacatccatcaaatctcatatgtctgggtctccaggccctggtggcagcaacacagctccatccacaccagtcattgggggcagtgataagcctggtatggaagaaaaggcccagccccctgaggccggccctcaggggctgcacgacctgggcagaagctcctccagcctcctggcctccccaggccacatctcagtcaaggagccgacccccagcatcgcctcggacatctcgctgcccatcgccacccaggagctgcggcaaaggctgaggcagctggaaaacgggacgaccctgggacagtctccactggggcagatccagctgaccatccggcacagctcgcagagaaacaagcttatcgtggtcgtgcatgcctgcagaaacctcattgccttctctgaagacggctctgacccctatgtccgcatgtatttattaccagacaagaggcggtcaggaaggaggaaaacacacgtgtcaaagaaaacattaaatccagtgtttgatcaaagctttgatttcagtgtttcgttaccagaagtgcagaggagaacgctcgacgttgccgtgaagaacagtggcggcttcctgtccaaagacaaagggctccttggcaaagtattggttgctctggcatctgaagaacttgccaaaggctggacccagtggtatgacctcacggaagatgggacgaggcctcaggcgatgacatagccgcagcaggcaggaggcgtcctcttcagcgtagctctccacctctacccggaacacaccctctcacagacgtaccaatgttatttttataatttcatggatttagttatacataccttaatagttttataaaattgttgacatttcaggcaaatttggccaatattatcattgaattttctgtgttggatttcctctaggatttcgccagttcctacaacgtgcagtagggcggcggtagctcttgtgtctgtggactctgctcagctgtgtccgtaggagtcggatgtgtctgtgctttattatggccttgtttatatatcactgaggtatactatgccatgtaaatagactattttttataatctttacatgctggtttaaattcagaaggaaatagatcaaggaaatatatatattttcttctaaaacttattaaattcgtgtgacaaataatcattttcatcttggcagcaaaaagttctcagtgacctattttgtggtgtttctttttgaaaagaaaagctgaaatattattaaatgctagtatgtttctgcccattatgaaagatgaaataaagtattcaaaatattaacattttcataaatataaggatgtattattgagaagtaagttgaagggcttataaggaaaaatgttttataactgagtaatatattaagagaattgtcatggttcataaatcacattatgctaatctgaaatttcttacataaaaatgaagtgtcttatgtttatttt

SEQ ID NO: 11081 - protein, 358 aa, Homo sapiens
MSVGHKAQESKIRYKTNEPVWEENFTFFIHNPKRQDLEVEVRDEQHQCSLGNLKVPLSQLLTSEDMTVSQRFQLSNSGPNSTIKMKIALRVLHLEKRERPPDHQHSAQVKRPSVSKEGRKTSIKSHMSGSPGPGGSNTAPSTPVIGGSDKPGMEEKAQPPEAGPQGLHDLGRSSSSLLASPGHISVKEPTPSIASDISLPIATQELRQRLRQLENGTTLGQSPLGQIQLTIRHSSQRNKLIVVVHACRNLIAFSEDGSDPYVRMYLLPDKRRSGRRKTHVSKKTLNPVFDQSFDFSVSLPEVQRRTLDVAVKNSGGFLSKDKGLLGKVLVALASEELAKGWTQWYDLTEDGTRPQAMT

SEQ ID NO: 11082 - DNA, 2178 bp, Homo sapiens
  CDS (319)..(1572)
tacgcgctgcgggaccggcaggggaacgccatcggggtcacagcctgcgacatcgacggggacggccgggaggagatctacttcctcaacaccaataatgccttctcgggggtggccacgtacaccgacaagttgttcaagttccgcaataaccggtgggaagacatcctgagcgatgaggtcaacgtggcccgtggtgtggccagcctctttgccggacgctctgtggcctgtgtggacagaaagggctctggacgctactctatctacattgccaattacgcctacggtaatgtgggccctgatgccctcattgaaatggaccctgaggccagtgacctctcccggggcattctggcgctcagagatgtggctgctgaggctggggtcagcaaatatacagggggccgaggcgtcagcgtgggccccatcctcagcagcagtgcctcggatatcttctgcgacaatgagaatgggcctaacttccttttccacaaccggggcgatggcacctttgtggacgctgcggccagtgctggtgtggacgacccccaccagcatgggcgaggtgtcgccctggctgacttcaaccgtgatggcaaagtggacatcgtctatggcaactggaatggcccccaccgcctctatctgcaaatgagcacccatgggaaggtccgcttccgggacatcgcctcacccaagttctccatgccctcccctgtccgcacggtcatcaccgccgactttgacaatgaccaggagctggagatcttcttcaacaacattgcctaccgcagctcctcagccaaccgcctcttccgcgtcatccgtagagagcacggagaccccctcatcgaggagctcaatcccggcgacgccttggagcctgagggccggggcacagggggtgtggtgaccgacttcgacggagacgggatgctggacctcatcttgtcccatggagagtccatggctcagccgctgtccgtcttccggggcaatcagggcttcaacaacaactggctgcgagtggtgccacgcacccgggttggggcctttgccaggggagctaaggtcgtgctctacaccaagaagagtggggcccacctgaggatcatcgacgggggctcaggctacctgtgtgagatggagcccgtggcacactttggcctggggaaggatgaagccagcagtgtggaggtgacgtggccagatggcaagatggtgagccggaacgtggccagcggggagatgaactcagtgctggagatcctctacccccgggatgaggacacacttcaggacccagccccactggagacaccaatgaatgcatccagttcccattcgtgtgccctcgagacaagcccgtatgtgtcaacacctatggaagctacaggtgccggaccaacaagaagtgcagtcggggctacgagcccaacgaggatggcacagcctgcgtggggactctcggccagtcaccgggcccccgccccaccacccccaccgctgctgctgccactgccgctgctgctgccgctgctggagctgccactgctgcaccggtcctcgtagatggagatctcaatctggggtcggtggttaaggagagctgcgagcccagctgctgagcaggggtgggacatgaaccagcggatggagtccagcaggggagtgggaaagtgggcttgtgctgctgcctagacagtagggatgtaaaggcctgggagctagaccctccccaagcccatccatgcacattacttagctaacaattagggagactcgtaaggccaggccctgtgctgggcacatagctgtgatcacagcagacagggtcgctgccctgatggcgcttacattccagtgggtctaatgaccatatcttaggacacagatgtgcccagggaggtggtgtcactgcacaggaagtatgaggactttagtgtcctgagttcaaatcctgattcaggaactcacaaagctatgtgaccttacaccagtcacttaacttgttagccatccattatcgcatctgcaaaatggggattaagaatagaatcttggggttagtgtggagattagattaaatgtatgtaagacacttggcacaaaacctggcacatagtaaaggctcaataaaaacaagtgcctctcactgggctttgtcaacacgtg

SEQ ID NO: 11083 - protein, 418 aa, Homo sapiens
MDPEASDLSRGILALRDVAAEAGVSKYTGGRGVSVGPILSSSASDIFCDNENGPNFLFHNRGDGTFVDAAASAGVDDPHQHGRGVALADFNRDGKVDIVYGNWNGPHRLYLQMSTHGKVRFRDIASPKFSMPSPVRTVITADFDNDQELEIFFNNIAYRSSSANRLFRVIRREHGDPLIEELNPGDALEPEGRGTGGVVTDFDGDGMLDLILSHGESMAQPLSVFRGNQGFNNNWLRVVPRTRVGAFARGAKVVLYTKKSGAHLRIIDGGSGYLCEMEPVAHFGLGKDEASSVEVTWPDGKMVSRNVASGEMNSVLEILYPRDEDTLQDPAPLETPMNASSSHSCALETSPYVSTPMEATGAGPTRSAVGATSPTRMAQPAWGLSASHRAPAPPPPPLLLPLPLLLPLLELPLLHRSS

SEQ ID NO: 11084 - DNA, 1670 bp, Homo sapiens
  CDS (38)..(1366)
tatccctgttcagtactgcgcccagcccaccaatggcatggtgtatttccgggccttctccagcctgaacacactccccgaggagctgaggccctatgtgccccccttctgcagcatcctcaccaagctgggctgcggccttcttgactaccgggagcaggctcagcagatagaattgaagaccggagggatgagtgcttctccccacgtgctccccgacgactcacacatggacacctacgagcagggtgtgcttttctcctctctctgcctggatcgaaacctgccagacatgatgcagctatggagtgaaatatttaacaacccgtgctttgaagaagaggagcacttcaaggtgctggtgaagatgaccgcccaggagctcgccaatggaattcctgactctgggcacctgtacgcatccatcagggcaggccggaccctcacgcccgcaggggacctgcaggagaccttcagcgggatggatcaggtgcggctgatgaagaggattgcagaaatgacagatatcaaacccatcctgaggaagctcccgcgtatcaagaaacacttgttaaatggtgataatatgaggtgttcagtgaatgcgactcctcagcagatgcctcagacagaaaaagcggtcgaagacttccttagaagcatcggtcggagtaaaaaggaacggaggcctgtgcgcccacacacggtcgagaaacctgtgcccagcagctctggtggagatgcccacgttccccatggctcccaggtcattaggaagctggtcatggaacccaccttcaagccctggcagatgaagactcacttcctgatgcccttcccggtgaattacgtgggtgaatgcatccgaactgtcccctacacggacccagatcatgccagtcttaaaatccttgcacgtttgatgactgccaaattcttgcatacagaaattcgagaaaaaggcggtgcttatggtggaggcgcaaaactcagccacaatgggattttcaccctttactcttacagggacccaaatacaatagagacgctccagtcttttgggaaggctgtcgactgggctaagtctggaaaattcacacagcaagacatcgacgaagccaaactttctgtcttctcaaccgtagatgctcctgtcgctccttcagacaaaggaatggaccacttcttgtacggcctctcggatgagatgaagcaggcccacagagagcagctctttgctgtcagccacgacaagctcctggccgtgagcgataggtacctcggcactgggaagagcacacacggcctggccatcctcggacccgagaacccgaaaattgccaaggacccatcctggatcatccgatgagcagccgtggcgctcgactgcacaggagcccgagacaatacacctccaagctgaatatgaaaagtcagaaatgctactgctttttccaagaatattatgtcattgagtgtcgccaaagcccttgactggcgagtcaaaaactcagatctatcttaagagtgaccaggaagaggttcattgaaataatcatgcatgaagcgccaaagatgcaccatgtagaattttcactttgtactggcaggctcgttttacctgattctagaatatttaagaatctaaaaataaagggcaactctgactt

SEQ ID NO: 11085 - protein, 443 aa, Homo sapiens [sequence omitted]

SEQ ID NO: 11086 - DNA, 1824 bp, Homo sapiens
  CDS (208)..(1824)
gtgatccggggagacaggaacacgggcaagacagcgctgtggcaccgcctgcagggccggccgttcgtggaggagtacatccccacacaggagatccaggtcaccagcatccactggagctacaagaccacggatgacatcgtgaaggttgaagtctgggatgtagtagacaaaggaaaatgcaaaaagcgaggcgacggcttaaagatggagaacgacccccaggaggcggagtctgaaatggccctggatgctgagttcctggacgtgtacaagaactgcaacggggtggtcatgatgttcgacattaccaagcagtggaccttcaattacattctccgggagcttccaaaagtgcccacccacgtgccagtgtgcgtgctggggaactaccgggacatgggcgagcaccgagtcatcctgccggacgacgtgcgtgacttcatcgacaacctggacagacctccaggttcctcctacttccgctatgctgagtcttccatgaagaacagcttcggcctaaagtaccttcataagttcttcaatatcccatctttgcagcttcagagggagacgctgttgcggcagctggagacgaaccagctggacatggacgccacgctggaggagctgtcggtgcagcaggagacggaggaccagaactacggcatcttcctggagatgatggaggctcgcagccgtggccatgcgtccccactggcggctaacgggcagagcccatccccgggctcccagtcaccagtggtgcctgcaggcgctgtgtccacggggagctccagccccggcacaccccagcccgccccacagctgcccctcaatgctgccccaccatcctctgtgccccctgtaccaccctcagaggccctgcccccacctgcgtgcccctcagcccccgccccacggcgcagcatcatctctaggctgtttgggacgtcacctgccaccgaggcagcccctccacctccagagccagtcccggccgcacagggcccagcaacggtccagagtgtggaggactttgttcctgacgaccgcctggaccgcagcttcctggaagacacaacccccgccagggacgagaagaaggtgggggccaaggctgcccagcaggacagcgacagtgatggggaggccctgggcggcaacccgatggtggcagggttccaggacgatgtggacctcgaagaccagccacgtgggagtcccccgctgcctgcaggccccgtccccagtcaagacatcactctttcgagtgaggaggaagcagaagtggcagctcccacaaaaggccctgccccagctccccagcagtgctcagagccagagaccaagtggtcctccataccagcttcgaagccacggagggggacagctcccacgaggaccgcagcacccccctggccaggcggtgtctctgttcgcacaggtccggagaagcgcagcagcaccaggccccctgctgagatggagccggggaagggtgagcaggcctcctcgtcggagagtgaccccgagggacccattgctgcacaaatgctgtccttcgtcatggatgaccccgactttgagagcgagggatcagacacacagcgcagggcggatgactttcccgtgcgagatgacccctccgatgtgactgacgaggatgagggccctgccgagccgcccccaccccccaagctccctctccccgccttcagactgaagaatgactcggacctcttcgggctggggctggaggaggccggacccaaggagagcagtgaggaaggtaaggagggcaaaaccccctctaaggagaag

SEQ ID NO: 11087 - protein, 539 aa, Homo sapiens
MENDPQEAESEMALDAEFLDVYKNCNGVVMMFDITKQWTFNYILRELPKVPTHVPVCVLGNYRDMGEHRVILPDDVRDFIDNLDRPPGSSYFRYAESSMKNSFGLKYLHKFFNIPSLQLQRETLLRQLETNQLDMDATLEELSVQQETEDQNYGIFLEMMEARSRGHASPLAANGQSPSPGSQSPVVPAGAVSTGSSSPGTPQPAPQLPLNAAPPSSVPPVPPSEALPPPACPSAPAPRRSIISRLFGTSPATEAAPPPPEPVPAAQGPATVQSVEDFVPDDRLDRSFLEDTTPARDEKKVGAKAAQQDSDSDGEALGGNPMVAGFQDDVDLEDQPRGSPPLPAGPVPSQDITLSSEEEAEVAAPTKGPAPAPQQCSEPETKWSSIPASKPRRGTAPTRTAAPPWPGGVSVRTGPEKRSSTRPPAEMEPGKGEQASSSESDPEGPIAAQMLSFVMDDPDFESEGSDTQRRADDFPVRDDPSDVTDEDEGPAEPPPPPKLPLPAFRLKNDSDLFGLGLEEAGPKESSEEGKEGKTPSKEK

SEQ ID NO: 11088 - DNA, 1865 bp, Homo sapiens
  CDS (45)..(1241)
gcttgaggcgtagggggtggcgctctccgttcggcggcgctcccatggcgcacattaccattaaccagtacctgcagcaggtgtacgaagccatcgacagcagagatggagcatcttgtgcagagttggtgtcttttaaacatcctcatgttgcaaacccacgacttcaaatggcctctccagaggagaagtgtcaacaagtcttggaacccccttatgatgaaatgtttgcagctcatttaaggtgcacttatgcagtggggaatcatgacttcatagaggcatacaagtgccagaccgtgatagtccaatcattcttgcgagcattccaggcccacaaagaagaaaactgggctctgcctgtcatgtatgcagtagcgcttgaccttcgagtgtttgccaataatgcagatcaacagttggtaaagaaaggaaaaagcaaagttggggacatgttggaaaaagcagcagagttactgatgagctgtttccgggtctgtgccagcgacacccgtgctggtatagaggactctaagaagtggggcatgctgtttctggtgaaccagctgtttaaaatctacttcaagatcaacaaactccatttatgtaaacccctaattagagcaattgacagctcaaacctgaaagacgattacagcactgcacagagagtaacatacaaatactacgttggacgcaaggctatgtttgacagcgattttaagcaagctgaggagtacctgtcatttgcctttgagcattgtcaccgttctagtcagaagaacaaaaggatgattctgatctatttgcttccagtaaaaatgctattgggtcacatgcccactgtggagctcctgaaaaagtatcacctgatgcagtttgcggaagtaaccagagctgtgagcgagggcaacctgctgctgctgcacgaggcgctggcgaagcacgaggccttcttcattcgctgcggaatcttcctcatcctggagaagctgaagatcatcacctacaggaacctctttaagaaagtgtatttgttactgaaaacacaccagctgtctctggatgcttttctggttgccttgaagttcatgcaggtggaggacgtggacattgacgaagttcagtgtattctggctaacttgatatacatgggacacgtcaaaggctacatatcgcatcagcatcagaagctggtggtcagcaagcagaacccatttcctcccctgtccacggtgtgttgaaagtacacggagccccgaggacgggtgagcagttgtttctttccactttggttgtgctgatgagaccggtccggtactgcaacaaggctccctgaagccggaactcttggaggcgcttttcccagggatgctgaggctgagattttcagcacacccgagttaatctccttcatttgtaactaatttcagcctgatgaaaacctggaattcctttttcacagactcggctggttctggagtctttgtgagacttctttgaaggaggctttgcgtgaaggctgctcggctcacttttcctaagtgtggttcctgaaggctgtctttgtaactttttgtagttctttgtgtaaaaagcgtattctgaatttatacacatggcatgttcttcattatatcttccaggatacatctatttttatatattaaatttgaatgtgttatcaaaatgcttggttaacttaaggcacctttttaaaagcagaatttaatttgatttaaattttccagattttatagcttgcctgtatggatgctcctcaatttatgatggggttacatcccaataaacttattttatttgcctttgctttgttggttaaaaaaaaatttcttttaaaaaac

SEQ ID NO: 11089 - protein, 399 aa, Homo sapiens
MAHITINQYLQQVYEAIDSRDGASCAELVSFKHPHVANPRLQMASPEEKCQQVLEPPYDEMFAAHLRCTYAVGNHDFIEAYKCQTVIVQSFLRAFQAHKEENWALPVMYAVALDLRVFANNADQQLVKKGKSKVGDMLEKAAELLMSCFRVCASDTRAGIEDSKKWGMLFLVNQLFKIYFKINKLHLCKPLIRAIDSSNLKDDYSTAQRVTYKYYVGRKAMFDSDFKQAEEYLSFAFEHCHRSSQKNKRMILIYLLPVKMLLGHMPTVELLKKYHLMQFAEVTRAVSEGNLLLLHEALAKHEAFFIRCGIFLILEKLKIITYRNLFKKVYLLLKTHQLSLDAFLVALKFMQVEDVDIDEVQCILANLIYMGHVKGYISHQHQKLVVSKQNPFPPLSTVC

SEQ ID NO: 11090 - DNA, 2653 bp, Homo sapiens
  CDS (420)..(2381)
gcaagcccagcatcagcctctcagcccccgacatcctgcctctacactgcaccatccgccggcaaccgctcccggacagcggccaggccgcggggaggctggtcctggagcccatccccggggcgcacatctccgtcaacttctccgaggtggggcacaggaccgtggtgctgcaccacggggacctgctctccctggggctctactacctgctgctattcaaggaccccgcgcaggcccagcccctgcccgcccgggccttggcgcgcctccgggctgtgccgcagagctgccggctgtgcggggccgcgctcggggcccggggagccgcctcccctactcaggccgccctgccccggcgccagcagctgctcctggagtttgagccccacctggaggacacgctgctgcagaggatcatgacgttgatcgagccggggggcgacgaccacaagctgacccccgccttcctcctgtgcctctgcatccagcactcggccacccacttccagccgggcacattcgggcagctcctgctcaagatagccaggctgatccgcgagactgtctgggagaaaaccaaagaactagcagagaagcaggcgcaactccaggagcccatctcgctggccagctgcgccatggctgatctggttccagacttgcagcccattcttttctggatgtctaactccatcgagctcctgtactttatccagcagaaatgcccactctacatgcagagcatggaggagcagctggacatcacaggctcgaaggaatcgctgttctcctgcacgctgacggccagcgaggaggccatggcggtgctggaggaggtggtgctgtacgccttccagcagtgcgtctactatgtctccaagtccctgtacatctgcctcccggcactcctggagtgcccgccattccagacggagcgccgtgagagctggtcctcggcccccgaactgcccgaggagctgcgccgcgtggtgtctgtgtaccaggcagccctggacctcctgcggcagctgcaggtgcaccccgaggtggcctcgcagatgctcgcctacctcttcttcttctccgggacactgcttctcaaccagctcctcgacaggggcccctccctgagctgcttccactggcccagaggtgtccaggcctgcgcccgcctgcagcagctcctggagtggatgcggagcgccggcttcggggcggctggagagcacttcttccagaagctctcctgcaccctcaacctgctggccacacccagggcccagctcatccagatgagctggacagccctgcgggctgcgttccccgcactgagcccagcacagctgcaccggctgctgactcactaccagctggcctcggccatgggccccatgagcacctgggagccaggggcccaggacagccccgaggccttcaggtcagaggatgttctggagtcctacgaaaaccccccacccatcgtcctgcccagcgacggcttccaggtggacttggaagccaactgcctggacgacagcatctaccagcacctgctctacgtccgccactttctgtggggtctgcggagcagagccagccccggcagccctggcaggcctggcagtggggcctcccagccagtgtgccccgagggtatgcaccacgtggtccttgacgggcacctggaggccccgagctgccccctggctcccagggaccctggcccagcagcccgggaagtggccccggagcgtactcttcccttgaggggggctccctgggcacaggccccccctggaaggcaacccggccgtgggggctcccaggctggccccccgcacacggactcgtcctgcttgctcacgcctcccagcactccacttggccctgagcctggggaccccgactggccagagtccggcggcccctgtggaaaagcgctcccagagaggcagaggaacggactcagcggcctccggggtgcagctccggaaggagactctgcagcccttgcggaggagtcccctccagccccgtccagccgcagctccagcaccgaggacttctgctacgtcttcacggtggagctggaacgaggcccctccgggctggggatgggcctgatcgacgggatgcacacgcacctgggcgcccccgggctctacatccagaccctgctcccgggcagccccgcagcggccgacgggcgcctgtcgctgggggaccgtatcctggaggtgaatggcagcagcctcctgggccttggctacctgagagctgtggacctgatccgtcatggcgggaagaagatgcggttcctggtcgcgaagtccgacgtggaaacagccaagaagatccatttccgcacgccccctctctaggggggctgcgaggacacccccacaggcccggcacccggtcccacctggtgacactgggcttcctcccgccttcgtccctgttttgtaactgaccaagttgggtcccgggtggggagcctcaccctggggacatgcctgttgataacatgcatctcagtgtaggttctatttatatggcagatgacgtgaaattgtgatgtttgttacagagcttttatgtttaaagacttcaatggagaagtacggttcaataaactatttttcccgtt

SEQ ID NO: 11091 - protein, 654 aa, Homo sapiens
MTLIEPGGDDHKLTPAFLLCLCIQHSATHFQPGTFGQLLLKIARLIRETVWEKTKELAEKQAQLQEPISLASCAMADLVPDLQPILFWMSNSIELLYFIQQKCPLYMQSMEEQLDITGSKESLFSCTLTASEEAMAVLEEVVLYAFQQCVYYVSKSLYICLPALLECPPFQTERRESWSSAPELPEELRRVVSVYQAALDLLRQLQVHPEVASQMLAYLFFFSGTLLLNQLLDRGPSLSCFHWPRGVQACARLQQLLEWMRSAGFGAAGEHFFQKLSCTLNLLATPRAQLIQMSWTALRAAFPALSPAQLHRLLTHYQLASAMGPMSTWEPGAQDSPEAFRSEDVLESYENPPPIVLPSDGFQVDLEANCLDDSIYQHLLYVRHFLWGLRSRASPGSPGRPGSGASQPVCPEGMHHVVLDGHLEAPSCPLAPRDPGPAAREVAPERTLPLRGAPWAQAPPGRQPGRGGSQAGPPHTDSSCLLTPPSTPLGPEPGDPDWPESGGPCGKALPERQRNGLSGLRGAAPEGDSAALAEESPPAPSSRSSSTEDFCYVFTVELERGPSGLGMGLIDGMHTHLGAPGLYIQTLLPGSPAAADGRLSLGDRILEVNGSSLLGLGYLRAVDLIRHGGKKMRFLVAKSDVETAKKIHFRTPPL

SEQ ID NO: 11092 - DNA, 3023 bp, Homo sapiens
tccaggctctgctcagtggacgccaggcaaaggggctgacctcagggcgctggttcctacgccagggctggctgttagtggtgcctccccatggggagcctcggccccgcatgttcttcctcttcactgatgtgctcctcatggccaagcctcggcctccactgcacctgctgcggagtggcacctttgcctgcaaggccctctaccccatggcccagtgtcatctcagcagggtctttggccactcaggaggcccttgtggtgggttgctcagtctgtccttccctcatgagaagctactgcttatgtccacagaccaggaggagctgtcacgctggtaccacagtctgacttgggctatcagcagccagaaaaactagaggaatcttatagattccagaactcaggatacctcagggagaggtcacagccaagagtacaaaggaatcttcagtactgaacaaaacagaacccttcatgatttgacaaaggtcactttctgtttgcctggaccaagctactccagatcatctgactaactcttaaaaatcacggccaggcacagtggctcatgcctgtaatcccagcactttgggaagcagaggtggcaggatcattccagcccaggagttcaagaccagcctgggcaacacagtgagtgagaccctgtctctatttaagaaaaaataattaagaaattttattaaaaaagaagaatcaggaaaccaagtccaacccaactaaacctcaaatgaaccagcccctaacacagatgaggggatttgggactgataagctctgtgctgtgtccatggcccgtcatttatcaaggctgcagctttgtaaatgtggctatttttatgttgtgtatagtttctatcatttatttttccactggatttaagtaaagttttttttcttttttttgggaaagacccttctgtctcagttttgctatgagaaaagggatttttgggccctgaacgcgggcatgctggtggcctcaggaatacgaggaaaagagctggagctccctctatcttctctgctgtcacactggaaggcagcctctttttgtcctaataaggacagctcttcaagaaggcccagttgtccttaggcacctagtatgggtgtgtacaaccaactaggatcgaaaaaacacacaggagcactccatcatgaaaacagactttgttttagtcgaccttcagctgtcgtccctccttcccagccaaggctgtgactggggccctttgccacagcctggctgcaccttctccgtagtccccgccccacctcccaggaagtagctaggttccatgtctctgtgctccagtttgtgggctcctcccaggcctgactgtcaccaacctcctcctcgtcctcctttaaacagaagtcctcaggaagaggtctgctggcctctgtgtggggagagatcaggaatgttccagtttcaaagactttgtctccacctccagcagactcgcctcccgagccttcacctggttctgaagcctccatatccttgtccggcttgctatcttgcagcagctcgtggatggtccatagcttcatgttcagaagctcctgctgggctccagccagagtagtcacactgaagaaatgtccactcagtggctcccaacctatgtccccattcctccctcctgccacaaattccccaaaaattcacagaatcattgctctcctcaccgctcaaaaagggggtccagctgggccatcaggttgttcaggtgctgctctgtctgggccagctgttgtgtcaactgggccagctgttgctctggggataagggaaaaaagggggcagaagtggttatgtatcttctgctgtcccctaaactcccccgacccagcacagacttctgctaaacccacctgactgcagtggctgctgcttgcttgcctcctcgtggagaaccgcagtttcatctttcccctgttgtggaagaaggaaagggcagtactgaagcaacaaggttctgctccatcacctcagtctccagagccagccaagagagagtgcaatttgagatggagacagtgattgggtttttacctcagagaatcacaatcctagtctatctagctcctcacccagcatatgaagcgacgtcctatgtcccacacatggtcagtttgctgaaacacctccaggaatgagcaactccctccggtttgaaaaaagctctggtggctgagtgctgtggctcacacctgtaatcccagcacttcgggaggccaaggtgggtggatcacctgaggtcaggagtttgagaccagcctggccaacacggtgaaaccctgtctctattaaaaatacaaaaattagccgggcgtggtggcaggtgcctgtaatcccagttacttgagaggctgaggcaggagaatcgcttgaacctgggagccagaggttgcagtgagccgagattgcgccgctgcactccagcctgggtgacagagcgagactccatctcgaaaaaaacaaaaactttggttgttagacagttcatgcacaaagccaaaatttgtcctttatgtatcttctttccatagtgcttactggagccttccaaaataatgtctcctcaacgtgacagcccctcaggaatttgaaggcaatggtcacaccctcacccgctttcctgagttttttctggtttattaacgtcagtctttacagtcagtgctcattgacggtggttttctctggttgtttcctgaacacgtagtgctcttaaagcagtgccctgaggggaatacaattctccaggggcattctgattggcaggtgaagcacagtgccatgttcccagcactgatttgggaagtggcttgtcacatcccacagtgaactcagtcaactggaatgcctaactctctttcataagacctcctgctacattatgtttctcccagactgtactcaggtccaagaacagaatttactagtctatccttctcaaagttcatcattaaattcagtcattcatcct

SEQ ID NO: 11093 - DNA, 3016 bp, Homo sapiens
  CDS (3)..(2294)
tgatgaatggctccaaaatacattttgtgcccggctgggattgtcatgggttgcccattgaaataaaagtattatcagaacttggtagagaagctcagaatctttcagctatggaaattagaaagaaagctagatcatttgctaaagcagccattgagaaacagaaatcagcatttattcgttggggaataatggcagattggaataattgctactatacatttgatgggaagtatgaagccaaacagttgagaactttttaccaaatgtatgataagggcttggtttatcgatcttacaaacctgtgttttggtctccgtcatctaggactgcattggctgaagcagaacttgaatataatcctgagcatgtcagtcgttcaatatatgtaaaatttcctctcttaaagccttctccaaaattggcatctcttatagatggttcatctcctgttagtattttggtctggaccacacaaccttggacgattccagccaatgaagctgtttgctatatgcctgaatcaaagtatgctgttgtgaaatgttctaagtctggagacctctacgtactggcggcagataaagtagcatctgttgcttctactttggaaacaacatttgagactatttcaacactttcaggtgtagatttggaaaatggtacttgcagtcatccattaattcctgataaagcctctcctcttttacctgcaaatcatgtgaccatggcaaaaggaacgggattggttcacacagccccagctcatggtatggaagactacggtgtagcgtctcagcacaacctgcccatggattgtctagtggacgaagatggagttttcacagatgttgcaggtcctgaacttcaaaacaaggctgtccttgaagagggaactgatgtggttataaagatgcttcagactgcaaagaatttgttgaaagaggagaaattggtgcatagctatccgtatgactggaggaccaagaaacctgtggttattcgtgccagcaagcagtggtttataaacatcacggatattaagactgcagccaaggaattgttaaaaaaggtgaaatttattcctggatcagcactgaatggcatggttgaaatgatggacaggcggccatattggtgtatatcaaggcaaagagtttggggtgttccaattcctgtgtttcatcataagaccaaggatgaatacttgatcaacagccaaaccactgagcatattgttaaactagtggaacaacacggcagtgatatctggtggactcttccccctgaacaacttcttccaaaagaagtcttatctgaggttggtggccctgatgccttggaatatgtgccaggtcaggatattttggacatctggtttgatagcggaacttcatggtcttatgttcttccaggtcctgaccaaagagcagatttgtacttggaaggaaaagaccagctcgggggttggtttcagtcatccttattaacaagtgtggcagcaaggaagagagcaccttataagacagtgattgttcatggatttacccttggagaaaagggagaaaagatgtccaagtctcttgggaatgtcattcatcctgatgttgtcgttaatggaggacaagatcaaagcaaagagcctccgtatggtgctgatgtccttcgctggtgggtagctgattccaatgtcttcaccgaagttgcaattggcccatccgtgctcaatgctgccagagatgatattagcaagcttaggaatacacttcgctttcttttgggaaatgtggctgatttcaacccagaaacagattccatccctgtaaacgatatgtatgtcatagaccagtacatgctacacttactgcaggatttggcaaacaagattaccgaattatacaaacaatatgattttggaaaagttgttcggctgttacggacgttttataccagagagctctctaacttttatttcagtataatcaaagataggctctattgtgaaaaggaaaatgaccccaaacgacgctcttgtcagactgcattagttgaaattttggatgtaatagttcgttcttttgctcccattcttcctcacctggctgaagaggtgttccagcacataccttatattaaagagcccaagagtgttttccgtactgggtggattagtactagttctatctggaaaaagcccgggttggaagaagcgtggagagtgcgtgtgcaatgcgagactcatttcttggaagcatccctggcaaaaatgcagctgagtacaaggttatcactgtgatagaacctggactgctttttgagataatagagatgctgcagtctgaagagacttccagcacctctcagttgaatgaattaatgatggcttctgagtcaactttactggctcaggaaccacgagagatgactgcagatgtaatcgagcttaaagggaaattcctcatcaacttagaaggtggtgatattcgtgaagagtcttcctataaagtaattgtcatgccgactacgaaagaaaaatgcccccgttgttggaagtatacagcggagtcttcagatacactgtgtcctcgatgtgcagaagttgtcagtggaaaatagtattaacagctcactcgagcaagaaccctcctgacagtactggctagaagtttggatggattatttacaatataggaaagaaagccaagatttaggtaatgagtggatgagtaaatggtggaggatgggagtcaaaatcagaattatagaagaagtatttcctgtaactatagaaagaattatgtatatatacatgcagaaatatatatgtgtgtgtgtatctgtggatggatatatgtatatctcttcctatatatatccatagtggacttattcagaacatagatatgtattcagcttgtcttcaaatacggccaagcagaaaatgttttatattttataaatcatcttttgactctgtatttaaattctatgatactgaaaataaaggcattctgg

SEQ ID NO: 11094 - protein, 764 aa, Homo sapiens
MNGSKIHFVPGWDCHGLPIEIKVLSELGREAQNLSAMEIRKKARSFAKAAIEKQKSAFIRWGIMADWNNCYYTFDGKYEAKQLRTFYQMYDKGLVYRSYKPVFWSPSSRTALAEAELEYNPEHVSRSIYVKFPLLKPSPKLASLIDGSSPVSILVWTTQPWTIPANEAVCYMPESKYAVVKCSKSGDLYVLAADKVASVASTLETTFETISTLSGVDLENGTCSHPLIPDKASPLLPANHVTMAKGTGLVHTAPAHGMEDYGVASQHNLPMDCLVDEDGVFTDVAGPELQNKAVLEEGTDVVIKMLQTAKNLLKEEKLVHSYPYDWRTKKPVVIRASKQWFINITDIKTAAKELLKKVKFIPGSALNGMVEMMDRRPYWCISRQRVWGVPIPVFHHKTKDEYLINSQTTEHIVKLVEQHGSDIWWTLPPEQLLPKEVLSEVGGPDALEYVPGQDILDIWFDSGTSWSYVLPGPDQRADLYLEGKDQLGGWFQSSLLTSVAARKRAPYKTVIVHGFTLGEKGEKMSKSLGNVIHPDVVVNGGQDQSKEPPYGADVLRWWVADSNVFTEVAIGPSVLNAARDDISKLRNTLRFLLGNVADFNPETDSIPVNDMYVIDQYMLHLLQDLANKITELYKQYDFGKVVRLLRTFYTRELSNFYFSIIKDRLYCEKENDPKRRSCQTALVEILDVIVRSFAPILPHLAEEVFQHIPYIKEPKSVFRTGWISTSSIWKKPGLEEAWRVRVQCETHFLEASLAKMQLSTRLSL

SEQ ID NO: 11095 - DNA, 3000 bp, Homo sapiens
  CDS (89)..(1060)
tgacaaacagctggagctcttggctcaagactataagctgcgaattaagcagattacggaggaagtggagaggcaggtgtcgactgcaatggccgaggagatcaggcgcctctctgtactggtggacgattaccagatggacttccacccttctccagtagtcctcaaggtttataagaatgagctgcaccgccacatagaggaaggactgggtcgaaacatgtctgaccgctgctccacggccatcaccaactccctgcagaccatgcagcaggacatgatagatggcttgaaacccctccttcctgtgtctgtgcggagtcagatagacatgctggtcccacgccagtgcttctccctcaactatgacctaaactgtgacaagctgtgtgctgacttccaggaagacattgagttccatttctctctcggatggaccatgctggtgaataggttcctgggccccaagaacagccgtcgggccttgatgggccacaatgaccaggtccagcgccccatccctctgacgccagccaaccccagcatgcccccactgccacagggctcgctcacccaggaggagttcatggtttccatggttaccggcctggcctccttgacatccaggacctccatgggcattcttgttgttggaggagtggtgtggaaggcagtgggctggcggctcattgccctctcctttgggctctatggcctcctctacgtctatgagcgtctgacctggaccaccaaggccaaggagagggccttcaagcgccagtttgtggagcatgccagcgagaagctgcagcttgtcatcagctacactggctccaactgcagccaccaagtccagcaggaactgtctgggacctttgctcatctgtgtcagcaagttgacgtcacccgggagaacctggagcaggaaattgccgccatgaacaagaaaattgaggttcttgactcacttcagagcaaagcaaagctgctcaggaataaagccggttggttggacagtgagctcaacatgttcacacaccagtacctgcagcccagcagatagtgggcacctgaggcggagtctgcgtggagaggggcggtgctgccagccctaagtgccatgtgggctcccccaggggcacgtgtggctcctgccccctggccactgccaagagaatgaagcacccagtctcgtaccattttgagccctccagcactacttattttcccccacctttgcctgctgttgctggaagagctggctcatacccccaaaggacactttcagcgacagctatggacagcatggtaccaaggagttaagttgaggctttttccagctttctctggttcatttgattgcttgataaggcctcaggatctcagcattgcacaatgcctcatggaagcctttgagggtatcacacagacacccccaccttcctccagcctgtgcgcacctgccctccttgcagcccagcacacctgcaggtgtaagggacgattggagtttcttcccagagagtctgtcccagaaggactgtggcttgtgtgtgtccatctcgcctgttggctcagtgcttcatcccatttgcagagcctcagacacgtcttggtggtgaggctcagttacccctgggcttaggctgaggcgggccctgtgctgggggtggtagaaaggatgctgctgaggcagctggaggagtgggagtagctcagaggggagggctgttggatgtatggggagctggcagagcaggtggcagtcactgggacaaggagggacttgcctctcttctcattattgtgtcctttgctttagtgtcagtcctggacttgtgcaggcctgttttgtgtagatctgttttggaagatggcatggtctaggtggttgaaggatgtagtagaaggatggatggtggaaggtggggacgttggtggctggctgaggtgcatgggccccacacaggacagctggagaatgggccgtccacttggcctcgttctgcgaggggctcatgggtctgagagcccccacccactaggcttgattgcatccctgttgtgccctttaagagacatgtttccaccccacccccaaccttgtcccaagtgccctggactaaatttcctgtgccagtgactgcagttggccaagggacaatgtggaaaacccagtgtccatctttccaccctccctgatctccagaaccttcgactgacccccttgtctttatgctgatgttgagttttgggattgttactggttgaagtgggggcagatgcctgtcaccaaggtgttgactgtgtgagaaaagcagtttgggtgacaaatcctgtgtggcacaagttggatcgcttcctagaaataagcaacacctctcccaaaaagcagcccacaaggcaggggcccagcagcccagccatcactcatctttgaggaaatgagttggtagcctctgtgcactgtttggtggccacatcacaggtgatgtcctgttcacatacctgcttgtatttaaagccctcagtctgtcctgttgtgtggggcgaagtgatggactctgccaggtggacatgctgtgggtggatgttcccggcgtgtgccgggcctgaatggacaggggccacttcacagcatgtcagggaaaatcactgtcacacaattccaatggattttgtgctctttttgaaaaaaaaaaattctttagcgtaaacatgaattttttttcaatgtagcccctggggaatgaatgaaattttgagcttcttcaatacgtaaaattaaatttataccactgagggagagaccctttctgaaagaagtatggccaaaagcactttaatgctgctgacattgttgtttttatgttcatttgctggagcgcaagacgtgctgacacagtgagttttctctgatgtatttaaggtgatgtatttgcttgagttactcctgtatcattgctcataatattggaaactaaaataaaacctagttgg

SEQ ID NO: 11096 - protein, 324 aa, Homo sapiens [sequence omitted]

SEQ ID NO: 11097 - DNA, 3208 bp, Homo sapiens
  CDS (249)..(2090)
ccaatcccattctgggctcggaggctgacagtgaccgcaggacccatccgactctgggccttcgggggccaatcctggggagcccccacactcccctcttcctgccccatggcttggagcccgaggctgggggcaccttgccctctcgcctgcagcccattctcctcctggacccctcaggctctcatgccccgctgctgactgtgcccgggcttgggcccttgcccttccactttgcccagtccttaatgaccaccgagcggctctctgggtcaggcctccactggccactgagccggactcgctcggagcccctgccccccagtgccaccgctcccccaccgccgggccccatgcagccccgcctggagcagctcaaaactcacgtccaggtgatcaagaggtcagccaagccgagtgagaagccccggctgcggcagataccctcggctgaagacctggagacagatggcgggggaccgggccaggtggtggacgatggcctggagcacagggagctgggccatgggcagcctgaggccagaggccccgctcctctccagcagcaccctcaggtgttgctctgggaacagcagcgactggctgggcggctcccccggggcagcaccggggacactgtgctgcttcctctggcccagggtgggcaccggcctctgtcccgggctcagtcttccccagccgcacctgcctcactgtcagccccagagcctgccagccaggcccgagtcctctccagctcagagacccctgccaggaccctgcccttcaccacagggctgatctatgactcggtcatgctgaagcaccagtgctcctgcggtgacaacagcaggcacccggagcacgccggccgcatccagagcatctggtcccggctgcaggagcgggggctcctgagccagtgtgagtgtctccgaggccggaaggcctccctggaagagctgcagtcggtccactctgagcggcacgtgctcctctacggcaccaacccgctcagccgcctcaaactggacaacgggaagctggcagggctcctggcgcagcggatgtttgtgatgctgccctgtggtggggttggggtggacactgacaccatctggaatgagcttcattcctccaatgcagcccgctgggccgctggcagtgtcactgacctcgccttcaaagtggcttctcgtgagctaaagaatggtttcgctgtggtgcggcccccaggacaccatgcagatcattcaacagccatgggcttctgcttcttcaactcagtggccatcgcctgccggcagctgcaacagcagagcaaggccagcaagatcctcattgtagactgggacgtgcaccatggcaacggcacccagcaaaccttctaccaagaccccagtgtgctctacatctccctgcatcgccatgacgacggcaacttcttcccggggagtggggctgtggatgaggtaggggctagcagcggtgagggcttcaatgtcaatgtggcctgggctggaggtctggacccccccatgggggatcctgagtacctggctgctttcaggatagtcgtgatgcccatcgcccgagagttctctccagacctagtcctggtgtctgctggatttgatgctgctgagggtcacccggccccactgggtggctaccatgtttctgccaaatgttttggatacatgacgcagcaactgatgaacctggcaggaggcgcagtggtgctggccttggagggtggccatgatctcacagccatctgtgacgcctctgaggcctgtgtggctgctcttctgggtaacagggtggatcccctttcagaagaaggctggaaacagaaacccaacctcaatgccatccgctctctggaggccgtgatccgggtgcacagtaaatactggggctgcatgcagcgcctggcctcctgtccagactcctgggtgcctagagtgccaggggctgacaaagaagaagtggaggcagtgaccgcactggcgtccctctctgtgggcatcctggctgaagataggccctcggagcagctggtggaggaggaagaacctatgaatctctaaggctctggaaccatctgcccgcccaccatgcccttgggacctggttctcttctaacccctggcaatagcccccattcctgggtctttagagatcctgtgggcgagtagttggaaccagagaacagcctgcctgctttgacagttatcccagggagcgtgagaaaatccctgggtctagaatgggaactggagaggaccctgagaggagacgggctgggcggcgacccccacagggctctcgagaacagattctcccctccagtatgggccctggctgtggcccccattcctcaggactgcacagaggaggactggctccggctccgtcgggctcacccttaaccactattcctggctctgcaaaccccagactttgcacacagccccaggctccacacagaaatgtgaacttggcctcagacaggctggcccttcctaggctctaggggctagcggggagtggggagccaagaggtcccatattcctgagtgcaggggtagtccctctcacctgcttcctcagacgactctggaagcttccctctaccaccgggcactgagacgaagctccctgacagccgagactggcagccctccatctggtccgtaccctcgccagaggcccccctacatcaacctcctggcgatgccctggtggagcagatgggtgctctgggagtcctgtgcttcctgatccaatggtgccaaacccttcatctcccccagaagcgcagcatacccctgggacccctcggccactgcccactcggggagccttctctgtttctggggcctcccccaccatagctctgattcccaccccacataggaatagcctgactgagggggaaggggtgggagagaagatacagacatggaggaggggaggctgctctggcaaagtcttcaaggcttttgggggtccaggcctggggtcaagaaggaaaatgtgtgtgagcatgtgtgtgagtgagacgtgtgtgtgagcgtgtgtgtgagtgaggcgtgtgtgtgtgtctttcctaggacccaccataccctgtgtatgtatgcatgtttttgtaaaaaggaagaaaatggaaaaaaatctgaacaataaatgttttatttgcttt

SEQ ID NO: 11098 - protein, 614 aa, Homo sapiens [sequence omitted]

SEQ ID NO: 11099 - DNA, 3017 bp, Homo sapiens
  CDS (97)..(1563)
tccgaggtctctgcagacaaactggtggcactggggctgttcagccagcactttaatttggccaccttcaataagctcgtctcctatcgaaaagccatgtaccatgctctggagaaagctagggtgcgagctggcaagaccttccccagcagccctggagactcattggaggaccagctcaagcccatgttggagtgggcccacgggggcttcaagcccactgggatcgagggcctcaaacccaacaacacgcaaccagtggttaataagtcgaaggtgcgtcgtgcaggcagtaggaaattagaatcaaggaaatacgagaacaagactcgaagacgcacagctgacgactcagccacctctgactactgccccgcacccaagcgcctcaagacaaattgctataacaacggcaaagaccgaggggatgaagatcagagccgagaacaaatggcttcagatgttgccaacaacaagagcagcctggaagatggctgtttgtcttgtggcaggaaaaaccccgtgtccttccaccctctctttgagggggggctctgtcagacatgccgggatcgcttccttgagctgttttacatgtatgatgacgatggctatcagtcttactgcactgtgtgctgcgagggccgagagctgctgctttgcagcaacacgagctgctgccggtgtttctgtgtggagtgcctggaggtgctggtgggcacaggcacagcggccgaggccaagcttcaggagccctggagctgctacatgtgtctcccgcagcgctgtcatggcgtcctgcggcgccggaaggactggaacgtgcgcctgcaggccttcttcaccagtggcacggggcttgaatacgaagcccccaagctgtaccctgccatacccgcagcccgaaggcggcccattcgagtcctgtcattgtttgatggcatcgcgacaggctacctagtcctcaaagagttgggcataaaggtaggaaagtacgtcgcttctgaagtgtgtgaggagtccattgctgttggaaccgtgaagcacgaggggaatatcaaatacgtgaacgacgtgaggaacatcacaaagaaaaatattgaagaatggggcccatttgacttggtgattggcggaagcccatgcaacgatctctcaaatgtgaatccagccaggaaaggcctgtatgagggtacaggccggctcttcttcgaattttaccacctgctgaattactcacgccccaaggagggtgatgaccggccgttcttctggatgtttgagaatgttgtagccatgaaggttggcgacaagagggacatctcacggttcctggagtgtaatccagtgatgattgatgccatcaaagtttctgctgctcacagggcccgatacttctggggcaacctacccgggatgaacaggatctttggctttcctgtgcactacacagacgtgtccaacatgggccgtggtgcccgccagaagctgctgggaaggtcctggagcgtgcctgtcatccgacacctcttcgcccctctgaaggactactttgcatgtgaatagttccagccaggccccaagcccactggggtgtgtggcagagccaggacccaggaggtgtgattcctgaaggcatccccaggccctgctcttcctcagctgtgtgggtcataccgtgtacctcagttccctcttgctcagtgggggcagagccacctgactcttgcaggggtagcctgaggtgccgcctccttgtgcacaaatcagacctggctgcttggagcagcctaacacggtgctcattttttcttctcctaaaactttaaaacttgaagtaggtagcaacgtggctttttttttttcccttcctgggtctaccactcagagaaacaatggctaagataccaaaaccacagtgccgacagctctccaatactcaggttaatgctgaaaaatcatccaagacagttattgcaagagtttaatttttgaaaactggctactgctctgtgtttacagacgtgtgcagttgtaggcatgtagccacaggacatttttaagggcccaggatcgttttttcccagggcaagcagaagagaaaatgttgtatatgtcttttacccggcacattccccttgcctaaatacaagggctggagtctgcacgggacctattagagtattttccacaatgatgatgatttcagcagggatgacgtcatcatcacattcagggctattttttcccccacaaacccaagggcaggggccactcttagctaaatccctccccgtgactgcaatagaaccctctggggagctcaggaaggggtgtgctgagttctataatataagctgccatatattttgtagacaagtatggctcctccgtatctccctcttccctaggagaggagtgtgaagcaaggagcttagataagacaccccctcaaacccattccctctccaggagacctaccctccacaggcacaggtccccagatgagaagtctgctaccctcatttctcatctttttactaaactcagaggcagtgacagcagtcagggacagacatacatttctcataccttccccacatctgagagatgacagggaaaactgcaaagctcggtgctccctttggagattttttaatccttttttattccataagaagtcgtttttagggagaacgggaattcagacaagctgcatttcagaaatgctgtcataatggtttttaacaccttttactcttcttactggtgctattttgtagaataaggaacaacgttgacaagttttgtggggctttttatacactttttaaaatctcaaacttctatttttatgtttaacgttttcattaaaatttttttgtaactggagccacgacgtaacaaatatggggaaaaaactgtgccttgtttcaacagtttttgctaatttttaggctgaaagatgacggatgcctagagtttaccttatgtttaattaaaatcagtatttgtct

SEQ ID NO: 11100 - protein, 489 aa, Homo sapiens [sequence omitted]

SEQ ID NO: 11101 - DNA, 3499 bp, Homo sapiens
  CDS (390)..(2501)
ctgccaaatggacccatctcactgagtttgaactgaagggcctgaaagctctggtggagaaactggaatccctcccggagaacaagaagtgcgtccccgagggcatcgaggacccccaggcactcctggagggtgtgaagaacgtcctgaaggagcacgcagatgatgaccctagtctggccatcactggggtccctgtggtgacttggccaaagaagactccaaagaaccgggctgtgggtcggcccaaggggaagctgggcccggcctccgcggtgaagttggccgccaaccggacaacggcaggagctcggcggcgccggacgcgatgccgcaagtgcgaggcctgcctgcggaccgagtgcggagagtgccacttctgcaaggacatgaagaagttcgggggccccgggcgcatgaagcagagctgcatcatgcggcagtgcatcgcgccagtgctgccccacaccgccgtgtgccttgtgtgtggcgaggcggggaaggaagacacggtggaagaggaggaaggcaagtttaacctcatgctcatggagtgctccatctgcaatgaaatcatccaccctggatgccttaagattaaggagtcagagggtgtggtcaacgacgagcttccaaactgctgggagtgtccgaagtgtaaccacgccggcaagaccgggaaacaaaagcgtggccctggctttaagtacgcctccaacctgcccggctccctgctcaaggagcagaagatgaaccgggacaacaaggaagggcaggaacctgccaagcggaggagtgagtgtgaggaggcgccccggcgcaggtcggatgagcactcgaagaaggtgccgccggacggccttctgcgcagaaagtctgacgacgtgcacctgaggaagaagcggaaatacgagaagccccaggagctgagtggacgcaagcgggcctcatcgcttcaaacgtcccccggttcctcctctcacctctcgccgaggccccctctaggcagcagcctcagcccctggtggagatccagtctcacttacttccagcagcagctcaaacctggcaaagaagataagcttttcaggaaaaagcggcggtcctggaagaacgccgaggaccgcatggcgctggccaacaagcccctccggcgcttcaagcaggaacccgaggacgaactgcccgaggcgccccccaagaccagggagagcgaccactcccgctccagctcccccaccgcgggacccagcaccgaaggggccgagggcccggaggagaagaagaaggtgaagatgcgccggaagcggcggcttcccaacaaggagctgagcagggagctgagcaaggagctcaaccacgagatccagaggacggagaacagcctggccaacgagaaccagcagcccatcaagtcggagcctgagagcgagggcgaggagcccaagcggcccccgggcatctgcgagcgtccccaccgcttcagcaaggggctcaacggcaccccccgggagctgcggcaccagctggggcccagcctgcgcagcccgccccgtgtcatctcccggcccccaccctccgtgtccccgcccaagtgtatccagatggagcgccatgtgatccggccaccccccatcagccccccgcctgactcgctacccctggacgatggggcagcccacgtcatgcacagggaggtgtggatggccgtcttcagctacctcagccaccaagacctgtgtgtgtgcatgcgggtctgcaggacctggaaccgctggtgctgcgataagcggttgtggacccgcattgacctgaaccactgcaagtctatcacacccctgatgctgagtggcatcatccggcgacagcccgtctccctcgacctcagctggaccaatatctccaagaagcagctgagctggctcatcaaccggctgcctgggctccgggacttggtgctgtcaggctgctcatggatcgcggtctcggccctttgcagctccagttgtccgctgctccggaccctggatgtccagtgggtggagggactaaaggatgcccagatgcgggatctcctgtccccgcccacagacaacaggccaggtcagatggacaatcggagcaagctccggaacatcgtggagctgcgcctggcaggcctggacatcacagatgcctccctgcggctcatcatccgccacatgcccctgctctccaagctccacctcagttactgtaaccacgtcaccgaccagtctatcaacctgctcactgctgttggcaccaccacccgagactccttaaccgagatcaacctgtctgactgcaataaggtcactgatcagtgcctgtccttcttcaaacgctgtggaaacatctgtcatattgacctgaggtactgcaagcaagtcaccaaggaaggctgtgagcagttcatagccgagatgtctgtgagtgtccagtttgggcaagtagaagaaaaactcctgcaaaaactgagttagtccaaggataatctttccaagggagaagctgttcaaccacccgtttgggggatgagtgagccgacactttcctttggtctttctgaatcgtaactgcactgctttctggaccatttctaaggcggcctttacaagaagacattcctgtcggagaggagggtggacttcggagaaattctcatactgaagcatgagcttaggagtttctgttagtggtagtggtgttttggacacttcattccttgcaacaccgaggttttgggtgttgacataaagtggaccacacaccacatctgctgccgtcttgacacttttttttgtttggttggttttgttacatcttacattatgcagaactatttttgtacaaattgtttaaaagttatttatgcaaggtttgaatgcataccagtgtttttattgttttgagattgccaattttcctgatttccttaaggtaggagagaatttaacgtgtacttcatcgacacaacccatctacaaatgtgcccagatctaacaaagtaggctaagaccttccacttaaaagcatgtttaactggaagttgagagtctgctttgtacctcaagagttacatgagcatgttgtggataaatgtaaattatagtcaaagtaagatactctgccaagtttcctctgtagagaattcacttttctcaaattttaaaatttcgacttcagcctttgcactcaggaggttctgctccagcatgagctcttgtacttacatagatctaatttatacagtgagtcaagacgtagaataaatgctcccacatagcctttcttttgcttttgcttctctcctctgaagtgtgagttgagttctcatttaggtttgtaacatggctatttcctagttgtaaagttctgcatttataagtgccattgttgtaaggtggtgtttcctagaccttccctgatgcgattttacctttgttgaatttgtataaacaattgtacaaaaaaaacc

SEQ ID NO: 11102 - protein, 704 aa, Homo sapiens
MKKFGGPGRMKQSCIMRQCIAPVLPHTAVCLVCGEAGKEDTVEEEEGKFNLMLMECSICNEIIHPGCLKIKESEGVVNDELPNCWECPKCNHAGKTGKQKRGPGFKYASNLPGSLLKEQKMNRDNKEGQEPAKRRSECEEAPRRRSDEHSKKVPPDGLLRRKSDDVHLRKKRKYEKPQELSGRKRASSLQTSPGSSSHLSPRPPLGSSLSPWWRSSLTYFQQQLKPGKEDKLFRKKRRSWKNAEDRMALANKPLRRFKQEPEDELPEAPPKTRESDHSRSSSPTAGPSTEGAEGPEEKKKVKMRRKRRLPNKELSRELSKELNHEIQRTENSLANENQQPIKSEPESEGEEPKRPPGICERPHRFSKGLNGTPRELRHQLGPSLRSPPRVISRPPPSVSPPKCIQMERHVIRPPPISPPPDSLPLDDGAAHVMHREVWMAVFSYLSHQDLCVCMRVCRTWNRWCCDKRLWTRIDLNHCKSITPLMLSGIIRRQPVSLDLSWTNISKKQLSWLINRLPGLRDLVLSGCSWIAVSALCSSSCPLLRTLDVQWVEGLKDAQMRDLLSPPTDNRPGQMDNRSKLRNIVELRLAGLDITDASLRLIIRHMPLLSKLHLSYCNHVTDQSINLLTAVGTTTRDSLTEINLSDCNKVTDQCLSFFKRCGNICHIDLRYCKQVTKEGCEQFIAEMSVSVQFGQVEEKLLQKLS

SEQ ID NO: 11103 - DNA, 3239 bp, Homo sapiens
  CDS (77)..(1714)
ccgttgtcccgaagagcgagatcgagcttggccccctcccccccctccttccctccctccttccttccgccgcaacatggctaacaacagccccgcgctgacaggcaactcgcagccgcagcaccaggcggctgcagctgcggctcagcaacagcagcagtgcggcggcggcggcgctaccaagccggcggtctccggcaagcagggcaatgtgctcccgctctggggcagcgagaagaccatgaacctcaaccccatgatcctgaccaacatcctgtcgtcgccttacttcaaagtacagctctacgagctcaagacctaccacgaggtggtggacgagatctactttaaggtcacgcacgttgaaccatgggagaaaggaagcaggaaaacagcgggccagacagggatgtgcggaggggttcgaggtgttggaacaggaggaattgtttctacagcattttgcctgttatacaaattatttaccctgaagttaactcgaaagcaagtgatgggtcttataacacacacagactctccatatattagagcgcttggatttatgtatataagatatacacagccccctacagatctgtgggactggtttgaatccttccttgatgatgaagaggacctagatgtgaaggctggtggaggctgtgtaatgaccattggagaaatgctacgatcttttctcacaaaactggagtggttttctaccttgtttccaagaattccagttccagttcaaaagaatattgatcaacagattaaaacccgacctagaaaaatcaagaaagatgggaaggaaggtgctgaggaaatagacagacatgttgaacgcagacgttcaaggtctccaaggagatctctgagtccacggaggtccccaagaaggtcaagaagtagaagtcatcatcgggagggccatgggtcttctagttttgacagagaattagaaagagagaaagaacgccagcgactagagcgtgaagccaaagaaagggagaaagaacggcgaagatcccgaagtattgaccgggggttagaacgcaggcgcagcagaagtagggaaaggcatagaagtcgcagtcgaagtcgtgataggaaaggggatagaagggacagggatcgagaaagagagaaagaaaatgagagaggtagaagacgagatcgtgactatgataaggaaagaggaaatgaacgagaaaaagagagagagcgatcaagagaaaggtccaaggaacagagaagtaggggagaggtagaagagaagaaacataaagaagacaaagatgataggcggcacagagatgacaaaagagattccaagaaagagaaaaaacacagtagaagcagaagcagagaaaggaaacacagaagtaggagtcgaagtagaaatgcagggaaacgaagtagaagtagaagcaaagagaaatcaagtaaacataaaaatgaaagtaaagaaaaatcaaataaacgaagtcgaagtggcagtcaaggaagaactgacagtgttgaaaaatcaaaaaaacgggaacatagtcccagcaaagaaaaatctagaaagcgtagtagaagcaaagaacgttcccacaaacgagatcacagtgatagtaaggaccagtcagacaaacatgatcgtcgaaggagccaaagtatagaacaagagagccaagaaaaacagcataaaaacaaagatgagactgtgtgaaaatattttgtaaaagtggttcacattgaatcctataaatgattaaatctgcttttttcccccacgttgagattgtgcagtagttcgcactcctcaagctctccctgtaggctgcattttcatttcctctttcgtgtagggaagtgcctttgtaattccatttattgcattggtgttttcacccaattgttaagtttgatacatgatgcacagattgttcttgcatttttattgtttgtttttgaaatgtacagtctgtacatatgtcctgaaaatgttttaattcctttggcatggttgccatgttggttaaatttgtataaggcaataaactgccactaatctatttttgttttgtaggtgtgggattatggtttgtgtactgaagttagcatggctgtgcttttcgtaatagaatgctaaagactttgagaatggatcttggatgtctattataggagaagtatgtgctgccaatgtacaagaaggcagcattgtaggattaacattcttgtctactgtatattatcttggaaggctcttgttaatatgttacacttaatattctccacagttacctttagagagaatttatgagaagttagtttctgatgcagaggtttttaggctgtgatttcatcaaaagtccttttagcattctacctcaaagggacacttagtatgcctaaaatttattcacttagttttcctttttttatttgaaaaaatacatgacatgtaatctttttttcttgaattctttctcagattttaaagtactatattaaagaaaaaaattaatgtctaaagcctagcattcttgcagaaccctatactaacatgtaatggggagagggtggggcagatgagtagagaaacagattcaagcctcaagcttccaaagcatttttataaatggaaaatccttaaattatgaaacagcttgatatagtgtcctttttttaaaattcagaactttttttattgataatggagattgctgtttgagtttttaaacttaatctagaacagaggagtattaaaagtaatgctgtgctgcattatttaagactatcagcaaattatttgatagattgttcttacaacttgtattctgattacagaaccatcatgagtgtggaataaatactggattaaatcctttatcctgggtcttggcttttcccccatttgttaaatttttttagcatatttatattgtggaaattgatgaaacgtcagtagagtcacactttgtgtacagggatgtcttagtgcccagatgacaagtgaattttggagaaatgcatagactgggattgggcatgtggtaatcaataatctttattagaatacttgataatggcagttccctttgtcagtggttgttacatgtgtcatttgattactttgttccatgtcaaagacgtttattgggataccttttacttggacaatatgttagcattttttaaaatttggacttgaaattctttaagataattcacccaattctttttag

SEQ ID NO: 11104 - protein, 546 aa, Homo sapiens
MANNSPALTGNSQPQHQAAAAAAQQQQQCGGGGATKPAVSGKQGNVLPLWGSEKTMNLNPMILTNILSSPYFKVQLYELKTYHEVVDEIYFKVTHVEPWEKGSRKTAGQTGMCGGVRGVGTGGIVSTAFCLLYKLFTLKLTRKQVMGLITHTDSPYIRALGFMYIRYTQPPTDLWDWFESFLDDEEDLDVKAGGGCVMTIGEMLRSFLTKLEWFSTLFPRIPVPVQKNIDQQIKTRPRKIKKDGKEGAEEIDRHVERRRSRSPRRSLSPRRSPRRSRSRSHHREGHGSSSFDRELEREKERQRLEREAKEREKERRRSRSIDRGLERRRSRSRERHRSRSRSRDRKGDRRDRDREREKENERGRRRDRDYDKERGNEREKERERSRERSKEQRSRGEVEEKKHKEDKDDRRHRDDKRDSKKEKKHSRSRSRERKHRSRSRSRNAGKRSRSRSKEKSSKHKNESKEKSNKRSRSGSQGRTDSVEKSKKREHSPSKEKSRKRSRSKERSHKRDHSDSKDQSDKHDRRRSQSIEQESQEKQHKNKDETV

SEQ ID NO: 11105 - DNA, 3891 bp, Homo sapiens
  CDS (1524)..(3251)
aaaaaaaaaaaaaaacaatggtacatttttacatgggaacaaaaggacctgaaaatcctcaagttgaagtgttatcagaggaagaaggggaagaagaagaggaggaagaagatatcctctctctggcagaagaaaaatacaggccagctgcccttgaaaagatgatagctttagttgctcttttggttgaacagtctcgatcagaaaggcatttgacattatcacagactgacatggcagcattaacaggaggaaagggatttcccttcttgtttcaacatattcgtgatggcatcaatataagacaaacttgtaatctgattttcagcctgtgtcgatacaataatcgacttgcagaacatattgtatctatgcttttcacatcaatagcaaagttgactcctgaggcagccaatcctttctttaagttgttgactatgctaatggagtttgctggtggacctccaggaatgcctccctttgcatcttatattctgcagaggatatgggaggtgattgaatacaatccttctcagtgtctagattggttggcagtgcagacaccccgaaataaactggcacacagctgggtcttacagaatatggaaaactgggtcgagcggtttcttttggctcacaattatcctagagtgaggacttctgcagcttatcttctggtgtcccttataccaagcaattcattccgtcagatgttccggtcaacaaggtctttgcacatcccaacccgtgaccttccactcagtccagacacaacagtagtcctacatcaggtctacaacgtgctccttggtttgctctcaagagccaaactttatgttgatgctgctgttcatggcactacaaagctagtgccctattttagctttatgacttactgtttaatttccaaaactgagaagctgatgttttccacatatttcatggatttgtggaaccttttccagcctaaactttctgagccagcaatagctacaaatcacaataaacaggctttgctttcattttggtacaatgtctgtgctgactgtccagagaatatccgccttattgttcagaacccagtggtaaccaagaacattgccttcaattacatccttgctgaccatgatgatcaggatgtggtgctttttaaccgtgggatgctgccagcgtactatggcattctgaggctctgctgtgagcagtctcctgcattcacacgacaactggcttctcaccagaacatccagtgggcctttaagaatcttacaccacatgccagccaataccctggagcagtagaagaactgtttaacctgatgcagctgtttatagctcagaggccagatatgagataagaagaattagaagatattaaacagttcaagaaaacaaccataagttgttacttacgttgcttagatggccgctcctgctggactactttaataagtgccttcagaatactattagaatctgatgaagacagacttcttgttgtatttaatcgaggattgattctaatgacagagtctttcaacactttgcacatgatgtatcacgaagctacagcttgccatgtgactggagatttagtagaacttctgtcaatatttctttcggttttgaagtctacacgcccttatcttcagagaaaagatgtgaaacaagcattaatccagtggcaggagcgaattgaatttgcccataaactgttaactcttcttaattcctatagtcctccagaacttagaaatgcctgtatagatgtcctcaaggaacttgtacttttgagtccccatgattttcttcatactctggttccctttctacaacacaaccattgtacttaccatcacagtaatataccaatgtctcttggaccttatttcccttgtcgagaaaatatcaagctaataggagggaaaagcaatattcggcctccgcgccctgaactcaatatgtgcctcttgcccacaatggtggaaaccagtaagggcaaagatgacgtttatgatcgtatgctgctagactacttcttttcttatcatcagttcatccatctattatgccgagttgcaatcaactgtgaaaaatttactgaaacattagttaagctgagtgtcctagttgcctatgaaggtttgccacttcatcttgcactgttccccaaactttggactgagctatgccagactcagtctgctatgtcaaaaaactgcatcaagcttttgtgtgaagatcctgttttcgcagaatatattaaatgtatcctaatggatgaaagaacttttttaaacaacaacattgtctacacgttcatgacacatttccttctaaaggttcaaagtcaagtgttttctgaagcaaactgtgccaatttgatcagcactcttattacaaacttgataagccagtatcagaacctacagtctgatttctccaaccgagttgaaatttccaaagcaagtgcttctttaaatggggacctgagggcactcgctttgctcctgtcagtacacactcccaaacagttaaacccagctctaattccaactctgcaagagcttttaagcaaatgcaggacttgtctgcaacagagaaactcactccaagagcaagaagccaaagaaagaaaaactaaagatgatgaaggagcaactcccattaaaaggcggcgtgttagcagtgatgaggagcacactgtagacagctgcatcagtgacatggaaacagaaaccagggaggtcctgaccccaacgagcacttctgacaatgagaccagagactcctcaattattgatccaggaactgagcaagatcttccttcccctgaaaatagttctgttaaagaataccgaatggaagttccatcttcgttttcagaagacatgtcaaatatcaggtcacagcatgcagaagaacagtccaacaatggtagatatgacgattgtaaagaatttaaagacctccactgttccaaggattctaccctagctgaggaagaatctgagttcccttctacttctatctctgcagttctgtctgacttagctgacttgagaagctgtgatggccaagctttgccctcccaggaccctgaggttgctttatctctcagttgtggccattccagaggactctttagtcatatgcagcaacatgacattttagataccctgtgtaggaccattgaatctacaatccatgtcgtcacaaggatatctggcaaaggaaaccaagctgcttcttgacattaggtgtagcatgtctacttttaagtccctcacccccaacccccatgctgtttgtataagttttgcttatttgtttttgtgcttcagtttgtccagtgctctctgcttgaatggcaagatagatttataggcttaattctcggtcaggcagaactccagatgaaaaaaacttgcatcttcagtatacttcctaaagggcaatcagataatggatatgttttatgtaattaagagttcactttagtggctttcatttaatatggctgtctgggaagaacagggttgcctagccctgtacaatgtaatttaaacttacagcatttttactgtgtatgatatggtgtcctctgtgccagttttgtaccttatagaggcagattgcctccgatcgctgtggttcttattatcaaaattaagtttacttgtatacggaacaaccacaagaaatttgattctgtaaagaatcctctttagctgtggcctggcagtatataaatggtgctttatttaacagaatacctgtggaggaaataaagcacacttgatgtaaaaataattgttttatttttattgacatgactgattgattgattgctattctgtgcacttaattaaactgattgtgatgactttt

SEQ ID NO: 11106 - protein, 576 aa, Homo sapiens
MTESFNTLHMMYHEATACHVTGDLVELLSIFLSVLKSTRPYLQRKDVKQALIQWQERIEFAHKLLTLLNSYSPPELRNACIDVLKELVLLSPHDFLHTLVPFLQHNHCTYHHSNIPMSLGPYFPCRENIKLIGGKSNIRPPRPELNMCLLPTMVETSKGKDDVYDRMLLDYFFSYHQFIHLLCRVAINCEKFTETLVKLSVLVAYEGLPLHLALFPKLWTELCQTQSAMSKNCIKLLCEDPVFAEYIKCILMDERTFLNNNIVYTFMTHFLLKVQSQVFSEANCANLISTLITNLISQYQNLQSDFSNRVEISKASASLNGDLRALALLLSVHTPKQLNPALIPTLQELLSKCRTCLQQRNSLQEQEAKERKTKDDEGATPIKRRRVSSDEEHTVDSCISDMETETREVLTPTSTSDNETRDSSIIDPGTEQDLPSPENSSVKEYRMEVPSSFSEDMSNIRSQHAEEQSNNGRYDDCKEFKDLHCSKDSTLAEEESEFPSTSISAVLSDLADLRSCDGQALPSQDPEVALSLSCGHSRGLFSHMQQHDILDTLCRTIESTIHVVTRISGKGNQAAS

SEQ ID NO: 11107 - DNA, 2532 bp, Homo sapiens
ctcagtcaccctgtggcagagcccagctcgagccaggctggcagcatgagcagtgcaggcccaagaccactacccagtggcccagcatcccccaaacgcaagctggaagcagccgaggaaccacctggtgaagaactcagcaaacgggcccgggtggcagagttgccaaccccagagctgccgagcaaggatgcctgagactgcagagcccttgctccgtgagcaaagcctgggtgcccaagcagccaccgcagcagcagagtacaacctgcagagaagctgatcaccgggcagagatagagcgagcatgtgtgtgtgtgtgcgcgtgtgcagaggagggagtggtgtgcctgtttgtgtgtgcatgcatctgttgacactcatgattctgaatgttgcctgggctgggggagtacctgtagcacgccagtgctgtttcccggcctccagacacaaggctcgaggttatggcagtgactttcagctgagacctgttcctgcaagccagctgccttgtctgaacagaacgtagtggtaggaccctagctgggattctggcatctgcctccctagacctccttccctccctcctcacgtcaggctgtggagcaggagcacagcagttctggctgttgtccaaagcatgggattctggaggcagccagagccctgctgagttcctgctttctgacctggaggctgagcaggccggagtggatggatgctgtccagacgtagccacctggcctctgtttcttattttaaaattctctgctactgggctcagtcccaggcccttccttgggcttctgggactgagcatgaggccatagacagatctaaaaagtttccaccaccctacagaagtacacacagatacctgactggtgtggggtatgcctggtactgtaataggagcctaagacagcacacctaccttttcaggatttagaacctaaaattagaaagagaatcccagctgtcattgttccttccccagaagctaagagccagcctcagagcctacccaggagctgtgaaggggcaagggtcaaactgactcactctaccaggaggagaccaggttgcagtggcgtaaggccccctggtttctctggccacactccaaggcaccacagtgctgccagtgaggacagctgacacccagccagggaaaccattctagtctttattctgttggcttccagggcctgtcctggacttgtcagcatccagactgccatgtcagctatcccagtagctgagctccaaggactcaggcagagggactcagggatggggactgccaggggcagttggcaaaagtccaagtagagattacacccagcacaccattccttccaggagcagtaggtgggaggtttgacccagagaagccaatccttgcattccaggagtggcctgtgcctcccacctcttccttcccactgccaaaggcctgtgttgagaaagatgtcatgcaaaaggacgacggtggccaactaaagcaagtcttccttccaccctgtggcctgcacttgagccacaaagtgtgtgtgtgtgtgtgcgtgtgtggtacgtgtgtgtgtgtgtggctatgaggctgattcctgtttggatttttgtcctcacgtgtatcattaagctggcctttgggccttttcctttctacctcccctgtgacctttcctagcctcagatctgttaattcttttggccccagccctgtccctcactgtcctctgtccttggaccagaaccctggggtcagacccatctcctgtagctgtccatcacactgacaggcttcttcctgagatatcctcaggttttctcagccagagagctgcctttagagtccaactgttgtacgtatgtcaccttcactagaaatgtcccatcatcgtgggaggggagcagggcacaggggatggtgtgcattcagagcattgggttgggggcttccctgttccctcagccccagtcgagaggaaagagaatcgggccactgccagaaagagagtcaagcaaacctggaagggcaaatctgagagtgggaaggccaaaggccgaggcccagatttagtattcactagcagcgccttcgggtagcaggatgattccttttcctgcctgtctgctgctggctctcttccctaaggtcaggttggcaggaccacctccgcctacttctccaccatccctagcatgccagcccgttcccagatcaacctgccagtggagtcaggcagtgcactcctggagccaagagggaagggcagggtagagagggtatgtccagtagcctggagctccatggtggcttcatgcctcccttctcccagctcaggtggccctgagggctccctcggaacagtgcctcaaatcctgacccaagggccagcatggggaagagatggttgcaggcaaaatgcactttatagagattttctattgctgggaaggtgtgtttctcccacaatttgtttgtgaatattcacttgttttataaatgtctgacctgtcttgagt

SEQ ID NO: 11108 - DNA, 2686 bp, Homo sapiens
  CDS (317)..(1156)
ctctcttggaactcaatgactctcctgtcttcaaaaccgtcttggaaagaatgcagcgtttcttctctaccctctatgaaaactgttttcatatcctagggaaggcaggcccttccatgcagcaagacttctatactgtggaggaccttgctacccagcttctcagctcagcctttgtcaacttgaacaatattcctgactaccgactcagacccatgcttcgggtctttgtaaagcctctggtgctcttctgtcccccagagcactatgaagccctggtatcccccatcctcggacctctttcacctacctccatatgaggctttctcagaaatggcaagttatcaaccaaaggagcctgctgtgtggagaagatgaggctgcagatgaaaacccagagtctcaagagatgctggaggagcaactggtgaggatgttaacccgagaagtcatggacctaatcacggtttgctgtgtttcaaagaagggtgctgaccacagtagtgctcccccagcagatggagacgatgaagaaatgatggccacagaggtcaccccctcagctatggcagagcttacagacctgggcaaatgtctgatgaagcatgaggatgtttgtacagcgctattaattacagccttcaattccctggcctggaaagatactctgtcctgccagaggacaacctcacagctctgctggcctctcctcaaacaagtgctgtcagggacactgctcgcagatgcagttacgtggcttttcaccagtgtgctgaaaggcttacagatgcacgggcagcacgacgggtgcatggcttccctggtccatctggccttccagatatacgaggcactgcgccccaggtacctggagataagagctgtaatggagcaaatccctgaaatacagaaggactcactggaccagtttgactgcaagcttttaaacccctccctgcagaaagtggctgacaagcgccgaaaggaccaattcgaacgcctcattgctggttgcattgggaaacccttgggagagcagttccgaaaagaagttcacattaagaatcttccctcacttttcaaaaaaacaaagccaatgctggagacggaggtgctggacaatgatgggggtggcctggccaccatctttgaaccctgaatcaagcttttgggcatccttcctcggcctttcttgtcatctcttctttccctttgtagccgatctctaggcccttcttgcactgccacctcactttccaccactgtcagcctggaaagagatccaggtctggagctggagagaacaggccctgtgcaggaccagaagtaattatactaaagtatcaagaaagggagttagggcttaaactattctgtctagatgtcccagatagttcccattctacttggagatttggcttttccaagaaaagctagagcagagcagcccttctcccacaagccctcccacccccgtgcagccacatacctgtacagaatggtaactaagggtgctgtgcccaaccctgcgactagcaaggctcgcagcaagagcacagccctcaactacttgtgccagagtttctcttggaccactccaactcccactgagcccttttgctgctgggctggcaggaaactttccccactccctaaggggcatgtctgggttaggtgctaagtgctgaagagaacttggtcagttctctcaactttgctttgggcaagaatctggtcacctgatgggatccatggtacaggctactgctaaacttggcacagtatcaagtatagtacctccaaggaccagggctgggcagtctttagtgctaacatcccctttagagttcacacatcttgcccttccatgaatgacccctcagtctggcctccccagcctcaaggtccactcaggcacaagagccacagtaccctagatagtgtcacatgacaccgttgtcatccaaggataatacagaccaactaggctacatctgtgatgagcagctagcaaagccgctggtcttctcctaggactaagtccaggtgccttccacaatctcatggtctttcaggtccctggttacttttctcaaaggccatttccaaaagaatacatgccttcacatcacaacctgtactgtgagtccattctagaggtcactgaaaggccctgtaaagagaggacatggatacgggacctggccctgaggttattactggccgtaaggcagagttaatccatacagaaaccagtgtgtccatgtgctctgcacaaaaacagacctgttgtccatccagtccactgacaagagggtttccccgagagccgaagtggactgaagctacagtttttagctggtgcgggccacaggcagggtcagattgagaagaagcaaagctggggaagcagaagttgggagtcttgtgttgctccctcttcctgtgtggtgctctgggtttctgtggatcgtgaaggcgatctcaagagtgtttccctccaaacctgatagctgcctattcctgtctggttggggctgtggaggatgtagttgtatttattgcattgtaatatttttaacatcctgtgacttcatgctagaaattttctattgtttatagaaactttttgtagaaacattaactctaaagcacatctgcatgtcagtaaaaatctcagtttcgt

SEQ ID NO: 11109 - protein, 280 aa, Homo sapiens [sequence omitted]

SEQ ID NO: 11110 - DNA, 2725 bp, Homo sapiens
  CDS (3)..(1349)
agatgcggtttaaacagaggctgaaagtgatccagtccttggaggacacggccaagaggagtgtggtccgagctatacctgtggacattggtttctccattgaagagctggaggacctttacatggtgtttaaggccaagcacctggctagccagtactgggggtgcagccgcacaatggccggccgtcgggaccccagcctgccctacctggagcagtaccggattgatgccagccagttccgggaactctttgccagcctgacaccctgggcctgtggctcccacacacctctgctggcagggcgcatgttcaggctcctggacgaaaacaaggactcgctgatcaacttcaaggagttcgtgacagggatgagcgggatgtaccacggggacctgacagagaagctcaaggtgctctacaagctacaccttcccccagctctgagcccagaggaagccgagtcagccctggaggcggcccattatttcacagaggacagctcctcagaagaagcactaccacaggaagagcaagaaggaagtggaagtgaggagagaggagaggagaaggggaccagctctccggactatcggcactaccttcgaatgtgggccaaggagaaagaggctcagaaggagacgattaaggatcttcccaagatgaaccaggagcagttcattgagctgtgcaagacgctttacaacatgttcagtgaagaccccatggagcaggacctgtaccacgccatcgccaccgtggccagcctcctgctccgcatcggagaggtggggaagaagttctcagcccgcacaggcaggaagcccagggactgtgccactgaggaggacgagccaccagcacccgaactgcatcaggacgcagccagggagcttcagcccccagctgcaggagacccccaagccaaagcaggcggagacacacacctcggaaaagccccacaggagagccaggtggtggtggaggggggcagcggcgagggacagggctcaccctcccagctgctgtctgacgatgaaaccaaagacgacatgtccatgtcctcctactcggtggtcagcacgggctccctgcaatgtgaagaccttgcagacgacacggtgctggtgggcggggaggcctgcagccccacagcgcgcatcggcggcaccgtcgacaccgactggtgcatctcctttgagcagatcctggcctccatcctgacggagtccgtgctggtgaacttctttgagaagagagtggacattggactcaagatcaaggaccaaaagaaagtggagagacagttcagcaccgccagtgaccatgagcagcctggagtttccggctgatgcctgcagctgtgaggcctggcccaaggtgtcatcagtggggctggcctcatctcctcctgcctttcctcccttatcagtttctctttaaaggtgtgcccctcctgctctcccaggagcagtgagttgtgagtggaaagaaggctggtgcagacccagctgccttagacagattccctgggcctgcatctcctggcgccggctgcttctgggcccaggaagaggctgtggctcccaccttccttacacctggtgggagcccgcctcgcaccagctgcacctgcctagcattacaggctctcagatctgcccttgcttgcctcatacctctgtgctccacactgcggccaggccagctgagtccctccatccgtggatgctttcctgcagctatgtggtatgggggtcattcctgcctcttggcaccaggttgggggcatgtgcttgttgggcaccaaagtgatggaaccctcaggtgctctccgggagcctgaacctcctgactgaggaacatgggcagaacatgtttattgcacagagtgggcgctgcgcacaggcgtggctgtacacgtgctctcagctcatcatcctttccagtaactttaaaaaaacatccctcaggtcctgatatatttccttggattcatttcacttggctagaaattacactgtgctcaatgccttaataaatccctgaaagaaataaaaaccactgtgtgcaatgccttgctgtggcccccaaccactgcttaggcctcccaacttctccccaggccaagtatggggccctggctgtgttctggaagttcaagacacttagtcctccacagtgggtggaagagtgcaaggtctgccaggtcagatggagacgcagaacctgctggtgcaagctgggcaggtcctgaccaacctgcatcaggggatgccctgagctccacaggtcttcatgggcaggggttgtgggtcctggtgaaggaagtgcatcctcaggcctgggctgtagcaagctgtctgcccttgggttcaagaaccagactgtggagccaaaggtgaccgcagggggccccagggctggagccacaaggataccctcactttgcatgaggagctgaaactgaccagtgtccagtgttagctcccacatggggctgctcttgcttctactaaaagatacagcagttacccccttatccacaggggatacagtggatatctaaaaccagacccccagtggatgtctaaaaccacagataataacaaaccttatacatactgtttttcctatgcatacatacctgtgattaagtttatgaattaggcaccttaagagattgacaacaataactaataataaaatgtaacggttatactgt

SEQ ID NO: 11111 - protein, 449 aa, Homo sapiens
MRFKQRLKVIQSLEDTAKRSVVRAIPVDIGFSIEELEDLYMVFKAKHLASQYWGCSRTMAGRRDPSLPYLEQYRIDASQFRELFASLTPWACGSHTPLLAGRMFRLLDENKDSLINFKEFVTGMSGMYHGDLTEKLKVLYKLHLPPALSPEEAESALEAAHYFTEDSSSEEALPQEEQEGSGSEERGEEKGTSSPDYRHYLRMWAKEKEAQKETIKDLPKMNQEQFIELCKTLYNMFSEDPMEQDLYHAIATVASLLLRIGEVGKKFSARTGRKPRDCATEEDEPPAPELHQDAARELQPPAAGDPQAKAGGDTHLGKAPQESQVVVEGGSGEGQGSPSQLLSDDETKDDMSMSSYSVVSTGSLQCEDLADDTVLVGGEACSPTARIGGTVDTDWCISFEQILASILTESVLVNFFEKRVDIGLKIKDQKKVERQFSTASDHEQPGVSG

SEQ ID NO: 11112 - DNA, 1678 bp, Homo sapiens
  CDS (34)..(1158)
agagcttttctgtgtttctccggacttcgagccatggcggtgacggaagcgagcctgttgcgccagtgccccctgcttctgccccagaaccggtcgaaaaccgtgtatgagggattcatctcggctcagggaagagacttccaccttaggatagtgttgcctgaagatttacaactgaagaatgcaagattattatgtagttggcagctgagaacaatacttagtggataccatcgaatagtacaacagagaatgcagcaccctcctgatctaatgagctttatgatggagttgaagatgcttttggaagttgccttaaagaatagacaagagctgtatgcactacctcctcctccccagttctactcaagccttattgaagagataggaactcttggttgggataaacttgtgtatgcggatacctgcttcagtaccatcaagttaaaagcagaagatgcttctggtagagagcatttaatcactctcaagttgaaggcaaagtatcctgcagaatcaccagattattttgtggattttcctgttccattttgtgcctcctggacacctcagagctccttaataagcatttatagtcagtttttggcagcaatagaatcactaaaggcattctgggatgttatggatgaaatcgatgagaagacctgggtacttgagccagaaaaacctccacggagtgcaacagcacgcagaattgcattaggtaataatgtttccataaatatagaggtagaccccaggcatcctactatgcttcctgagtgcttctttcttggagctgaccatgtggtaaaacccctgggaattaagctgagcaggaacatacatttgtgggatccagaaaatagtgtgttacaaaatttgaaagatgttttagaaattgattttccagctcgtgctatcctggaaaaatctgattttactatggattgtggaatttgttatgcttatcaacttgacggtaccattcctgatcaagtgtgtgataattctcagtgtggacaacctttccatcaaatatgcttatatgagtggctgagaggactactaactagtagacagagttttaacatcatatttggtgaatgtccatattgtagtaagccaattaccttaaaaatgtctggaaggaaacactgaaataagaatacaacatttcggtgaagagctggaaacttaaaaaattatcaaaaggaattttggtatcatcttcagagaaaaaataaagcaagaaatactaacatcaaaaggacaggtatgatgatgcgataataataaacatctgcgtttgtctcttcactaagagtaaactgggaaattgtaggccaaagtccagttgaactttctaagtctgtgatccccgtgctgactgtggaagtgtatttataccaagatggagatcttgacttcttgaatatatctggactggtaaaatcttgatgaggctcataaaatgagtttgggaattgtgtatagctgattttttgtgggaaactgtttacttcattcaaaggttcttgagactcttgatatttctgtcttctccttgtgctttcctatggaaaaaatacatatatagtttagtttgttagacgtgagttatccaagtatttattttgtgtagtgtgtaagaatgctaaataaaatgttatacaag

SEQ ID NO: 11113 - protein, 375 aa, Homo sapiens
MAVTEASLLRQCPLLLPQNRSKTVYEGFISAQGRDFHLRIVLPEDLQLKNARLLCSWQLRTILSGYHRIVQQRMQHPPDLMSFMMELKMLLEVALKNRQELYALPPPPQFYSSLIEEIGTLGWDKLVYADTCFSTIKLKAEDASGREHLITLKLKAKYPAESPDYFVDFPVPFCASWTPQSSLISIYSQFLAAIESLKAFWDVMDEIDEKTWVLEPEKPPRSATARRIALGNNVSINIEVDPRHPTMLPECFFLGADHVVKPLGIKLSRNIHLWDPENSVLQNLKDVLEIDFPARAILEKSDFTMDCGICYAYQLDGTIPDQVCDNSQCGQPFHQICLYEWLRGLLTSRQSFNIIFGECPYCSKPITLKMSGRKH

SEQ ID NO: 11114 - DNA, 1677 bp, Homo sapiens
  CDS (479)..(856)
atttaacgtaccaggactctacattgcagttcaggcagtgctggccttggcggcatcttggacatctcgacaagtgggtgaacgtacgttaacggggatagtcattgacagcggagatggagtcacccatgttatcccagtggcagaaggttatgtaattggaagctgcatcaaacacatcccgattgcaggtagagatattacgtatttcattcaacagctgctaagggagagggaggtgggaatccctcctgagcagtcactggagaccgcaaaagccattaaggagaaatactgttacatttgccccgatatagtcaaggaatttgccaagtatgatgtggatccccggaagtggatcaaacagtacacgggtatcaatgcgatcaaccagaagaagtttgttatagacgttggttacgaaagattcctgggacctgaaatattctttcacccggagtttgccaacccagactttatggagtccatctcagatgttgttgatgaagtaatacagaactgccccatcgatgtgcggcgcccgctgtataagaatgtcgtactctcaggaggctccaccatgttcagggatttcggacgccgactgcagagggatttgaagagagtggtggatgctaggctgaggctcagcgaggagctcagcggcgggaggatcaagccgaagcctgtggaggtccaggtggtcacgcatcacatgcagcgctacgccgtgtggttcggaggctccatgctggcctcgactcccgagttctttcaggtctgccacaccaagaaggactatgaagagtacgggcccagcatctgccgccacaaccccgtctttggagtcatgtcctagtgtctgcctgaacgcgtcgttcgatggtgtcacgttggggaacaagtgtccttcagaacccagagaaggccgccgttctgtaaatagcgacgtcggtgttgctgcccagcagcgtgcttgcattgccggtgcatgaggcgcggcgcgggcccttcagtaaaagccatctatccgtgtgccgaccgctgtctgccagcctcctccttctcccgccctcctcaccctcgctctccctcctcctcctcctccgagctgctagctgacaaatacaattctgaaggaatccaaatgtgactttgaaaattgttagagaaaacaacattagaaaatggcgcaaaatcgttaggtcccaggagagaatgtgggggcgcaaacccttttcctcccagcctatttttgtaaataaaatgtttaaacttgaaatacaaatcgatgtttatatttcctatcattttgtattttatggtatttggtacaactggctgatactaagcacgaatagatattgatgttatggagtgctgtaatccaaagtttttaattgtgaggcatgttctgatatgtttataggcaaacaaataaaacagcaaacttttttgccacatgtttgctagaaaatgattatactttattggagtgacatgaagtttgaacactaaacagtaatgtatgagaattactacagatacatgtatcttttagttttttttgtttgaactttctggagctgttttatagaagatgatggtttgttgtcggtgagtgttggatgaaatacttccttgcaccattgtaataaaagctgttagaatatttgt

SEQ ID NO: 11115 - protein, 126 aa, Homo sapiens
MESISDVVDEVIQNCPIDVRRPLYKNVVLSGGSTMFRDFGRRLQRDLKRVVDARLRLSEELSGGRIKPKPVEVQVVTHHMQRYAVWFGGSMLASTPEFFQVCHTKKDYEEYGPSICRHNPVFGVMS

SEQ ID NO: 11116 - DNA, 1552 bp, Homo sapiens
  CDS (160)..(822)
atcgacgggctgcgggagctcaaacgcctcaaggtgctgcggctcaagagcaacctaagcaagctgccacaggtggtcacagatgtgggcgtgcacctgcagaagctgtccatcaacaatgagggcaccaagctcatcgtcctcaacagcctcaagaagatggcgaacctgactgagctggagctgatccgctgtgacctggagcgcatcccccactccatcttcagcctccacaacctgcaggagattgacctcaaggacgacaacctcaagaccatcgaggagatcatcagcttccagcacctgcaccgcctcacctgccttaagctgtggtacaaccacatcgcctacatccccatccagatcggcaacctcaccaacctggagcgcctctacctgaaccgcaacaagatcgagaagatccccacccagctcttctactgccgcaagctgcgctacctggacctcagccacaacaacctgaccttcctccctgccgacatcggcctcctgcagaacctccagaacctagccatcacggccaaccggatcgagacgctccctccggagctcttccagtgccggaagctgcgggccctgcacctgggcaacaacgtgctgcagtcactgccctccagggtgggcgagctgaccaacctgacgcagatcgagctgcggggcaaccggctggagtgcctgcctgtggagctgggcgagtgcccactgctcaagcgcagcggcttggtggtggaggaggacctgttcaacacactgccacccgaggtgaaggagcggctgtggagggctgacaaggagcaggcctgagcgaggccggcccagcacagcaagcagcaggaccgctgcccagtcctcaggcccggaggggcaggcctagcttctcccagaactcccggacagccaggacagcctcgtggctgggcaggagcctggggccgcttgtgagtcaggccagagcgagaggacagtatctgtggggctggccccttttctccctctgagactcacgtcccccagggcaagtgcttgtggaggagagcaagtctcaagagcgcagtatttggataatcagggtctcctccctggaggccagctctgccccaggggctgagctgccaccagaggtcctgggaccctcactttagttcttggtatttatttttctccatctcccacctccttcatccagataacttatacattcccaagaaagttcagcccagatggaaggtgttcagggaaaggtgggctgccttttccccttgtccttatttagcgatgccgccgggcatttaacacccacctggacttcagcagagtggtccggggcgaaccagccatgggacggtcacccagcagtgccgggctgggctctgcggtgcggtccacgggagagcaggcctccagctggaaaggccaggcctggagcttgcctcttcagtatttgtggcagttttagttttttgttttttttttttaatcaaaaaacaatttttttaaaaaaaaagctttgaaaatggatggtttgggcatt

SEQ ID NO: 11117 - protein, 221 aa, Homo sapiens [sequence omitted]

SEQ ID NO: 11118 - DNA, 1728 bp, Homo sapiens
  CDS (259)..(693)
actgtatcacctatagggtgtaattcctccgatcccgctgacttcgaaccaatcccatctttttctgggtttccgttagattctcccaaaaccttggtgcttgactttgagacagagggtgaacgaaactcacctaatcccaggagtgttaggatcccttctcctaacattttgaaaactggacttacagaaaatgttgaccgtggcttggggggcctagagggaacacaccaggcccttgacctgttagcaggaggaatgatgcctgaggaagtaaaagaatcttcccaattagacaaacaagagtcactcggattggaattaaaaattaattctgcaggccttgggccatctccttgccttccagaccttgttgactttgtcacacggacctctggagttcaaaaagataaactgtgttctccactctctgagccaggtgacccttctaaatgtagttccctggagttggggccattacagctagaaatatcgaatgcatccaccacagaggtggcaattctgcaagtagatgatgacagtggcgaccctctgaatttggttaaagctccagtgtcaaggtcccctccaagggagcaggtaattgaagacaatatggtccctcagggaatgcctgaacaggaaactacagttggtgccatccaggaccacacagaatccagtgttcacaactaagaataaatacctagagctacttgtgagtgaatcattggcttctagaaatcagatgcccagatgatccaaggctagtttgttatctcatctggaacctacaccaagagatgcagtcagcatcttaaagtaaatgttcatggaagctaaaaaatttacctcctttccttttccctttccccttaaaacaccagacaaatcgataacaacttatatataatatatatatatctgtaaaaatgtattttgttaatttttttggccaatttattttctcccactttgtcattaaaatcacatgtctaactggctcaccacatagtgtgctttgattgtattttggctttgactctgccatttctgaaatgtgggggaggatggaggcagctgacctctccagttgctgtgttgtattcctacccaatttcctgggcagttgatgcatctctgggaaaaacaccagaaagcttgctgaaatggaaaacttggaagaattgttcatctcttaggcttccatttggatgggcctgccttaacattgtttgaaatgcagcgtgagtagctcttttgtttactgtttacaccccttattggcatgtcaactcctgtacttcccttactctgttgcctttcttgagatgcattgtcctgctaacccacaaacctgtttggaaataaacatggaagaatatctggcaggcttacttttagaagacgacaaatcggtaaggcttattcatggttcattgccaggagcagatatgcttttgagatcacttttatttttgaaatggcctttgttcattgtattgtgatccaataacactttgtattaaattgtttagcagccatttgtgttgtgaaggggtagaagatctctgaaacttgtcttgagattgaactcattccctgttccacaaacccatatgtatcctttcctctacctcctcctttcccaattaatttcaaccatagtacgatgtttggggttgtatattttgttaaaaagattaaagaatttatgagttggcttgg

SEQ ID NO: 11119 - protein, 145 aa, Homo sapiens
MMPEEVKESSQLDKQESLGLELKINSAGLGPSPCLPDLVDFVTRTSGVQKDKLCSPLSEPGDPSKCSSLELGPLQLEISNASTTEVAILQVDDDSGDPLNLVKAPVSRSPPREQVIEDNMVPQGMPEQETTVGAIQDHTESSVHN

SEQ ID NO: 11120 - DNA, 1518 bp, Homo sapiens
  CDS (3)..(932)
taatgatgctacttcgtaaatgttgtaatcatccatatttgattgaatatcctatagaccctgttacacaagaatttaagatcgatgaagaattggtaacaaattctgggaagttcttgattttggatcgaatgctgccagaactaaaaaaaagaggtcacaaggtgctgcttttttcacaaatgacaagcatgttggacattttgatggattactgccatctcagagatttcaacttcagcaggcttgatgggtccatgtcttactcagagagagaaaaaaacatgcacagcttcaacacggatccagaggtgtttatcttcttagtgagtacacgagctggtggcctgggcattaatctgactgcagcagatacagttatcatttatgatagtgattggaacccccagtcggatcttcaggcccaggatagatgtcatagaattggtcagacaaagccagttgttgtttatcgccttgttacagcaaatactatcgatcagaaaattgtggaaagagcagctgctaaaaggaaactggaaaagttgatcatccataaaaatcatttcaaaggtggtcagtctggattaaatctgtctaagaatttcttagatcctaaggaattaatggaattattaaaatctagagattatgaaagggaaataaaaggatcaagagagaaggtcattagtgataaagatctagagttgttgttagatcgaagtgatcttattgatcaaatgaatgcttcaggaccaattaaagagaagatggggatattcaagatattagaaaattctgaagattccagtcctgaattggagacggggtttcaccatcttggcctgactggtcccgaactgatctcaggtgatctgcccacctcggcctcccaaagtgctgggattacaagcgtgagccactgcgtggcctgagcactagggcgcaagagaagccgtactggaatattacactactcagcacaagacaggtttaatctttttcttgggggacaagattggaaaattgaggtctgagcagacctgaagagaggcatccagcaactctgagattaaattcatcattgatcaattcgttattgtttggaattgacgtttagctgtgttcctcactcagatacgtgcatgatagctgcttgctaatttggtcttagctcacatttcacctagaatgtatggtctccctctcccctgcaaaatatcccactgttgctaatctgtctgcctcataatttccatgagattgagcatcttgtttgttttgtcaccactatataacagcatgttggaaacaaagcagtaataaagctagaaaaaccaagcgaatacactggattaaaaaaaatactgtttcctagaattaaagaaataaatgaggccgggcgcagtggtgcctgtaatcccagcagtttgggaggctgaggctagtggatcatgtggccgagatcgcgtcactgcactccagtctagcaacagagcgataccttgtttcttactt

SEQ ID NO: 11121 - protein, 310 aa, Homo sapiens
MMLLRKCCNHPYLIEYPIDPVTQEFKIDEELVTNSGKFLILDRMLPELKKRGHKVLLFSQMTSMLDILMDYCHLRDFNFSRLDGSMSYSEREKNMHSFNTDPEVFIFLVSTRAGGLGINLTAADTVIIYDSDWNPQSDLQAQDRCHRIGQTKPVVVYRLVTANTIDQKIVERAAAKRKLEKLIIHKNHFKGGQSGLNLSKNFLDPKELMELLKSRDYEREIKGSREKVISDKDLELLLDRSDLIDQMNASGPIKEKMGIFKILENSEDSSPELETGFHHLGLTGPELISGDLPTSASQSAGITSVSHCVA

SEQ ID NO: 11122 - DNA, 718 bp, Homo sapiens; identical to SEQ ID NO: 2101

SEQ ID NO: 11123 - DNA, 1637 bp, Homo sapiens
  CDS (221)..(1636)
ctataacttattacagtcatccagccctgctgtaaaatatgaagctgctgggacattagtgacactctctagtgcaccaactgcaatcaaggctgctgctcagtgttacattgatttaattattaaggagagcgacaacaatgtaaaactcatagttttggatcgcttgatagaattaaaagagcatcctgctcatgaacgagtactacaggatctggttatggatatcctaagagtattgagcacaccagacttagaagtacgaaagaaaactctgcagttagcactggatcttgtctcttctagaaatgttgaaaagctggttattgtcctgaagaaggaagtgataaaaacaaataatgtgtctgagcatgaagatactgacaaatacagacaactcctagtgcgaacattgcattcctgttctgtccgatttccagatatggctgcaaatgttattcctgtgttaatggaatttctcagtgacaacaacgaagcagcagctgctgatgtcttggagtttgttcgtgaagccattcagcgctttgataacctgagaatgcttattgttgagaagatgcttgaagtctttcatgctattaaatctgtcaagatttaccgaggagcattatggatcctgggagaatactgtagtaccaaggaagacattcagagtgtgatgactgagatccgcaggtcccttggagagatcccaattgtagagtcagaaataaagaaagaagctggtgaattaaaacctgaagaagaaatacctgtagggccagttcagaaattggttactgaaatgggtacctatgcaactcagagtgcccttagcagttctagacccaccaagaaagaggaagacagacctcccttgagaggattccttctggatggagatttctttgttgctgcctcccttgccacaactctgaccaagattgcattgcgctatgtagctttggttcaggagaagaaaaagcaaaattcttttgttgctgaggctatgttgctcatggctactatcctgcatttgggaaaatcctctcttcctaagaagccaattactgatgatgatgtggatcgaatttccctgtgcctcaaggtcttgtctgaatgttcacctttaatgaatgacattttcaataaggaatgcagacagtccctttctcacatgttatctgctaaactagaagaagagaaattatcccaaaagaaagaatctgaaaagaggaatgtgacagtacagcctgatgaccccatttccttcatgcaactaactgctaagaatgaaatgaactgcaaggaagatcagtttcagctgagtttactggcagcaatgggtaacacacagaggaaagaggcagcagatcccctagcatctaaacttaacaaggtcacccaattgacaggtttctcagatcctgtatatgcagaagcttacgttcatgtcaaccaatatgatattgtcctggatgtacttgttgtgaaccaaaccagtgatactttgcagaattgcacattagaactagctacactaggggatctgaaacttgtggaaaagccgtctcctttgactcttgctcctcatgacttcgcaaatattaaagctaacgtcaaagtagcatcaacag

SEQ ID NO: 11124 - protein, 472 aa, Homo sapiens
MDILRVLSTPDLEVRKKTLQLALDLVSSRNVEKLVIVLKKEVIKTNNVSEHEDTDKYRQLLVRTLHSCSVRFPDMAANVIPVLMEFLSDNNEAAAADVLEFVREAIQRFDNLRMLIVEKMLEVFHAIKSVKIYRGALWILGEYCSTKEDIQSVMTEIRRSLGEIPIVESEIKKEAGELKPEEEIPVGPVQKLVTEMGTYATQSALSSSRPTKKEEDRPPLRGFLLDGDFFVAASLATTLTKIALRYVALVQEKKKQNSFVAEAMLLMATILHLGKSSLPKKPITDDDVDRISLCLKVLSECSPLMNDIFNKECRQSLSHMLSAKLEEEKLSQKKESEKRNVTVQPDDPISFMQLTAKNEMNCKEDQFQLSLLAAMGNTQRKEAADPLASKLNKVTQLTGFSDPVYAEAYVHVNQYDIVLDVLVVNQTSDTLQNCTLELATLGDLKLVEKPSPLTLAPHDFANIKANVKVAST

SEQ ID NO: 11125 - DNA, 990 bp, Homo sapiens
  CDS (584)..(988)
tattgacgccatattggggccggcggcgggtgggagagttctacgagggaggggaagcggttggacgtgttcgcttgggttcctgctgcggcagctacctcgcaatctctctgcatcgatcgccgctcgcaagctactgaccgtactcgggcgtattaggagccgcgttccagcctcacaccccacggtgctgttttcgacttcagaaaggatctagtctcagcacaggagcgcctcaggcgcggcgcaaagctcgagcggacggcgggggcggccggagcctctctcgggggagccgcgcctgaggaggcggaagaacccccctgacgcgactggcgtgtgcttctgcccgccaccgcccctcccgctctcacccgggccgtccctggccactgcccctgccgcggaggcagcggcggcagcggctctcctttccacagccggcgctccgcgacccgcttggctcctgagcccgtcgggtaggctctcctcgagttcccgctcttcaccccttccctcaccctcttctttcgtcacccgtccccgaccccacccgagcccggcgcctcagctgcccccggccatggcgtgcggagccactctgaaaaggactctggatttcgacccgctgttgagcccggcgtccccgaagcgcaggcgatgtgcgccattgtcggcgcccacctcggccgctgcctccccgttgtcggcggccgcggccaccgccgcctccttctccgctgcggccgcctcgccgcagaagtatctccgaatggagccatcccccttcggcgacgtctcctcccgcctcaccacagaacaaattctgtacaacataaaacaagagtataaacgaatgcagaagagaagacatttagaaacgagtttccaacagacagatccgtgttgtacttctgatgcacagccacatgcatttctcctcagtggaccagcttcaccagggacttcatctgcagcatcctcaccatt

SEQ ID NO: 11126 - protein, 135 aa, Homo sapiens
MACGATLKRTLDFDPLLSPASPKRRRCAPLSAPTSAAASPLSAAAATAASFSAAAASPQKYLRMEPSPFGDVSSRLTTEQILYNIKQEYKRMQKRRHLETSFQQTDPCCTSDAQPHAFLLSGPASPGTSSAASSP

SEQ ID NO: 11127 - DNA, 1299 bp, Homo sapiens
  CDS (35)..(988)
ttactcccctattgactacagtgatggttctggaatgaatttgttgcagatacaggataaagtctggtcccaggcttgccttggtgcctgtgcacctcatttagaggagaagcttagcccaccagtaccatcatgctcagttgtgggagccatttcttcctactacgtccagcgctacggatttcctccaggatgcaaagtggtggccttcactggggacaacccagcgtcgctggcaggcatgagactggaggaaggtgacattgcggtcagcctgggcaccagtgacaccctgtttctctggctccaagagcccatgcctgccctggaaggccacatcttctgcaacccggttgactcccagcactacatggcactcctgtgctttaaaaatggctccctcatgagagagaagatccgcaacgagtctgtatcccgttcctggagcgatttctctaaggcactgcagtccacagagatgggcaacggtggaaacctgggtttttattttgatgtaatggagatcacccctgaaattattggacgtcataggtttaacacagaaaaccacaaggttgcagcattccctggggatgtggaggttcgagcactaattgaaggacaattcatggccaagaggattcacgcagaaggcctgggctatcgagtcatgtccaagacaaagattttggccacaggaggagcatctcacaatagagaaatcttacaggtgcttgcagatgtgtttgatgccccggtgtatgttatagacactgccaactcggcctgtgtgggttctgcataccgagcttttcatggtcttgcaggtggaacagatgtgcccttttcagaggttgtgaagttagctccaaatcccagactagctgctaccccaagcccgggagcttctcaggtctacgaggcccttctcccccagtatgccaaactcgagcagagaatcttgtctcagacccgggggcctccggagtgaacaggcatccctgttgcccctgcctgcccagatttactgaccccatttgtcgacatggccccagacaggagggatccacttctctgttctgaacagctcttcctgcccctactgactccttggagtgtccaggaccatcttaaagccgccctcagcacatctgcatgaagatagataggcactcctgtccctgtgcccgtgtgccccagggcaggaaagcatctctcttttcctgtcttttatcccaggaggcaggacaacactgagactgggatatgtccaataaaaactatgacttttccccttgc

SEQ ID NO: 11128 - protein, 318 aa, Homo sapiens
MNLLQIQDKVWSQACLGACAPHLEEKLSPPVPSCSVVGAISSYYVQRYGFPPGCKVVAFTGDNPASLAGMRLEEGDIAVSLGTSDTLFLWLQEPMPALEGHIFCNPVDSQHYMALLCFKNGSLMREKIRNESVSRSWSDFSKALQSTEMGNGGNLGFYFDVMEITPEIIGRHRFNTENHKVAAFPGDVEVRALIEGQFMAKRIHAEGLGYRVMSKTKILATGGASHNREILQVLADVFDAPVYVIDTANSACVGSAYRAFHGLAGGTDVPFSEVVKLAPNPRLAATPSPGASQVYEALLPQYAKLEQRILSQTRGPPE

SEQ ID NO: 11129 - DNA, 1291 bp, Homo sapiens
  CDS (93)..(788)
ctattaaaacctctcctgccaaggcccggtctcccatcaacagaagaggctctgtctcctccgtctctcccaagccaccttcatctttcaagatgtcgattagaaactgggtgacccgaacaccttcctcatcaccacccatcactccacctgcttcggagaccaagatcatgtcaccgagaaaagcccttactcctgtgagccagaagtcatcccaagcagaggcttgctctgagtctagaaatagagtaaagaggaggctagactcaagctgtctggagagtgtgaaacaaaagtgtgtgaagagttgtaactgtgtgactgagcttgatggccaagttgaaaatcttcatttggatctgtgctgccttgctggtaaccaggaagaccttagtaaggactctctaggtcctaccaaatcaagcaaaattgaaggagctggtaccagtatctcagagcctccgtctcctatcagtccgtatgcttcagaaagctgtggaacgctacctcttcctttgagaccttgtggagaagggtctgaaatggtaggcaaagagaatagttccccagagaataaaaactggttgttggccatggcagccaaacggaaggctgagaatccatctccacgaagtccgtcatcccagacacccaattccaggagacagagcggaaagacattgccaagcccggtcaccatcacgcccagctccatgaggaaaatctgcacatacttccatagaaagtcccaggaggacttctgtggtcctgaacactcaacagaattatagattctaatctgagtgagttactgagctttggtccactaaaacaagctgagctttggtccactaaaacaagatgaaaaatacaagagtgactctataactctggtctttaagaaagctgccttttcatttttagacaaaatcttttcaacgctgaaatgtacctaatctggttctactaccataatgtatatgcagcttcccgaggatgaatgctgtgtttaaatttcataaagtaaatttgtcactctagcattttgaatgaatagtcttcactttttaaattattcatcttctctataataatgacatcccagttcatggaggcaaaaaaaacaagtttcttgttatcctgaaactttctatgctcagtggaaagtatctgccagccacagcatgaggcctgtgaaggctgactgagaaatcctctgctgaagacccctggttctgttctgcctccaacatgtataattttatttgaaatacataatcttttcactatg

SEQ ID NO: 11130 - protein, 232 aa, Homo sapiens [sequence omitted]

SEQ ID NO: 11131 - DNA, 1455 bp, Homo sapiens
  CDS (184)..(1200)
gacttccactgggaagaacccagcagccggaaggagtctcgagggggcccttcccgccggggtgtggccctgcttcgcccagagcccctgcaccgggggacagcagacaccctcctcaaccgggttaagaagctgccttgtcagatcaccagctacctggtggcgcacaccctagggcgccggatgctgtatccaggctctgtgtacctgctgcagaaggccctcatgcctgtgctgctgcagggccaggcccgactggtggaagagtgtaatgggcgccgggcaaagctgctggcctgtgatggcaatgagattgacaccatgtttgtggaccggcgggggacagctgagccccagggacagaagctggtgatctgctgtgaggggaatgctgggttttatgaggtgggctgcgtctccacgcccctggaagctggatattcagtcctgggctggaatcatccaggctttgctggaagcacgggggtgccattcccgcagaatgaggctaatgccatggatgtggtggtccagtttgccatccaccgcctgggcttccagccccaggacatcatcatctacgcctggtccatcggcggcttcactgccacgtgggcagccatgtcctacccagatgttagtgccatgatcctggatgcctcctttgatgacctggtgcccttggccttgaaggtcatgccagacagctggaggggcctggtgaccaggaccgtgaggcagcatctcaatctaaacaacgcggagcagctgtgcagataccagggtcctgtactgctgatccggagaaccaaggatgagatcatcaccaccacggttcctgaggacatcatgtccaaccgaggcaatgacctcctgctgaagctcctgcagcatcggtatccccgggtgatggcagaggagggtcttcgagtggtgaggcagtggttggaggcctcctcacagctggaggaagcctcaatttatagccgatgggaggtggaagaggactggtgtctgtctgtcctccgctcctaccaggcagaacacgggcccgacttcccctggagcgtgggggaggacatgagtgcagatggacggcggcagctggctttgtttctggctcggaagcatctgcacaactttgaggccactcactgcaccccactcccagcccagaacttccagatgccctggcacctctagggaccaactgggactcattatggaagaatggggtgagaggagacatgaggaaagaccctcttatttgtgattctctgtgttcatgttgctgtttatagtttgtggaaagtgggggaccatcccccttctcaccactgttcctcttgcacgtttcccctcattcatgtggctgtacttaaccttctccaacatacatcctgcattacatgaatggattattcctaataattaataaaaaggtattttttctac

SEQ ID NO: 11132 - protein, 339 aa, Homo sapiens
MLYPGSVYLLQKALMPVLLQGQARLVEECNGRRAKLLACDGNEIDTMFVDRRGTAEPQGQKLVICCEGNAGFYEVGCVSTPLEAGYSVLGWNHPGFAGSTGVPFPQNEANAMDVVVQFAIHRLGFQPQDIIIYAWSIGGFTATWAAMSYPDVSAMILDASFDDLVPLALKVMPDSWRGLVTRTVRQHLNLNNAEQLCRYQGPVLLIRRTKDEIITTTVPEDIMSNRGNDLLLKLLQHRYPRVMAEEGLRVVRQWLEASSQLEEASIYSRWEVEEDWCLSVLRSYQAEHGPDFPWSVGEDMSADGRRQLALFLARKHLHNFEATHCTPLPAQNFQMPWHL

SEQ ID NO: 11133 - DNA, 1253 bp, Homo sapiens
  CDS (327)..(1115)
gtgagaaactcattccccagagcaacagtgtagagaggtggaacctgatgggagccccgccctcacagacaaactcctgtagctgtcaagacagcttgggcatggattcctctctgccttctgccatgtggacacgtggccttcctcccctctctcctccggggaatgcagtgtttgggcgccatcttggaagcagagatcaggcctcaccagacaccaagcctgctggcaccatgaccctggactcccaacctccacagctgggaaagaactctgctccctagaaattacccaggctcgctcaggcacccactgactccagcctcatggaaccaccattcaccaggcttgaggggaggatgtcacggcgcgctgctcccttcggtgccagccaggatggggccgggtgggtgcagctggtgaaaagaaatgcagccccccagcccctgcagaccaagccgaacagcccagctcgcgggtggatcacagggcacccagcagccgccttccctccggaagagccaagaaggcttccaagaccagaaatgcccccagtgtggctgtgcctgtccccggtgccccgccagctggggggcagcatacccaaacagatgcaccctgcccatgatggcaccccagggacccccatcctcaggaccctccagtcgttcaagctggaattggcaggtttctgcctgtataggcatcggcttcagagtctcaggtgctgcttggcaggaaaatgcagggcaggaggggctgggcctcagctcgaggctcccaggtgcagccccccactccactgcagggcccaggggggccaagaacagccacaacaacaacaaaagccaaactgggaacggaatcgtggaaaaaaccctcataggcttttgggaacttacaaagaaatgcccacatccattctactaacatggcatctactaacgtggcatctactaggatgccacaaaacagacaaatccttccacgtaaggctggacacgtgtcagggcggtgtctcaaagctgggccacaggcagcatccacggccaggccactgggtggaggagacggtgctggggaggagccggagggaggggccggggctgttcccttaggcagaacggctcacctgtggtgtgcgcacagcaggattgtggggacacaagatgcccccttcattcatcagttacttgtattctttgtatgaaacacctgccgataaaatgtgaaaaaggggcatttcctaaagt

SEQ ID NO: 11134 - protein, 263 aa, Homo sapiens
MEPPFTRLEGRMSRRAAPFGASQDGAGWVQLVKRNAAPQPLQTKPNSPARGWITGHPAAAFPPEEPRRLPRPEMPPVWLCLSPVPRQLGGSIPKQMHPAHDGTPGTPILRTLQSFKLELAGFCLYRHRLQSLRCCLAGKCRAGGAGPQLEAPRCSPPLHCRAQGGQEQPQQQQKPNWERNRGKNPHRLLGTYKEMPTSILLTWHLLTWHLLGCHKTDKSFHVRLDTCQGGVSKLGHRQHPRPGHWVEETVLGRSRREGPGLFP

SEQ ID NO: 11135 - DNA, 1276 bp, Homo sapiens
  CDS (247)..(1101)
gcagctcctgctcgcctttcccttcgctgggcgagaggtgtctatggggcacccgctgccgccgccgctaccgccaccgccaccgccaccgccgccgagtgctgtctctatggcgaggaggaggaggaggagcgcgagctcagcgatacaagtacataaataaaggataaaatattttatgaaacaaatcttcaatcaagtataacattttgatgcttggcatctagactcccttgtgccctcactatgccagcggcaactgtagatcatagccaaagaatttgtgaagtttgggcttgcaacttggatgaagagatgaagaaaattcgtcaagttatccgaaaatataattacgttgctatggacaccgagtttccaggtgtggttgcaagacccattggagaattcaggagcaatgctgactatcaataccaactattgcggtgtaatgtagacttgttaaagataattcagctaggactgacatttatgaatgagcaaggagaataccctccaggaacttcaacttggcagtttaattttaaatttaatttgacggaggacatgtatgcccaggactctatagagctactaacaacatctggtatccagtttaaaaaacatgaggaggaaggaattgaaacccagtactttgcagaacttcttatgacttctggagtggtcctctgtgaaggggtcaaatggttgtcatttcatagcggttacgactttggctacttaatcaaaatcctaaccaactctaacttgcctgaagaagaacttgacttctttgagatccttcgattgttttttcctgtcatttatgatgtgaagtacctcatgaagagctgcaaaaatctcaaaggtggattacaggaggtggcagaacagttagagctggaacggataggaccacaacatcaggcaggatctgattcattgctcacaggaatggcctttttcaaaatgagagaaatgttctttgaagatcatattgatgatgccaaatattgtggtcatttgtatggccttggttctggttcatcctatgtacagaatggcacagggaatgcatatgaagaggaagccaacaagcggtcatgacatgaaatagtccttttatttttatttcgagctacacacatgcttgtatataggttttatctctggttgaatccctcgaacaatagacagtacctttcccccccctttcatggcccattttattgtctgcctttcagtactaagtatgaccgttcctatctcagatcttaat

SEQ ID NO: 11136 - protein, 285 aa, Homo sapiens [sequence omitted]

SEQ ID NO: 11137 - DNA, 1574 bp, Homo sapiens
  CDS (3)..(1184)
tcatgaattcgagcggctctcataaagatctggctggcaagtatcgtcagatcctggaaaaagccattcagttatctggagcagaacaactagaagctttgaaagcttttgtggaagcaatggtaaatgagaatgtcagtctcgtgatctcgcggcagttgctgactgatttttgcacacatcttcctaacttgcctgatagcacagccaaagaaatctatcacttcaccttggaaaagatccagcctagagtcgtttcatttgaggagcaggttgcttccataagacagcatcttgcatctatatatgagaaagaagaagattggagaaatgcagcccaagtgttggtgggaattcctttggaaacaggacaaaaacagtacaatgtagattataaactggagacttacttgaagattgctaggctatatctggaggatgatgatccagtccaggcagaggcttacataaatcgagcatcgttgcttcagaatgaatcaaccaatgaacaattacagatacattataaggtatgctatgcacgtgttcttgattatagaagaaaattcattgaagctgcacaaaggtacaatgagctctcttacaagacaatagtccacgaaagtgaaagactagaggccttaaaacatgctttgcactgtacgatcttagcatcagcagggcagcagcgttctcggatgctagctactctttttaaggatgaaaggtgccagcaacttgctgcctatgggatcctagagaaaatgtatctagataggatcatcagaggaaatcaacttcaagaatttgctgccatgctgatgcctcaccaaaaagcaactacagctgatggttccagcatcttggacagagctgttattgaacacaatttgttgtctgcaagcaaattatataataatattaccttcgaagaacttggagctcttttagagatccctgcagctaaggcggaaaagatagcatctcaaatgataaccgaaggacgtatgaatggatttattgaccagattgatggaatagttcattttgaaacacgagaagccctgccaacgtgggataagcagatccaatcactttgtttccaagtgaataaccttttggagaaaattagtcaaacagcaccagaatggacagcacaagccatggaagcccagatggctcagtgaatccttgcagaacttctgtgcacatgacatctttttccatgttgtgcagatcagtttcactatctccaaagcatttgcatcatgaccttatacatttcaatcccttttatgctggattccgtttaaagaagacattattagagcaggaagtacaagcatttaaaatatgtagttcccatatatttcagggtctctgtgtattaagctaactcagatgttttgaaagctttttctttaaacagaggtgaaatatctgtggctaaaaagtttgagatttgtgataactttgtagtcatgtaaaacttaagtgcttcatgcctctccaaatgtggttattctaataaatggagaaatgagccaaataaaagtagtactttgtttttagtt

SEQ ID NO: 11138 - protein, 394 aa, Homo sapiens [sequence omitted]

SEQ ID NO: 11139 - DNA, 1429 bp, Homo sapiens
  CDS (202)..(1131)
ccggaagtcgagttagtctagttagtatcggcctgttatctccttttgcgcgacacggtctcagctgttccgcctgaggcgagtgacgctggccgccaacgaggtatacgtactgggaccctcgccctcagtctcgtctccggcgcggctacctgccccgttttccctgtgagttgacctgctccgggccgcgggccgccaatggcaggggccgctccgaccacggccttcgggcaggcggtgaccggcccgccgggctcagggaagaccacgtactgcctgggcatgagtgagttcctgcgcgcgctgggccggcgcgtggcggtggtgaacctggacccggccaacgaggggctgccgtacgagtgtgccgtggacgtgggcgagctggtggggctgggcgacgtgatggacgcgctgcgcctggggcccaacggcggcctgctctactgcatggagtacctggaagccaacctggactggctgcgtgccaagctcgaccccctccgcggccactacttcctcttcgactgcccaggccaggtggagctctgcacgcatcacggcgccttgcgcagcatcttctcccaaatggcgcagtgggacctcaggctgactgccgtccacctcgtggattctcactactgcacagaccctgccaagttcatttcagtactgtgtacctccctggccaccatgctgcacgtggaactgccccacatcaacctcctttccaagatggacctcattgagcattatgggaagctggccttcaacctggactactacacagaggttctggacctctcctacctgcttgaccacctggcttctgaccctttcttccgccactaccgccagctcaatgagaagctagtgcagctcatcgaagactatagccttgtctcctttatccctctcaacatccaggacaaggagagcatccagcgagtcctgcaggctgtggataaagccaatggatactgtttcagagcccaagagcagcgaagcttggaagccatgatgtctgccgcaatgggagccgacttccatttctcttccacactgggcatccaggagaagtacctggcaccctcgaaccagtcagtggagcaggaagccatgcagctgtagcaacaaggtggaccctggagagcaggatgcataatccagcactggggaaagtggaggctcctgatgcaggctgcagacccaagagcaagtcctcccagccagagctggcgggctggcaaggggatattcagctctgcaaaggacttctggccaaaaagccagacatggtgccaagcagaacaccccccatactgtcagtggtgtccgtgagctctgggccctgccaccagaaagtcgagcactggtcctagtcaggctgtgatgaaatgtgctacaatacaagagtttattttct

SEQ ID NO: 11140 - protein, 310 aa, Homo sapiens
MAGAAPTTAFGQAVTGPPGSGKTTYCLGMSEFLRALGRRVAVVNLDPANEGLPYECAVDVGELVGLGDVMDALRLGPNGGLLYCMEYLEANLDWLRAKLDPLRGHYFLFDCPGQVELCTHHGALRSIFSQMAQWDLRLTAVHLVDSHYCTDPAKFISVLCTSLATMLHVELPHINLLSKMDLIEHYGKLAFNLDYYTEVLDLSYLLDHLASDPFFRHYRQLNEKLVQLIEDYSLVSFIPLNIQDKESIQRVLQAVDKANGYCFRAQEQRSLEAMMSAAMGADFHFSSTLGIQEKYLAPSNQSVEQEAMQL

SEQ ID NO: 11141 - DNA, 1648 bp, Homo sapiens
  CDS (304)..(1056)
actctgcctccaaagccaccgtccccccgaggcaccactgcatcccccaaggggcgggttcggaggaaggaggaggcaaaggagagccccagcgccgcagggcccgaggacaagagccagagcaagcgcagggccagtaacgagaaggagtcagcagccccagcctcaccggcaccttcgccggcgccctcgcccaccccagccccgccccagaaggagcagccccccgcggagacccctacagacgctgctgtcttgacctcacccccagcccctgctcccccggtgacccctagcaaaccaatggccggcaccacagaccgagaagaagccactcggctcttggctgagaagcggcgccaggcccgggagcagcgggagcgcgaggagcaggagcggaggctgcaggcagaaagggacaagcgaatgcgagaggagcagctggcacgggaggccgaggcccgggcggagcgggaggcggaggcccggaggcgggaggagcaggaggcacgagagaaggcgcaggccgagcaggaggagcaggagcggctgcagaagcagaaagaggaggccgaagctcggtcgcgggaagaggcggagcggcagcgtctggagcgggaaaagcacttccagcagcaggagcaagagcggcaagagcgcagaaagcgtctggaggagatcatgaagaggactcggaagtcagaagtttctgaaaccaagaagcaggacagcaaggaggccaacgccaacggttccagcccagagcctgtgaaagctgtggaggctcggtccccagggctgcagaaggaggctgtgcagaaagaggagcccatcccacaggagcctcagtggagtctcccaagcaaggagttgccagcgtccctggtgaatggcctgcagcctctcccagcacaccaggagaatggcttctccaccaacggaccctctggggacaagagtctgagccgaacaccagagacactcctgccctttgcagaggcagaagccttcctcaagaaagctgtggtgcagtccccgcaggtcacagaagtcctttaagagggtttgccttggatccgggcacagttgtgagggctcctctgcatcacctaccaggatgtctggaggagaaaaagacagaacaaagatggaagtggcctgggcccctgggggtgggtcctctctgttgtttttaatctgcaccttatagactgatgtctctttggccggagccagatctgcccctcagtgcattcgtgtgctcgcacgcgcagacatcccttctcccccatacacacatatacactcacagcctctctggcctcttcccttggggaggggccacctgtagtatttgccttgatttggtggggtacagtggatgtgaatactgtaaatagcttgtgctcagactcctctgcgtggagagggtgggtgcaggaggcagaccctccccccaaagccccctggggagatcttcctctctctatttaactgtaactgagggggatcccaggtctggggatgggggacaccttgggccacaggatactggttgcttcaggggtacccatgccccctgccctcgcctggaatcagtgttactgcatctgattaaatgtctccagaaataaagaataattctgcc

SEQ ID NO: 11142 - protein, 251 aa, Homo sapiens
MAGTTDREEATRLLAEKRRQAREQREREEQERRLQAERDKRMREEQLAREAEARAEREAEARRREEQEAREKAQAEQEEQERLQKQKEEAEARSREEAERQRLEREKHFQQQEQERQERRKRLEEIMKRTRKSEVSETKKQDSKEANANGSSPEPVKAVEARSPGLQKEAVQKEEPIPQEPQWSLPSKELPASLVNGLQPLPAHQENGFSTNGPSGDKSLSRTPETLLPFAEAEAFLKKAVVQSPQVTEVL

SEQ ID NO: 11143 - DNA, 1733 bp, Homo sapiens
  CDS (52)..(1164)
ctaaactgggttaaggaagtaaccagagacccttccatcttgactatccccatgcatttctgggcacttttttacccaaagagagcaatggaccaggctcgagaactggtcaacatgttggagaagatagccggccccattggcatgcgtatgagcccaccggcctgggttgaactaaaggatgaccgaatagagacttatgtcagaaccattcaatccacgttaggagctgaggggaagatacagatggttgtttgcatcatcatgggcccacgtgatgatctctatggggccatcaataagctgtgctgtgtgcagtccccagtgccctcccaggttgtcaatgttcgaaccattggtcagcccaccaggcttcggagtgtggcccagaagattttacttcagattaactgtaaattgggtggtgagctctggggagtggatattcctctgaaacagttaatggtgatcgggatggatgtttaccatgaccccagtagaggcatgcgctccgtggttggcttcgtggcaagcatcaatctcaccctcacaaaatggtattcccgggtggtgttccagatgccgcatcaggagattgtggacagcctgaagctatgcctcgtgggctccttaaaaaagttttatgaggtgaaccactgtctaccagagaagattgtggtgtaccgtgatggagtgtctgatggccaactgaagacagttgccaactatgagattcctcaactacagaagtgttttgaagcttttgagaattatcagcccaagatggtggtgtttgtagttcagaagaaaatcagtactaatctatatctggctgctcctcagaactttgtaactcccactcctggaactgtggtagatcatacaataacaagctgtgagtgggtggatttctatcttcttgcccatcatgtacggcagggctgtggcattcctacgcattatgtctgtgttctcaacaccgcaaacctgagccctgatcatatgcagaggctgactttcaaactgtgccacatgtactggaattggcctggcaccatcagagttccagctccttgcaagtatgcccacaagctagctttcctgtcaggacacatcttgcatcatgaaccagccatccagctgtgcgagaacctgttcttcctgtgactgcacagcttggagatgggctggtgagaagaaaggcggcctcagaactcagctgtgactcttgcagaatcaacagagactgaagtgggcttttgtgttataattttccctttctccaaccctgtagaataagatttctttcttgtcttttaaacctaatatcaccaagaagcaagtttctgagtaacagctgaaaatggccttgttgcctgtgtagagcaagttacggtggtactgccactctgcaggtggagcgggtgactctgggggaccattaagacctccagaccgggtgcggtggttcacacctgtaatccaagcactttgggaggccgaggcgggtggatcatgaggtcaggagatcaagaccatcctggccaacatggtgaaaccccgtctctactaaaatacaaaaaaattagccgggtgtggcggtgcacgcctgtagtcccagctactcaggaggctaaggcaggagaatcgcttgaacccgggaggtggaggttgcagtgagccgagatcacgccactgcactccagcctgttgacaaagcaagactctgtctc

SEQ ID NO: 11144 - protein, 371 aa, Homo sapiens
MHFWALFYPKRAMDQARELVNMLEKIAGPIGMRMSPPAWVELKDDRIETYVRTIQSTLGAEGKIQMVVCIIMGPRDDLYGAINKLCCVQSPVPSQVVNVRTIGQPTRLRSVAQKILLQINCKLGGELWGVDIPLKQLMVIGMDVYHDPSRGMRSVVGFVASINLTLTKWYSRVVFQMPHQEIVDSLKLCLVGSLKKFYEVNHCLPEKIVVYRDGVSDGQLKTVANYEIPQLQKCFEAFENYQPKMVVFVVQKKISTNLYLAAPQNFVTPTPGTVVDHTITSCEWVDFYLLAHHVRQGCGIPTHYVCVLNTANLSPDHMQRLTFKLCHMYWNWPGTIRVPAPCKYAHKLAFLSGHILHHEPAIQLCENLFFL

SEQ ID NO: 11145 - DNA, 2008 bp, Homo sapiens
  CDS (146)..(1741)
acaagaaaatgttactttaatatataatccatcagacagaggaatcaataataaaactgcaacagaactatcaactgtatacttatttggtggagatgaaatttcaagacagcagtatcgcagggccctgttacataaaccagagatgataaaacagatacttccagaacatagtgtgcttcaaaacattaattttgttgaagcatttcaagatgagctattagtaactgaagtatatgatcttccccaacgacctaatgatgttcagctcttttatggaagcatgtgtaaaattatactttcagtaattggagaattcagagattgcatttctagcagagaattccttcagccttcttccaaagctagcttggaatctacaagcgacttgggagcttctgggaaacatggtggcaacgtctctttggatgttttaccagtcaaaggtcctcagggttctcctcttctctcacgggcggctcgcccgcctccggatcagctggcctccgaagagccgtggactgtcctacccgagcacttgattctggtagctccttctccttgtgacatggcaaaaactggacgtttccagattgtgaataactctgtgaggttactgagatttgagctgtgctggccagcgcattgcctcacagtcacgccgcagcatggatgtgtcgcgccagagagtaaactacaaattcttgtgagtcctaattcctccttatccacaaaacagtcaatgttcccgtggagtggtttgatctatatacactgtgacgatggacagaagaaaattgtgaaagttcaaattcgagaagatttaactcaagtggaacttttaactcgtttgacctccaaaccatttggaattctttccccagtatctgagccttcagttagtcatttggtcaaaccaatgacaaaaccgccttccacaaaagttgaaataagaaacaagagtattacttttcctacaacagaacctggtgaaacttcagagagctgtctagaactcgagaatcatggcaccacagacgtgaaatggcatctgtcatctttagcgccaccttatgtcaagggagttgatgaaagtggagatgtttttagagctacctatgcagcattcagatgttctcctatttctggtctgctggaaagccatgggatccaaaaagtctccatcacatttttgcccagaggtaggggggattatgcccagttttgggatgttgaatgtcaccctcttaaggagcctcacatgaaacacacgttgagattccaactctctggacaaagcatcgaagcagaaaatgagcctgaaaacgcatgcctttccacggattccctcattaaaatagatcatttagttaagccccgaagacaagctgtgtcagaggcttctgctcgcatacctgagcagcttgatgtgactgctcgtggagtttatgccccagaggatgtgtacaggttcctgccgactagtgtgggggaatcacggacacttaaagtcaatctgcgaaataattcttttattacacactcactgaagtttttgagtcccagagagccattctatgtcaaacattccaagtactctttgagagcccagcattacatcaacatgcccgtgcagttcaaaccgaagtccgcaggcaaatttgaagctttgcttgtcattcaaacagatgaaggcaagagtattgctattcgactaattggtgaagctcttggaaaaaattaactagaatacatttttgtgtaaagtaaattacgtaagttgtattttgttaactttatctttctacactacaattatgcttttgtatatatattttgtatgatggatatctataattgtagattttgtttttacaagctaatactgaagactcgactgaaatattatgtatctagcccatagtattgtacttaacttttacaggtgagaagagagttctgtgtttgcattgattatgatattctgaataaatatggaatatatttt

SEQ ID NO: 11146 - protein, 532 aa, Homo sapiens
MIKQILPEHSVLQNINFVEAFQDELLVTEVYDLPQRPNDVQLFYGSMCKIILSVIGEFRDCISSREFLQPSSKASLESTSDLGASGKHGGNVSLDVLPVKGPQGSPLLSRAARPPPDQLASEEPWTVLPEHLILVAPSPCDMAKTGRFQIVNNSVRLLRFELCWPAHCLTVTPQHGCVAPESKLQILVSPNSSLSTKQSMFPWSGLIYIHCDDGQKKIVKVQIREDLTQVELLTRLTSKPFGILSPVSEPSVSHLVKPMTKPPSTKVEIRNKSITFPTTEPGETSESCLELENHGTTDVKWHLSSLAPPYVKGVDESGDVFRATYAAFRCSPISGLLESHGIQKVSITFLPRGRGDYAQFWDVECHPLKEPHMKHTLRFQLSGQSIEAENEPENACLSTDSLIKIDHLVKPRRQAVSEASARIPEQLDVTARGVYAPEDVYRFLPTSVGESRTLKVNLRNNSFITHSLKFLSPREPFYVKHSKYSLRAQHYINMPVQFKPKSAGKFEALLVIQTDEGKSIAIRLIGEALGKN

SEQ ID NO: 11147 - DNA, 1336 bp, Homo sapiens
agtagcctttgtcccctgtccctgttccccccaccccttccctaaatctggaccttggcacctgctaggaagagccttggacccttccagttgcgtaaagcaaacctaccccggatctctggcttcagccgccagggggcagtggcagccctggggccctttcccttctggaggaagcacaagcctcagggaaggggaagcaggatgcggagggccaaagcccgggacctctacttgaacagttctactggggaggctggagaactaaggaaacacctgtacatagtgtccgctaccctgactcccgcttagcacacccttaggcaggcgccccttccacctttccccgagaccgtcgtcgctggagggggcagggtccagcccgcctggatcggtggtgtgcacctgatgggatttgggaaatgggctatccgtaaagctttatcttgcttggcttagctgtgagaagtggttctcttcctctggtcccttctggggactctgtttccccatttcttgctgctgtgtccctcaccagttccttgcaggattccctcctttttaaatgcccttgaatctagctttgccttggagaccccagtgggtgctgctcctgccgttttcttcctgccaagcctgaatcaatgtttcatctccaaccctctgccagtttggcccctcagagcttggtggctcaagactgttagcctggcagagccaggggtgaagggagaagctcttggagcaggcaggatgcccaccgctgcttcagctgcctcctcgcccagctaccctttggccccattgggccctcgtctgcctctccaggattgtatgtttcaagccttgtcctgtgttcctttgtctgacgctctgtgtattgctctttgaatcgagtttggaggaagagttgagttgtatgagtggcggcatgttggtagtgccggacttcctgtttcaagttttctggggcctcgctaattgaatgtggaaagtagcaccacttgacggctacaagtgccgactcctgaattttcccatggtgttctgacttcaagggctggcagccagggagaatgggcccaggggaagcaaagacctcttccctctgccgtttctgtcccacttaactgacctcactggaggctacatcacccaaagtagatgttagaaaacctaaattaatgaaccatatttttaaaatcctatttttcccaaacagggccctctgcagcccatcctttccttccgtccttctgaaaccacataccccaggcccaagcgccttgctgccacgcccaacctctttgggagaagtatgaatgcgtgtatctat

SEQ ID NO: 11148 - DNA, 1259 bp, Homo sapiens
  CDS (316)..(1071)
tttacgcccccaggatctggggcgtgcaaatttatcggctcacttcattcgtacagtttctcctctaagcacacccgagaaaggccatctgtcccccgagagcccattgaccgcaagaggccgaagaaagatgtggaaccaagctgcagtgggagcagcctgggacccgacaagggcctggcccagagccctcccagctcatcacttaccgcgacaccgcagaagccttcccagagcccctctgcccctcctgccgacgtcaccccaaagccagccacggaagccgtgcagagcgagcacagcgacgccagccccatgtccatcaacgaggtcatcctgtcggcgtcaggggcctgcaagctcatcgactcactgcactcctactgcttctcctcccggcagaacaagagccaggtgtgctgcctgcgggagcaggtggagaagaagaacggcgagctgaagagcctgcggcagagggtcagccgctccgacagccaggtgcggaagctacaggagaagctggatgagctgaggagagtgagcgtcccctatccaagtagcctgctgtcgcccagccgcgagccccccaagatgaacccagtggtggagccactgtcctggatgctgggcacctggctgtcggacccacctggagccgggacctaccccacactgcagcccttccagtacctggaggaggttcacatctcccacgtgggccagcccatgctgaacttctcgttcaactccttccacccggacacgcgcaagccgatgcacagagagtgtggcttcattcgcctcaagcccgacaccaacaaggtggcctttgtcagcgcccagaacacaggcgtggtggaagtggaggagggcgaggtgaacgggcaggagctgtgcatcgcatcccactccatcgccaggatctccttcgccaaggagccccacgtagagcagatcacccggaagttcaggctgaattctgaaggcaaacttgagcagacggtctccatggcaaccacgacacagccaatgactcagcatcttcacgtcacctacaagaaggtgaccccgtaaacctagagcttctggagccctcgggagggcctggctactgtgcctcaacggttcggctcctcaacagacagtccctgcggcagaagtgggtgtggccgtgagcctctgcaggctcaagagtgttgtccagatgtttctgtactggcatagaaaaaccaaataaaaggcctttatttttatggctg

SEQ ID NO: 11149 - protein, 252 aa, Homo sapiens
MSINEVILSASGACKLIDSLHSYCFSSRQNKSQVCCLREQVEKKNGELKSLRQRVSRSDSQVRKLQEKLDELRRVSVPYPSSLLSPSREPPKMNPVVEPLSWMLGTWLSDPPGAGTYPTLQPFQYLEEVHISHVGQPMLNFSFNSFHPDTRKPMHRECGFIRLKPDTNKVAFVSAQNTGVVEVEEGEVNGQELCIASHSIARISFAKEPHVEQITRKFRLNSEGKLEQTVSMATTTQPMTQHLHVTYKKVTP

SEQ ID NO: 11150 - DNA, 1350 bp, Homo sapiens
  CDS (66)..(899)
ttcatgattatagtgcagcagctgccccgagccccgtgcttggcaacattccccccaacgatgggatgccgggaggccccatcccgccaggtttctttcagggtcctccggggtcacagccctcgccgcacgcacagcctccacctcacaatcctagcagcatgatgggaccccacagtcagccttttatgtcaccgcgatacgcaggcggccccaggcccccgatcagaatgggaaaccagcctccgggaggagttcctgggacacagccattgctgcccaattctatggatcccacacgacaacaaggccaccccaacatgggaggatcaatgcagagaatgaaccctccccgaggcatggggcccatgggtcccggcccacagaattacggcagcggcatgagaccaccacccaactccctcggccccgccatgcccgggattaacatgggcccgggagctggcagaccctggcccaatcctaacagtgctaactcaattccatactcctcctcatcacctggtacctatgtgggaccccctggtggtggcggtcctccaggaacacccattatgcccagtcccgcagattcaacaaattccagtgacaacatctacacaatgattaatccagtgccgcctggaggcagccggtccaacttcccgatgggtcccggctcggacggtccgatgggcggcatgggtggcatggagccacaccacatgaatggatcattagggtcaggcgacatagacggacttccaaaaaattctcctaacaacataagtggcattagcaatcctccaggcacccctcgagatgacggcgagctaggagggaacttcctccactcctttcagaacgacaattattctccaagcatgacgatgagtgtgtgatccccccttctccgagacgctgagagagcaggcattgcaggcgggaagatgccagaaattatgcaagaagtgaggtgtcattatccaggagctggtggggagggcatctccctgctcccctcaaccccctcccaccccatccacgccccctacctttcccaattttagtttcatgcaataaaaaggccaaactttttattccataaaacaagaaggacaaaactctcaaaaatgtatttcaagtcagtgaccagaaaaatcccaccccttgccctttccccaaaggaccttttctgtacatgacacttttttgttgttttttgtttggggttttaccattgttgggatttttttatttgttttcaggggggttttttgggggaaaatttttttaaatggaagcttctagcaagccccccaccccaatcaacctctatgctttcttctt

SEQ ID NO: 11151 - protein, 278 aa, Homo sapiens
MPGGPIPPGFFQGPPGSQPSPHAQPPPHNPSSMMGPHSQPFMSPRYAGGPRPPIRMGNQPPGGVPGTQPLLPNSMDPTRQQGHPNMGGSMQRMNPPRGMGPMGPGPQNYGSGMRPPPNSLGPAMPGINMGPGAGRPWPNPNSANSIPYSSSSPGTYVGPPGGGGPPGTPIMPSPADSTNSSDNIYTMINPVPPGGSRSNFPMGPGSDGPMGGMGGMEPHHMNGSLGSGDIDGLPKNSPNNISGISNPPGTPRDDGELGGNFLHSFQNDNYSPSMTMSV

SEQ ID NO: 11152 - DNA, 1498 bp, Homo sapiens
  CDS (143)..(1399)
gtgtctatgtcaatgtgtctgtccttcactcctccattgtctgccgccactgctgctgctgctgctgctgccgctgctgctgcacgaatcgccgcagcccccagccttgcgcgtcgtcgctacctcctcggacagaaattttatgaataagcatcagaagccagtgctaacaggccagcggttcaaaactcggaaaagggatgaaaaagagaaattcgaacccacagtcttcagggatacacttgtccaggggcttaatgaggctggtgatgaccttgaagctgtagccaaatttctggactctacaggctcaagattagattatcgtcgctatgcagacacactcttcgatatcctggtggctggcagtatgcttgcccctggaggaacgcgcatagatgatggtgacaagaccaagatgaccaaccactgtgtgttttcagcaaatgaagatcatgaaaccatccgaaactatgctcaggtcttcaataaactcatcaggagatataagtatttggagaaggcatttgaagatgaaatgaaaaagcttctcctcttccttaaagccttttccgaaacagagcagacaaagttggcgatgctgtcggggattctgctgggcaatggcaccctgcccgccaccatcctcaccagtctcttcaccgacagcttagtcaaagaaggcattgcggcctcatttgctgtcaagcttttcaaagcatggatggcagaaaaagatgccaactctgttacctcgtctttgagaaaagccaacttagacaagaggctgcttgaactctttccagttaacagacagagtgtggatcattttgctaaatacttcactgacgcaggtcttaaggagctttccgacttcctccgagtccagcagtccctgggcaccaggaaggaactgcagaaggagctccaggagcgtctttctcaggaatgcccgatcaaggaggtggtgctttatgtcaaagaagaaatgaagaggaatgatcttccagaaacagcagtgattggtcttctgtggacatgtataatgaacgctgttgagtggaacaagaaggaagaacttgttgcagagcaggctctgaagcacctgaagcaatatgctcccctgctggccgtgttcagctcccaaggccagtcagagctgatcctcctccagaaggttcaggaatactgctacgacaacatccatttcatgaaagcctttcagaagattgtggttctcttttataaagctgatgttctgagcgaagaagcaatactgaaatggtataaggaagcacatgttgctaaaggcaaaagtgtttttcttgaccagatgaagaaatttgttgagtggttacaaaatgcagaagaagaatccgaatcggaaggtgaggaaaattaaatggctcaacaagcacaatacctaggttaccacacaccactttttgattgggaatgctgaaccatttgagaagagaaacttggcttctgttttcgc

SEQ ID NO: 11153 - protein, 419 aa, Homo sapiens
MNKHQKPVLTGQRFKTRKRDEKEKFEPTVFRDTLVQGLNEAGDDLEAVAKFLDSTGSRLDYRRYADTLFDILVAGSMLAPGGTRIDDGDKTKMTNHCVFSANEDHETIRNYAQVFNKLIRRYKYLEKAFEDEMKKLLLFLKAFSETEQTKLAMLSGILLGNGTLPATILTSLFTDSLVKEGIAASFAVKLFKAWMAEKDANSVTSSLRKANLDKRLLELFPVNRQSVDHFAKYFTDAGLKELSDFLRVQQSLGTRKELQKELQERLSQECPIKEVVLYVKEEMKRNDLPETAVIGLLWTCIMNAVEWNKKEELVAEQALKHLKQYAPLLAVFSSQGQSELILLQKVQEYCYDNIHFMKAFQKIVVLFYKADVLSEEAILKWYKEAHVAKGKSVFLDQMKKFVEWLQNAEEESESEGEEN

SEQ ID NO: 11154 - DNA, 1450 bp, Homo sapiens
  CDS (67)..(900)
tacgtgaagcaccgacacaaactggagaatggtctggctgcgctcagtcccttaagcaagggctccatggaggctggcccttacctgccccgagccctgcagcagcctctggaacagctgactcggtatgggcggctcctggaggagctcctgagggaagctgggcctgagctcagttctgagtgccgggcccttggggctgctgtacagctgctccgggaacaagaggcccgtggcagagacctgctggccgtggaggcggtgcgtggctgtgagatagatctgaaggagcagggacagctcttgcatcgagaccccttcactgtcatctgtggccgaaagaagtgccttcgccatgtctttctcttcgagcatctcctcctgttcagcaagctcaagggccctgaaggggggtcagagatgtttgtttacaagcaggcctttaagactgctgatatggggctgacagaaaacatcggggacagcggactctgctttgagttgtggtttcggcggcggcgtgcacgagaggcatacactctgcaggcaacctcaccagagatcaaactcaagtggacaagttctattgcccagctgctgtggagacaggcagcccacaacaaggagctccgagtgcagcagatggtgtccatgggcattgggaataaacccttcctggacatcaaagcccttggggagcggacgctgagtgccctgctcactggaagagccccagaaacacttgactcttctggagatgtgtccccaggaccaagaaacagccccagcctgcaacccccccaccctgggagcagcactcccaccctggccagtcgagggatcttagggctatcccgacagagtcatgctcgagccctgagtgaccccaccacgcctctgtgacctggagaagatccagaacttgcgtgcagcttctcctctcagcacactttgggctgggatggcagtggggcataatggagccctgggcgatcgctgaatttcttccctctgcttcctggacacagaggaggtctaacgaccagagtattgccctgccaccactatctctagtctccctagcttggtgccttctcctgcaggagtcagagcagccacattgcttgccttcataccctggaggtggggaagttatccctcttccggtgctttcccatcctgggccactgtatccaggacatcactcccatgccagccctccctggcagcccatgttctcctcttttctcaccccctgactttccctgagaagaatcatctctgccaggtcaactggagtccctggtgactccattctgaggtgtcacaagcaatgaagctatgcaaacaataggagggtgtgacaggggaaccgtagactttatatatgtaattactgttattataatactattgttatattaaatgtatttactcacactttgcctct

SEQ ID NO: 11155 - protein, 278 aa, Homo sapiens
MEAGPYLPRALQQPLEQLTRYGRLLEELLREAGPELSSECRALGAAVQLLREQEARGRDLLAVEAVRGCEIDLKEQGQLLHRDPFTVICGRKKCLRHVFLFEHLLLFSKLKGPEGGSEMFVYKQAFKTADMGLTENIGDSGLCFELWFRRRRAREAYTLQATSPEIKLKWTSSIAQLLWRQAAHNKELRVQQMVSMGIGNKPFLDIKALGERTLSALLTGRAPETLDSSGDVSPGPRNSPSLQPPHPGSSTPTLASRGILGLSRQSHARALSDPTTPL

SEQ ID NO: 11156 - DNA, 1120 bp, Homo sapiens
  CDS (9)..(1118)
ctgactttatgtcttttacctcacacattgatgagttatatgaaagtgctaaaaagcagtctggaggaaaggttgcagattatattcctcaactggccaaattcagtcccgatttgtggggtgtgtctgtttgtacagtagatggacagagacattctactggagataccaaagttcccttctgtcttcagtcctgtgtaaaacctttgaaatatgccattgctgttaatgatcttggaactgaatatgtgcatcgatatgttggaaaagagccgagtggactaagattcaacaaactatttttgaatgaagatgataaaccacataatcctatggtaaatgctggagcaattgttgtgacttcactaataaagcaaggagtaaataatgctgaaaaatttgactatgtcatgcagtttttgaataagatggctggtaatgaatatgttggattcagtaatgcaacgtttcagtctgaaagagaaagtggagatcgaaattttgcaataggatattacttaaaagaaaagaagtgttttccagaaggcacagacatggttggtatattagacttctacttccagctgtgctccattgaagtgacttgtgaatcagccagtgtgatggctgcgacactggctaatggtggtttctgcccaattactggtgaaagagtactgagccctgaagcagttcgaaatacattgagtttgatgcattcctgtggcatgtatgacttctcagggcagtttgctttccatgttggtcttcctgcaaaatctggagttgctgggggcattcttttagttgtccccaatgttatgggtatgatgtgctggtctcctcctctggataagatgggcaacagtgttaagggaattcacttttgtcacgatcttgtttctctgtgtaatttccataactatgataatttgagacactttgcaaaaaaacttgatcctcgaagagaaggtggtgatcaaaggcattcctttggaccattggactatgaaagtctccaacaagaacttgctttaaaagagacagtatggaaaaaagtgtcacctgagtcaaatgaggacatctctacaactgtagtatatagaatggaaagtctggg

SEQ ID NO: 11157 - protein, 370 aa, Homo sapiens
MSFTSHIDELYESAKKQSGGKVADYIPQLAKFSPDLWGVSVCTVDGQRHSTGDTKVPFCLQSCVKPLKYAIAVNDLGTEYVHRYVGKEPSGLRFNKLFLNEDDKPHNPMVNAGAIVVTSLIKQGVNNAEKFDYVMQFLNKMAGNEYVGFSNATFQSERESGDRNFAIGYYLKEKKCFPEGTDMVGILDFYFQLCSIEVTCESASVMAATLANGGFCPITGERVLSPEAVRNTLSLMHSCGMYDFSGQFAFHVGLPAKSGVAGGILLVVPNVMGMMCWSPPLDKMGNSVKGIHFCHDLVSLCNFHNYDNLRHFAKKLDPRREGGDQRHSFGPLDYESLQQELALKETVWKKVSPESNEDISTTVVYRMESL

SEQ ID NO: 11158 - DNA, 1344 bp, Homo sapiens
  CDS (58)..(1104)
ccctatctggaaggcattctctcccaggtgattcatctggagaaaatcactagtgaaatgggttctgcgtcacaggctaatatccgtctcacatctcttaaaaagacactggctaccacacttgcaccccgagtcctgttgcccgccatcaaaaaaacttacaagcagattgagaagaactggaagaatcacatgggtccgtttatgagcatcttgcaagagcatattggggtgatgaagaaggaagagctcacctcccatcagtctcagctaaccgcctttttcctggaggccctggacttccgagcccagcactctgagaacgatctggaggaagttggaaaaacggaaaattgtatcattgactgtctagtagccatggttgtcaaactttccgaggtcacattcaggcccctgttcttcaagctgtttgattgggctaaaacagaagatgccccaaaggacaggttgttgacattttacaacttggcagattgcattgctgaaaagctgaaagggctttttactctgtttgccggccacttagtgaagccttttgctgacaccttgaaccaggtgaacatctccaaaacagatgaagcattttttgactctgaaaatgaccctgaaaagtgctgcttgctgttgcagtttattttgaactgtttatacaaaatcttcctttttgatacccagcattttataagtaaagagagagcagaagccttgatgatgcctctggtggatcagctggaaaacaggcttgggggagaagagaaattccaggaacgggtgacaaagcacctgataccatgcatcgcacagttttcggtggccatggcggatgactctctttggaaaccactgaactaccagattctgctaaagacgagagactcctcgcctaaggttcgatttgctgctttgattactgtgttagcactggctgaaaaactaaaggagaattatattgtcttgctaccagaatccattcctttcttagcagagttgatggaagatgaatgtgaagaagtagaacatcagtgccaaaagactattcagcaactggaaactgtcctgggagagccactccagagctatttctaagactttctgtggtgtttcatactctactcagagttcacactcatatttcatatttttatttttgggtgttgggtgccatgttacttttggtgccttaatacacctacttggattacttacaaatgttttatcacttctttacaaaatccccacctggcttgtgctgccacataagcctctcctgcctatcgtatagagctgcagaaagagtaaatgatacacggtatttttatacag

SEQ ID NO: 11159 - protein, 349 aa, Homo sapiens
MGSASQANIRLTSLKKTLATTLAPRVLLPAIKKTYKQIEKNWKNHMGPFMSILQEHIGVMKKEELTSHQSQLTAFFLEALDFRAQHSENDLEEVGKTENCIIDCLVAMVVKLSEVTFRPLFFKLFDWAKTEDAPKDRLLTFYNLADCIAEKLKGLFTLFAGHLVKPFADTLNQVNISKTDEAFFDSENDPEKCCLLLQFILNCLYKIFLFDTQHFISKERAEALMMPLVDQLENRLGGEEKFQERVTKHLIPCIAQFSVAMADDSLWKPLNYQILLKTRDSSPKVRFAALITVLALAEKLKENYIVLLPESIPFLAELMEDECEEVEHQCQKTIQQLETVLGEPLQSYF

SEQ ID NO: 11160 - DNA, 1202 bp, Homo sapiens
  CDS (89)..(970)
gaattacactattgtactggagcttatcggatttcacctgtagatgtaaatagtagaccttcctcctgccttactaattttcttctaaatggtcgttctgttttattggaacaaccacgaaagtcaggttctaaagtcattagtcatatgcttagtagccatggaggagagattttttttgcacgtccttagcagttctcgatccattctagaagatccaccttcaattagtgaaggatgtggaggaagagttacagactaccggattacagtagttccattagccagtgttattgtgaaagaatctctgacagaagaagatgtgttaaactgtcaaaaaacaatatacaacttagttgatatggaaagaaaaaatgatcctctacctatttccacagttggtacaagaggaaagggccctaaaagagatgaacaataccgtatcatgtggaatgaattagaaacccttgtcagagcccatatcaacaactcagagaaacatcaaagagtcttggaatgtctgatggcatgcaggagcaaacccccagaagaggaagaacgaaagaaacgaggaagaaagagggaagacaaagaggacaagtcagagaaagcagtgaaagattatgaacaggaaaagtcttggcaagactcagagagattaaaaggaatcttagagcgtggaaaagaagaattggctgaagctgagattataaaagattcgcctgattccccagaacctccaaacaaaaaaccccttgttgaaatggatgaaactccacaagtggaaaaatcaaaagggccagtgtcgttattatccttgtggagtaatagaatcaatactgccaattccagaaaacatcaggaatttgctggacgtttgaactctgttaataacagagctgaactatatcaacatcttaaagaggaaaatgggatggagacaacagaaaatggaaaagccagccggcagtgaagagtgacttgaagaactaaatttagcatattgcaaaaatattttgtgcggaattcgatataagtacttttacagcaagatggtatagttatgttgcctggactggtttttacatttttaaaatatttcagctgtcatttttgtactaattataaaattggcacataattcaaaaatatacatttgagatgatttgtcctcccaaattatacaagtttattttatggtg

SEQ ID NO: 11161 - protein, 294 aa, Homo sapiens
MVVLFYWNNHESQVLKSLVICLVAMEERFFLHVLSSSRSILEDPPSISEGCGGRVTDYRITVVPLASVIVKESLTEEDVLNCQKTIYNLVDMERKNDPLPISTVGTRGKGPKRDEQYRIMWNELETLVRAHINNSEKHQRVLECLMACRSKPPEEEERKKRGRKREDKEDKSEKAVKDYEQEKSWQDSERLKGILERGKEELAEAEIIKDSPDSPEPPNKKPLVEMDETPQVEKSKGPVSLLSLWSNRINTANSRKHQEFAGRLNSVNNRAELYQHLKEENGMETTENGKASRQ

SEQ ID NO: 11162 - DNA, 1169 bp, Homo sapiens
  CDS (28)..(945)
agattgctccaattgtgtcagcgaactatggctcttcctgtaggacgaggaatgtttaccttgttttcgtaccatcctgttccaacagagccattgcctattcctaaattgaatctgactgggcgtgcccctcctcggaacacaacagtagaccttaatagtggaaacatcgatgtgcctcccaatatgacaagctgggccagctttcataatggtgtggctgctggcctgaagatagctcctgcctcccagatcgactcagcttggattgtttacaataagcccaagcatgctgagttggccaatgagtatgctggctttctcatggctctgggtttgaatgggcaccttaccaagctggcgactctcaatatccatgactacttgaccaagggccatgaaatgacaagcattggactgctacttggtgtttctgctgcaaaactaggcaccatggatatgtctattactcggcttcttagcattcgcattcctgctctcttacccccaacgtccacagagctggatgttcctcacaatgtccaagtggctgcagtggttggcattggccttgtatatcaagggacagctcacagacatactgcagaagtcctgttggctgagataggacggcctcctggtcctgaaatggaatactgcactgacagagagtcatactccttagctgctggcttggccctgggcatggtctgcttggggcatggcagcaatttgataggtatgtctgatctcaatgtgcctgagcagctctatcagtacatggttggaggacataggcgctttcaaacaggaatgcatagggagaaacataaatcaccaagttatcaaatcaaagaaggagataccataaatgtggatgtgacttgtccaggtgctactctagctttggctatgatctacttaaaaaccaataacagtgtcttctaggaagcccagacacatggagaagttctgagtgttttggccgatagtcccagatgaggttccagcaacagctgggatcacccatgagatgtgagtgaggaaggctttgagatggtttcagccctagccaccactgacctcataagagaccacaagaatgagaatcacctggccaagcctagcagaccttcagaattcagaaataaaataattcatcttatttt

SEQ ID NO: 11163 - protein, 306 aa, Homo sapiens [sequence omitted]

SEQ ID NO: 11164 - DNA, 1456 bp, Homo sapiens
acctactgaagtggaggaggtggtccccgcactggaacccacagaaacgctgctgagtgagaaggagataaacgcaagggaagagagccttgtggaagagctgtcccctgccagcgagaagaagcccgtgccgccgtctgagggcaagtctagactgtcccccgccggtgagatgaagcccatgccgctgtctgagggcaagtctatactgctgtttggaggggctgctgctgttgccatcctggcagtggccatcggggtagccctggctctgagaaagaaataggaggcttttcagaagagaaagacagaaggatgtaaggttggagttgtattggctggaatttgaacctccagcagctgtctggacatttgtggaacactctgggataattggggacttctgctcaacatggcagtggcatgttaggcatgttagggcttgaggtggggcattcacattcatctgactgtaaatcccaagggcctccgctcatgctaaattgagaatcttaggggtaaagcaccccctccaggaccgggttgctcagccttggcactagtgctgttctgaccattctctgtgttggggctgtcctgtgtatggtgggctccacccactagatgccagtggcaccccctcccagagatgacaaacgaaaatgtctctagacattgccaaatgtcccctgtgaacatcccctattgagacccactgctttagcgagagagggtttacttaggaagaattgggatagaaattcccagctgagagaacttagctgtggctcctcagctactgacttcttagctcttaatccccttagaatttcatctttctcgatgagcaggctctgcacccactttttttttgccccctgcccctcatcctggagtgtgagggtgctcgcccgtactctcagctgcctctcagggactgcactgttcctcttcacccccaggttcctgctaagatcccacgggcgagggcttgctctggactcagacctgtcaagtccccgaagcttcctgcagctccaccttgtaaaaatgctgcctttgggaatcttcgaaatatgtacacagagaaaatcacatgaaggagacctggggtccccacttgtgagtgcaactgcaagtaactctggctagagagacacatgtgtcttgtgtcaaggcaggaggataacctggatgaccttctgaggtctcttcagcccttttcgctagtggtcacccaccaccatggttacttgccagcaacatctctattgctggatggtccctgtctataaccttgggctagtatattttttccaatatgggaccttagtcttactactgatgagttctatgggtctcttgctagggggtaaggatttttattcttgggcttatagagccagttagatcataattcttatgaaatagagagtgtcctaaatatcactgaaat

SEQ ID NO: 11165 - DNA, 1695 bp, Homo sapiens
  CDS (88)..(558)
acaaacttatatatatactccaaaaagtcttcaacaagcagacgacagcaccctcttaataagcatctctttaagccttccactttcatgacttcacatgaaccgccagtgtatatggatgaagatgatgaccgatcttgttttcatagccacatgaacactgctgttgaagatgcatcagatgacgaaagtattcctatcatgtataggaatttacctgaatataaagaactattacagtttaaaaagttaaagaagcagaaacttcagcaaatgcaagctgaaagtggatttgtgcaacatgtgggctttaagtgtgataactgtggcatagaacccatccagggtgttcggtggcattgccaggattgtcctccagaaatgtctttggatttctgtgattcttgttcagactgtctacatgaaacagatattcacaaggaagatcaccaattagaacctatttataggtcagagacattcttagacagagactactgtgtgtctcagggcaccagttacaattaccttgacccaaactactttccagcaaacagatgacatggaagagaacatcatttactagtcctcttcaacacgtagcaatggtatcattgttaattatgtgcacagtttggaaagattctctgctttcccagaaatgacactcacagcatgagagcttcctgagtgttctcgtcaagtacagctctgcaccgttgtggctctagatcactgttcagcagctgaacattcctggtgagcaaaggtttccctggtgaatttttcaccactgcgttttaggtggtgatcttaaatgggtgagatggaacgagagcacacattaaagagagagtaaattccaaaggtttcaaagaacttggtcataaatatgataatgagaagacaaagtatttatattaaaacagtttagtagccttcagttttgtgaaaatagttttcagcacagaaactgacttctttagacaaagttttaaccaatgatggtgtttgcttctaggatatacactttaaaagaactcactgtcccagtggtggtcattgatggcctttagtaaattggagctgcttaatcatattgatatctaatttcttttaaccacaatgaattgtccttaattaccaacagtgaagcactacaggaggcaactgtggcattgcttccttaaccagctcatggtgtgtgaatgttataaaattgtcactcagatatattttttaaatgtaatgttatataagatgatcatgtgatgtgtacaaactatggtgaaaagtgccagtggtagtaactgtgtaaagtttctaattcacaacattaattcctttaaaatacacagccttctgcctctgtatttggagttgtcagtacaactcatcaaagaaaactgcctaatataaaaatcatatatatggtaataatttccctcttttgtagtctgcacaagatccataaaagattgtatttttattactatttaaacaagtgattaaatttagtctgcacagtgagcaagggttcacatgcattcttttatactgctggattttgttgtgcatcatttaaaacattttgtatgtttcttcttatctgtgtatacagtatgttcttgaatgatgttcatttgtcaggagaactgtgagaaataaactatgtggatactgtctgtttatatt

SEQ ID NO: 11166 - protein, 157 aa, Homo sapiens [sequence omitted]

SEQ ID NO: 11167 - DNA, 1387 bp, Homo sapiens
aggctcagatgtcacagggtttctattgcctgggctggagtgtagtggcatgatcatggctcactatagccttgacttcctgggctcaagcgatccttccgcctcagcctcctgagtagctgggactacagagacggggtttcgctcttgtgaccaggctggaatgcaatggcgtgatctcggctcaccgcaacctccgacctctgggttcaagtgattctcctgcctccgcccatttcatcttattgtctcctttactgtgcaggagcttggatgtagtcccatttatttattttgagcttttgatatgatatccaaaaaaatcattgccaaggccagtgtccaggagcttttcccctgggctgtaagagttttatagtttctatttttatatttaggtcttttatccattttgagttgattttttgtgtgtaatagaagatatgggtccagtttcattcttttgcatgtggaaatctagtttattagcaccatttattgaagggattatcttttctccattgtgtcttcttggtaccctcatcaaaaattagttgacccatatgtgtttggatttgtttctggggtctctattctgtttcactggtctatgtgtctgtttgtatgccagtatcatactgttttgattactatagctttgtaatataatttcaaatcaggaagtgtgatgcccccaactttcttttcttcttcagcattgttttggttactcagggtcttttatggttactcagggtcttttatggttccacatgaattttaggattgtttcttcttttgctgtgaagaatgacattggggttttgataaggattgttgagtttctcatctttactttttttcttaaataaaactaagttagataaggtgctttgtggatagtgagtccgcttcattgctgtgctggtgaacacccttggtcagttggtgaggaggcccccaccagggtgggccaggaagagactggtgagggtgagcactgtgctttagcaagagcaaaggtccatggggtgactcgggatgagaaatgaggagcagggggcattgctgcttccttcccctctcccctccctgcatgtcccctccccctgccacatcccccaccccagcttgtcacaccccattactgcagactctagtctgctggtcttgccagagaatcctccgcaatagaggcatggggcaggggctgtattgcggaaagagagcaaacctctgcccttctctgagcctcagtgtcatctgtaaaatgatgacagggaaccaaatgatctcagagtatctggttggtgtcttgtctccctcagaaatgttgcatttagagcagtgcacacagtagacacttaataaatgccattgaccatct

SEQ ID NO: 11168 - DNA, 1465 bp, Homo sapiens
  CDS (259)..(792)
cacgaaatacgagaggcaatccagcatccagcagatgagaagttgcaagagaaggcatggggtgcagttgttccactagtaggcaaattaaagaaattttacgaattttctcagaggttagaagcagcattaagaggtcttctgggagccttaacaagtaccccatattctcccacccagcatctagagcgagagcaggctcttgctaaacagtttgcagaaattcttcatttcacactccggtttgatgaactcaagatgacaaatcctgccatacagaatgatttcagctattatagaagaacattgagtcgtatgaggattaacaatgtaccggcagaaggagaaaatgaagtaaataatgaattggcaaatcgaatgtctttgttttatgctgaggcaactccaatgctgaaaaccttgagtgatgccacaacaaaatttgtatcagagaataaaaatttaccaatagaaaataccacagattgtttaagcacaatggctagtgtatgcagagtcatgctggaaacaccggaatacagaagcagatttacaaatgaagagacagtgtcattctgcttgagggtaatggtgggtgtcataatactctatgaccacgtacatccagtgggagcatttgctaaaacttccaaaattgatatgaaaggttgtatcaaagttcttaaggaccaacctcctaatagtgtggaaggtcttctaaatgctctcaggtacacaacaaaacatttgaatgatgagactacctccaagcaaattaaatccatgctgcaataacaattctggaataagcacctgctgtagacagaagacagtattctgcaatgactgagaatgcagttttttagtgattgcaattactatctcatttattcttgcttttatttctttcctctgttcctcttccctcttttttaatcatgttcttaagacttcttttctgtgccaaaatcagtaaagttacactctgaagggatatcatcctttcaaacgggccatctaaggcagctaattatgcattgcattggggtctctactgagaaaaattctgtgacttgaactaaatatttttaaatgtggattttttttgaaactaatatttaatattgcttctcctgcatggcaaaactgcctattctgctatttaaaaaccctcaatgactttattttctactgccgcctttttcatgtgcaaccaaaatgaaaatgtttaaattaactgtgttgtacaaatggtacccaacacaaactttttttaaattagtaatacttttgtttaaagttttaagtttgcattttgactttttttgtaaggatgtatgttgtgtgtttaacctttattaactaacgttaaaagctgtgatgtgtgcgtagaatattacgtatgcatgttcatgtctaaagaatggctgttgatgataaaataaaaatcagctttcatttttct

SEQ ID NO: 11169 - protein, 178 aa, Homo sapiens
MTNPAIQNDFSYYRRTLSRMRINNVPAEGENEVNNELANRMSLFYAEATPMLKTLSDATTKFVSENKNLPIENTTDCLSTMASVCRVMLETPEYRSRFTNEETVSFCLRVMVGVIILYDHVHPVGAFAKTSKIDMKGCIKVLKDQPPNSVEGLLNALRYTTKHLNDETTSKQIKSMLQ

SEQ ID NO: 11170 - DNA, 1538 bp, Homo sapiens
  CDS (39)..(866)
aaaaaaatctgatcccagccacaccaggagctgaagccatggcctcaaagcctgagaagagggtggcatcgtctgtctttatcaccctggcacccccgcgccgcgatgtggccgtggcggaggaagtgaggcaggcagtttgtgaggcccggcgtggccgcccctgggaggctcctgcccccatgaagacacccgaggctggcttggcggggaggcccagcccctggacaacccctggcagagctgcagccacagtgccggctgcacctatgcagctcttcaatggagacatctgtgccttctgccacaagaccgtgttcccccgagagctggctgtggaggccatgaagaggcagtaccatgcccagtgcttcacgtgccgcacctgccgccgccagctggctgggcagagcttctaccagaaggatgggcgacccctctgcgaaccctgctaccaggacacactggagaggtgcggcaagtgtggcgaggtggtccgggaccacatcatcagggccctgggccaggccttccacccctcctgcttcacgtgtgtgacctgcgcccggtgcattggggatgagagctttgccctgggcagccagaacgaggtgtactgcctggacgacttctacaggaaattcgcccccgtctgcagcatctgtgaaaatcccatcatccctcgggatgggaaagatgccttcaaaatcgaatgcatgggaagaaacttccatgaaaattgctacaggtgtgaggactgcaggatcctcctgtctgtcgagcccacggaccaaggctgctaccccctgaacaaccatctcttctgcaagccatgccatgtgaagcggagtgctgcggggtgctgctgagagtgcccgctgggcagtgaacagaccactagccccggctggggcccttccctgacttggtttcccttcctaacctgctcttgcacactttccttctgagcctccatggagaccagcctgcaagccggcccagcctgtccaggatacagtggggctgagcacccccaggccttccactcctctaccctctgggcaccagaaggctcctggaccatgagcttcacccccagaattccctgctgaccctgccccacttccagggaaaagctgggggaggttggacccctctcactgactagctgtctggtaggggtgctaggaccagcctcgcctgtggggttgagctgtttgaggacaaactccaaggtcccttaaaaagtgccttttagaggctgggcatggtggctcacgcttgtaatcccagcactttgggaggccaaggtgggtggatcacctgaggtcaggagttcaagaccagcctggccaacatggtgaaaccctgtctctactaaaaatacaaaaattagccaggcatggtagcaggtgcctgtaatcccagctaccggggaaagctgaggcaggagaattgcttcaatctggaaggcagaggttgcagtgagattgcaccattgcattccagcctgggcaacaagagggaaactccgtctt

SEQ ID NO: 11171 - protein, 276 aa, Homo sapiens [sequence omitted]

SEQ ID NO: 11172 - DNA, 1518 bp, Homo sapiens
  CDS (8)..(1432)
gtatgctatggatgcctttgtaggacctatttggagcatggctgccagccccagtggctctcaacttttggttggttgtgaagatggatctgtgaaactatttcaaattaccccagacaaaatccagtttgaaagaaattttgatcggcagaaaagtcgcatcctgagtctcagctggcatccctctggtacccacattgcagctggttccatagactacattagtgtgtttgatgtcaaatcaggcagcgctgttcataagatgattgtggacaggcagtatatgggcgtgtctaagcggaagtgcatcgtgtggggtgtcgccttcttgtccgatggcactatcataagtgtggactctgctgggaaggtgcagttctgggactcagccactgggacgcttgtgaagagccatctcatcgctaatgctgacgtgcagtccattgctgtagctgaccaagaagacagtttcgtggtgggcacagccgagggaacagtcttccattttcagctggtccctgtgacatctaacagcagtgagaagcagtgggtgcggacaaaaccgttccagcatcacactcatgacgtgcgcactgtggcccacagcccaacagcgctgatatctggaggcactgacacccacttagtctttcgtcctctcatggagaaggtggaagtaaagaattacgatgccgctctccgaaaaatcacctttccccaccgatgtctcatctcctgttctaaaaagaggcagcttctcctcttccagtttgctcatcacttagaactttggcgactgggatccacagttgcaacaggaacagtggaggccatgtgtcttttggcagtcagtccagatgggaattggctagctgcatcaggtaccagtgctggagtccatgtctacaacgtaaaacagctaaagcttcactgcacggtgcctgcttacaatttcccagtgactgctatggctattgcccccaataccaacaaccttgtcatcgctcattcggaccagcaggtatttgagtacagcatcccagacaaacagtatacagattggagccggactgtccagaagcagggctttcaccacctttggctccaaagggatactcctatcacacacatcagttttcatcccaagagaccgatgcacatccttctccatgatgcctacatgttctgcatcattgacaagtcattgccccttccaaatgacaaaaccttactctacaatccatttcctcccacgaatgaatcagatgtcatccggaggcgcacagctcatgcttttaaaatttctaagatatataagcctctactcttcatggatcttttggatgaaagaacactcgtggcagtagaacggcctctggatgacatcattgctcagctcccaccacccattaaaaagaagaaatttggaacctaaaacagggcactgtctgtgtccttccttgaactgtctaccctgttgcttttcacaaatcatggtaataaaacaagttattcttg

SEQ ID NO: 11173 - protein, 475 aa, Homo sapiens [sequence omitted]

SEQ ID NO: 11174 - DNA, 1553 bp, Homo sapiens
  CDS (66)..(1292)
gtccatggggaagctgccattttcttgaaaaagccagaattgcacagaaaggaggtgctgaagcaatgttagttgtcaataacagtgtcctatttcctccctcaggtgacagatctgaatttcctgatgtgaaaatactgattgcatttataagctacaaagactttagagatatgaaccagactctaggagataacattactgtgaaaatgtattctccatcgtggcctaactttgattatactatggtggttatttttgtaattgcggtgttcactgtggcattaggtggatactggagtggactagttgaattggaaaacttgaaagcagtgacaactgaagatagagaaatgaggaaaaagaaggaagaatatttaacttttagtcctcttacagttgtaatatttgtggtcatctgctgtgttatgatggtcttactttatttcttctacaaatggttggtttatgttatgatagcaattttctgcatagcatcagcaatgagtctgtacaactgtcttgctgcactaattcataagataccatatggacaatgcacgattgcatgtcgtggcaaaaacatggaagtgagacttatttttctctccggactgtgcatagcagtagctgttgtttgggctgtgtttcgaaatgaagacaggtgggcttggattttacaggatatcttggggattgctttctgtctgaatttaattaaaacactgaagttgcccaacttcaagtcatgtgtgatacttctaggccttctcctcctctatgatgtattttttgttttcataacaccattcatcacaaagaatggtgagagtatcatggttgaactcgcagctggaccttttggaaataatgaaaagttgccagtagtcatcagagtaccaaaactgatctatttctcagtaatgagtgtgtgcctcatgcctgtttcaatattgggttttggagacattattgtaccaggcctgctgattgcatactgtagaagatttgatgttcagactggttcttcttacatatactatgtttcgtctacagttgcctatgctattggcatgatacttacatttgttgttctggtgctgatgaaaaaggggcaacctgctctcctctatttagtaccttgcacacttattactgcctcagttgttgcctggagacgtaaggaaatgaaaaagttctggaaaggtaacagctatcagatgatggaccatttggattgtgcaacaaatgaagaaaaccctgagatatctggtgaacagattgtccagcaataatattatgtggaactgctataatgtgtcattgattttctacaaatagacttcgactttttaaattgacttttgaattgacaatctgaaagagtcttcaatgatatgcttgcaaaaatatatttttatgagctggtactgacagttacatcataaataactaaaacgctttgcttttaatgttaaagttgtgccttcacattaaataaaacatatggtctgtgtagtttccgagatgtactatatacagtatatttttct

SEQ ID NO: 11175 - protein, 409 aa, Homo sapiens
MLVVNNSVLFPPSGDRSEFPDVKILIAFISYKDFRDMNQTLGDNITVKMYSPSWPNFDYTMVVIFVIAVFTVALGGYWSGLVELENLKAVTTEDREMRKKKEEYLTFSPLTVVIFVVICCVMMVLLYFFYKWLVYVMIAIFCIASAMSLYNCLAALIHKIPYGQCTIACRGKNMEVRLIFLSGLCIAVAVVWAVFRNEDRWAWILQDILGIAFCLNLIKTLKLPNFKSCVILLGLLLLYDVFFVFITPFITKNGESIMVELAAGPFGNNEKLPVVIRVPKLIYFSVMSVCLMPVSILGFGDIIVPGLLIAYCRRFDVQTGSSYIYYVSSTVAYAIGMILTFVVLVLMKKGQPALLYLVPCTLITASVVAWRRKEMKKFWKGNSYQMMDHLDCATNEENPEISGEQIVQQ

SEQ ID NO: 11176 - DNA, 2271 bp, Homo sapiens
  CDS (34)..(1122)
cgcacagacctggtcagccccaagcacgcgctcatggtgttccgagtggccaaagtctttgcccagcccaacctggctgagatgattcagaaaggtgagcagctattcctggagccagagctggtcatcccccaccgccagcaccgactcttcacggcccccacattcactgggagcttcctgtcaccctggccaccagcggtcactgatgcctccttcaaggtgaagagccacgtctacagcctggagggccaggaccgcaagtacaccccgatgtttgggcccgaggcccgcaccctggtcctgcgcctcgctcagctcatcacacaggccaaacacacagccaagtccatctccgaccagtgtgcggagagcccggctggccactccttcctctcatggctgggctttagctccatggacaccaatggctcctacacagccaacgacctggacgagatggggcaagacagtgtccggaagacagatgaatacctggagaaggccctggagtacctgcgccagatattccggctcagcgaagcgcagctcaggcagttcacactcgccttgggcaccacccaggatgagaatggaaaaaagcaactccccgactgcatcgtgggtgaggacggactcatccttacgcccctggggcggtaccagatcatcaatgggctgcgaaggtttgaaattgagtaccagggggacccggagcagcagcccatccggagctatgagatcgccagcttggtccgcacactctttaggctgtcgtctgccatcaaccacagatttgcaggacagatggcggctctgtgttcccgggatgacttcctcggcagcttctgtcgctaccacctcacagaacctgggctggccagcaggcacctgctgagccctgtggggcggaggcaggtggccggccacacccgcggccccaggctcagcctgcgcttcctgggcagttaccggacgctggtctcgctgctgctggccttcttcgtggcctctctgttctgcgtcgggcccctcccatgcacgctgctgctcaccctgggctatgtcctctacgcctctgccatgacactgctgaccgagcgggggaagctgcaccagccctgaaggtgtcagctgccttcagagcaggctggagggatttgccacacagccccacccttgggctgagaggacctgggaagcccctccaggagggaacacggtcatcctcgggcttctggagcggggttcctgcagccgcagaggcatctggaggaaacgcaaccaagaaaggaaggcaggtgggccccagcaaaggagtagctgccagggctcaacagctacgctctgtgacagcgcagagctcagcgccggcctttccctccctccgccaaggactcacggccaagccagctctcggggccttttttccagtgcccatttggctactctgctgcaccaagcttgggagccagcctgccaacagccacctgggcctggcctccccactggctggccttgaggttggcagagtgggttgtggcgcttcctctctctgtgtgggaccaggacagtggcttaagtctccactccaggaaagaatcaaagtttctagagttgtgagaaaaccagagagtggctgtcctgattcttcactgtgaggggcgttcttcatgttctcccagctgttccaagactgggccgtagaattccatgtttcaggagcctaagaccctcccagagcccaggggcttcaccgcagaccccaagccattgagcacatcacccaaagcagtggccaacatcgcggacccctgtgccttgtcacagatgggtgctggtcctcaggcgttggggacactgctgggtcgatggggtcggattctgccagtttctgctctgcagtcaaagatggtcagaagcattgtcacttcagtaacatcaagtgctcaaagacatggcaaccgttcagtggtacttaagtattcaaaatatacaactacagattctctgacagaaaccagcacggggtcttcaccttcattcaccccacaggcgacatgcgagggagaacagcatctcagtggtgatttccaaaccaagcctttgttttcggtgtggggttttgggggtttgctttaatgtttttgaaattgtaaatgttgggctttttattttgatgtaaactgagaataatggcattttagggcctgtgaccaaaaatgaagcttgtaacgaccatggatctgaataaacatgtccttgcttctg

SEQ ID NO: 11177 - protein, 363 aa, Homo sapiens [sequence omitted]

SEQ ID NO: 11178 - DNA, 1844 bp, Homo sapiens
tccttatgtggcagctttggccattgtgtcttgaaattctccctcaggaaatgtgataggggatattatcccatgggattttagtaaaaatcagcttgcctaatttcatattcgtgttcataatgaagaaatgcgaagtggtggtagtcctcaggattaagtgtaaaggaaaatatgcaaggaaaaagtagcagtgtcagcccttttggactgcttatgatttctgccttagagctacaagacttggaacaagaaataacaatacctcaagaaaatgtctggagagatagcaccactgtccctcaaagacttcagccactgcacattaccaattcagctgtgaagcatttacaactgtattatctgtgattgtctgcatttcctgtttacatgcatgtgctggggatatgctttagtgtgtatggactagagtttaaatcctgtctttaactgggctgcaaggatggctatcaatcccaaattctgttttcaactcactggaataattaatctggtgttcctgatataaaacaggtgggttctattcacatgatggctgctctttaccatatatttcacctgaccctcattttgccatgggcctcaacctttatgtgtgctttttatggctctgaaaggactggctcccgtgtgtggaatatacaaggtataaacaccacccctcacatacccctgtaacttaaatgcttccatttaactcacttagattactttccccttagtggtaaacgggttgggggatgggtggtagtgcaaagaaggtagtttgaaatattgccatagtaatatgggaactttttattccaaccctttaccctggcttttttttctctcaatatttgcctaaaattctaaaatgagttatagtaaaatcataaaactatggaaacaactgaactttggtacacaagttagttcgatgacatcttgttatttgagaacagtaaaaggtgtgtcattgcctcatgatttatcatagtcattactaagggtttcagagagaatctggtgtgaagcactatcctttcagacactaaggcctttacctagttgctcccctaccttctgtcggaataggattattcccatgcacctctgggtaggtataggtagtagctattgaacggggattattttccccatggcacaaggggaaacactcttggataaccttcaacaatgaggctttgctaagtggccagacttgggatttgatcttcctcacttgttatttattaagtttaagccttattcagtatctctaattgcaatagatatagttcctgtgacttctaaaaaaaattcctgttaatgctgagacagtatcttttttgtcagtttattaatttttggtcaagatttagcctgagtcttaaagcatttatttgtggaatgccccactgaagtgtcttctccattggctaagtacatgtttaaagccatgggttttaatgtaagatactttcagtatctaattctgtttcccccactgagggtgctaaagagaattagaatctttactaagacatgctcaggaaagcttcacgagagaacagcttcaaaatcctccctatgacactgaatggtagtgaggaaagaattcttggggatgccagttacatacaatagccttattactgctaatcactgtcaataaaaggtcacttcattcacctctatttgaggaaaacaatgagaatgtatctgatgaactagaatccttgtcagtattgggaaattttaatgttgcaatatctagtcaaactttgagtgtactggttctgtgaaccacctgaaaaaacaaattaaatgtattaaaccat

SEQ ID NO: 11179 - DNA, 1621 bp, Homo sapiens
  CDS (148)..(1164)
cggcagcggaactatgctggccgctgggatgtcctgatccagcaggccacccagtgcctcaaccgcctcatccagattgctgcccgcaagaaacgcaactatatcctagatcagacaaatgtttatgggtcagcccagagacgaaaaatgagaccatttgaaggcttccagcgcaaagctattgtaatttgtcccactgacgaggacctaaaagaccgaacaataaagcgaaccgacgaggaagggaaggatgtcccagatcatgcggtcttagaaatgaaagccaacttcacgttgccagatgttggggacttcctggatgaggttctgttcattgagctgcagcgggaggaagcggacaagctagtgaggcagtacaacgaggaaggccgcaaggctgggccaccccctgaaaagcgctttgacaaccgaggtggtggtggcttccggggccgcgggggtggtggtggcttccagcgctatgaaaaccgaggaccccctggaggcaaccgtggcggcttccagaaccgagggggaggcagcggtggaggaggcaactaccgaggaggtttcaaccgcagcggaggtggtggctatagccagaaccgctggggtaacaacaaccgggataacaacaactccaacaacagaggcagctacaaccgggctccccagcaacagccgccaccacagcagcctccgccaccacagccaccaccccagcagccaccgccaccacccagctacagccctgctcggaaccccccaggggccagcacctacaataagaacagcaacatccctggctcaagcgccaataccagcacccccaccgtcagcagctacagccctccacagccgagttacagccagccaccctacaaccagggaggttacagccagggctacacagccccaccgcctccacctccaccaccacctgcctacaactatgggagctacggcggttacaacccggccccctataccccaccgccaccccccaccgcacagacctaccctcagcccagctataaccagtatcagcagtatgcccagcagtggaaccagtactatcagaaccagggccagtggccgccatactacgggaactacgactacgggagctactccgggaacacacagggtggcacaagtacacagtagccagtgtgacccagaggctcccggaggcccctgccggcttcctccaccagcgcctgcctcggcccctcctctgcccccgccagatcccgtggtgctggggatggggtcatcccagggctgcctccctccagcccactgcctcccctctgaggggcttccttcccctccatagggccaggcatttttttctggattcaaacaggcaacaatgaccttttattttctgtttgtccccacctccccagccttccacctcctgttcttcctaccttcttcctttttgactaaataatccccacctcccttgatcatacagtgaggctacagtgactgaggggagaatcccctcctgttcactctcccaaccctgctccagcccctcagcttcccagaccctcatgcagttggttgtaaattctcccaggagctgttttactgtctacttttcaggatt

SEQ ID NO: 11180 - protein, 339 aa, Homo sapiens [sequence omitted]

SEQ ID NO: 11181 - DNA, 1587 bp, Homo sapiens
  CDS (109)..(1353)
ttgggcctcgtgttgctgctcactggattgttggctctcggggctagtgagtcggccctggttaccaaagtgttcacaggcgtgaaccttttggttcttgggttcgtcatgatctctggcttcgttaagggggacgtgcacaactggaagctcacagaagaggactacgaattggccatggctgaactcaatgacacctatagcttgggtcctctgggctctggaggatttgtgcctttcggcttcgagggaattctccgtggagcagcgacctgtttctatgcatttgttggtttcgactgtattgctaccactggagaagaagcccagaatccccagcgttccatcccgatgggcattgtgatctcactgtctgtctgctttttggcgtattttgctgtctcttctgcactcaccctgatgatgccttactaccagcttcagcctgagagccctttgcctgaggcatttctctacattggatgggctcctgcccgctatgttgtggctgttggctccctctgtgctctttctaccagcctcctgggctccatgttccccatgcctcgggtgatctacgcgatggcagaggatggcctcctgttccgtgtacttgctcggatccacaccggcacacgcaccccaatcatagccaccgtggtctctggcattattgcagcattcatggcattcctcttcaaactcactgatcttgtggacctcatgtcaattgggaccctgcttgcttactccctggtgtcgatttgtgttctcatcctcaggtatcaacctgatcaggagacaaagactggggaagaagtggagttgcaggaggaggcaataactactgaatcagagaagttgaccctatggggactatttttcccactcaactccatccccactccactctctggccaaattgtctatgtttgttcctcattgcttgctgttctgctgactgctctttgcctggtgctggcccagtggtcagttccattgctttctggagacctgctgtggactgcagtggttgtgctgctcctgctgctcattattgggatcattgtggtcatctggagacagccacagagttccactccccttcactttaaggtgcctgctttgcctctcctcccactaatgagcatctttgtgaatatttaccttatgatgcagatgacagctggtacctgggcccgatttggggtctggatgctgattggctttgctatctacttcggctatgggatccagcacagcctggaggagattaagagtaaccaaccctcacgcaagtctagagccaaaactgtagaccttgatcccggcactctctatgtccactcagtttgacatcgtcacacctaaatgctgtctggtcccctgcacaataatggagagtactcctgaccccagtgacagctagccctcccctgtgatggtggtggtggatactaatacagttctgtacgatgtgaaggatgtgtctttgctatttcttgtctattttaacccgtctgcttctaaatgatgtctagctgcttaccaactttaaaaaatgatattaaaagaaagtagaaaaat

SEQ ID NO: 11182 - protein, 415 aa, Homo sapiens
MISGFVKGDVHNWKLTEEDYELAMAELNDTYSLGPLGSGGFVPFGFEGILRGAATCFYAFVGFDCIATTGEEAQNPQRSIPMGIVISLSVCFLAYFAVSSALTLMMPYYQLQPESPLPEAFLYIGWAPARYVVAVGSLCALSTSLLGSMFPMPRVIYAMAEDGLLFRVLARIHTGTRTPIIATVVSGIIAAFMAFLFKLTDLVDLMSIGTLLAYSLVSICVLILRYQPDQETKTGEEVELQEEAITTESEKLTLWGLFFPLNSIPTPLSGQIVYVCSSLLAVLLTALCLVLAQWSVPLLSGDLLWTAVVVLLLLLIIGIIVVIWRQPQSSTPLHFKVPALPLLPLMSIFVNIYLMMQMTAGTWARFGVWMLIGFAIYFGYGIQHSLEEIKSNQPSRKSRAKTVDLDPGTLYVHSV

SEQ ID NO: 11183 - DNA, 1746 bp, Homo sapiens
  CDS (174)..(677)
agtctgagcccctgagccttatcgcaaatgtggtagctggctcatcctgccggggccctccactgcccagagacctgcagggctccaggcacagggctgaagtcgcctctgccctgcgctccttctccccgctgcaacccgggcaggcgcccacaggccgggctcacagcaccatgacaggctctggggtggatgccaggacagccagctccgggagcagcgtgtgggaaggacagctgcagagcctggtgctgtcagaatatgcatccacagagatgagcctgcatgccctctatatgcaccagctccacaagcagcaggcccaggctgaacctgagcggcatgtatggcaccgccgggagagtgatgagagtggagaaagcgcccctgatgaagggggagagggcgcccgggccccccagtctatccctcgctctgctagctatccctgtgcagcaccccggcctggagctcctgagaccaccgccctgcatgggggcttccagaggcgctacggtggcatcacagatcctggcacagtgcccagggttccctctcatttctctcggctgcctcttggagggtgggcagaagatgggcagtcggcatcaaggcaccctgagcccgtgcccgaagagggctcggaggatgagctaccccctcaggtgcacaaggtatagacaaggctgagcagggttcctgtggcccaggatggaggccaccgctgccctgccatcccgtctgcctgccatgggacggctcctctgagtgttccctggccccacgtgtgtggtgtttgtgtgtctgtgcctggccaagggaggtgccaacactgggcttgccacagccccaggagaggaatttggggcctaggaaccgagggcacacgggactctagcctcatccccaggacccccttggctcagagtgtggtgctagaaactggtccccagcccagccccagtactgccacctttacacctacccctgcaagtccccagagggctgcccacgatagaagctgccaagcagggagaacctgtgccaactgtggagtggggaggttgggcctggaccctcaacccctgcaaccttccctagccccctcaatagatgagcaggtcaggctgtggcccttacctcacccgcagttctcgcccagtgctgcagccggctcacctctctccgcttcttgcacatcactggcctgtgtgtactgcttgctcctgttctgttcgcttgctcccgttccgttcggcttttgctttgcgttagggtgaagaccctagcgtccagctcccctcaacgctatattttgacactaaaaaagaaggtttctaaattgtaggagcaggatggaaatactttgctgcccttgccatcttttaggatgggcccccaggagactgaggtcttcctgggccctcattgctgcttatcgtaccccccatcacctgcacatgggacagaccgggctggagggtgaccttggctgtgtacgtcccagcaaaagagctctggcccgcatctcgctgtgccctgaagggggatgaagggcgatgcctcgcccgaggctttgggctgctgcactgcatgctgggactgctcctactctctgtcccacccctcacccagctgtggtccggctttgggagagtggtgaattgcgctgcccgaactcggagcggagcagggtagggaccgtgtacagcttgataacccttaataaaaagggagtttgaccag

SEQ ID NO: 11184 - protein, 168 aa, Homo sapiens
MTGSGVDARTASSGSSVWEGQLQSLVLSEYASTEMSLHALYMHQLHKQQAQAEPERHVWHRRESDESGESAPDEGGEGARAPQSIPRSASYPCAAPRPGAPETTALHGGFQRRYGGITDPGTVPRVPSHFSRLPLGGWAEDGQSASRHPEPVPEEGSEDELPPQVHKV

SEQ ID NO: 11185 - DNA, 1927 bp, Homo sapiens
  CDS (511)..(1416)
gtatgaacgcagcggcggacctgtgaggggatccgacttgccggcagaacttacgctgcgggaccccgggcactgttgctgctgcgggagtccagagaggcaggaggatggagctcggaaggatttcagctccaggctggctgctggaccgacttttcaacattttttaaaaagtgcctcagctcctcaggagaagctgtcttcagaagtggaagacccacctccctatctcatgatggatgaacttcttggaaggcagagaaaagtctacctcgagacctatggctgccagatgaatgtgaatgacacagagatagcctggtccatcttacagaagagggctacctgcggaccagtaacctccaagaggcagatgtgattctccttgtcacgtgctctatcagggagaaggctgagcagaccatctggaaccgtttacatcagcttaaagccttgaagacaaggcggccccgctcccgggttcctctgaggattggaattctaggctgcatggctgagaggttgaaggaggagattctcaacagagagaaaatggtagatattttggctggtcctgatgcctaccgggaccttccccggctgctggctgttgctgagtcgggccagcaagctgccaacgtgctgctctctctggacgagacctatgctgatgtcatgccagtccagacaagcgccagtgccacgtctgcctttgtgtcaatcatgcgaggctgtgacaacatgtgtagctactgcattgttcctctcacccggggcagggagaggagtcggcctattgcctccactctagaggaagtgaagaagctttctgagcaggggctgaaagaagtgacacttcttggtcagaatgttaatagttttcggggcaattcggaggtccagttcaacagtgcagtgcctaccaatctcagtcgtggctttaccaccaactataaaaccaagcaaggaggacttcgttttgctcatcttctggatcaggtctccagagtagatcctgaaatgaggatccgttttacctctccccaccccaaggattttcctgatgaggttctgcagctgattcatgagagagataacatctgtaaacagatccacctgccagcccagagtggaagcagccgtgtgttggaggccatgcggaggggatattcaagagaagcttatgtggagttagttcaccatattagagaatctattccaggtgtgagcctcagcagcgatttcattgctggcttttgtggtgagacggaggaagatcacgtccagacagtctctttgctccgggaagttcagtacaacatgggcttcctctttgcctacagcatgagacagaagacacgggcatatcataggctgaaggatgatgtcccggaagaggtaaaattaaggcgtttgtaggaactcatcactatcttccgagaagaagcaacaaaagccaatcagacctctgtgggctgtacccagttggtgctagtggaagggctcagtaaacgctctgccactgacctgtgtggcaggaatgatggaaaccttaaggtgatcttccctgatgcagagatggaggatgtcaataaccctgggctcagggtcagagcccagcctggggactatgtgctggtgaagatcacctcagccagttctcagacacttaggggacatgttctctgcaggaccactctgagggactcttctgcatattgctgacctgagaggatggcctcagagctgacttgggcaatcctccccaacaggaaggggagacattgcctgccactgaggaaacaggtcatgaaggtggagataagctgcaaggggcgaagcaactttatgtcagtggaaaacgtgtctctttaaagctgctatgtgaacagcttttacagtcattaaatttacctaaactaaggtt

SEQ ID NO: 11186 - protein, 302 aa, Homo sapiens
MAERLKEEILNREKMVDILAGPDAYRDLPRLLAVAESGQQAANVLLSLDETYADVMPVQTSASATSAFVSIMRGCDNMCSYCIVPLTRGRERSRPIASTLEEVKKLSEQGLKEVTLLGQNVNSFRGNSEVQFNSAVPTNLSRGFTTNYKTKQGGLRFAHLLDQVSRVDPEMRIRFTSPHPKDFPDEVLQLIHERDNICKQIHLPAQSGSSRVLEAMRRGYSREAYVELVHHIRESIPGVSLSSDFIAGFCGETEEDHVQTVSLLREVQYNMGFLFAYSMRQKTRAYHRLKDDVPEEVKLRRL

SEQ ID NO: 11187 - DNA, 2631 bp, Homo sapiens
  CDS (24)..(1925)
taagagatttttctacagaatcaatgtctttggttccagcaacaaattatatatatacacccctgaatcaacttaagggtggtacaattgtcaatgtctatggtgttgtgaagttctttaagcccccatatctaagcaaaggaactgattattgctcagttgtaactattgtggaccagacaaatgtaaaactaacttgcctgctctttagtggaaactatgaagcccttccaataatttataaaaatggagatattgttcgctttcacaggctgaagattcaagtatataaaaaggagactcagggtatcaccagctctggctttgcatctttgacgtttgagggaactttgggagcccctatcatacctcgcacttcaagcaagtattttaacttcactactgaggaccacaaaatggtagaagccttacgtgtttgggcatctactcatatgtcaccgtcttggacattactaaaattgtgtgatgttcagccaatgcagtattttgacctgacttgtcagctcttgggcaaagcagaagtggacggagcatcatttcttctaaaggtatgggatggcaccaggacaccatttccatcttggagagtcttaatacaagaccttgttcttgaaggtgatttaagtcacatccatcggctacaaaatctgacaatagacattttagtctacgataaccatgttcatgtggcaagatctctgaaggttggaagctttcttagaatctatagccttcataccaaacttcaatcaatgaattcagagaatcagacaatgttaagtttagagtttcatcttcatggaggtaccagttacggtcggggaatcagggtcttgccagaaagtaactctgatgtggatcaactgaaaaaggatttagaatctgcaaatttgacagccaatcagcattcagatgttatctgtcaatcagaacctgacgacagctttccaagctctggatcagtatcattatacgaggtagaaagatgtcaacagctatctgctacaatacttacagatcatcagtatttggagaggacaccactatgtgccattttgaaacaaaaagctcctcaacaataccgcatccgagcaaaattgaggtcatataagcccagaagactatttcagtctgttaaacttcattgccctaaatgtcatttgctgcaagaagttccacatgagggcgatttggatataatttttcaggatggtgcaactaaaaccccagttgtcaagttacaaaatacatcattatatgattcaaaaatctggaccactaaaaatcaaaaaggacgaaaagtagcagttcattttgtgaaaaataatggtattctcccgctttcaaatgaatgtctacttttgatagaaggaggtacactcagtgaaatttgcaaactctcgaacaagtttaatagtgtaattcctgtgagatctggccacgaagacctggaacttttggacctttcagcaccatttcttatacaaggaacaatacatcactatggatgtaaacagtgttctagtttgagatccatacaaaatctaaattccctggttgataaaacatcgtggattccttcttctgtggcagaagcactgggtattgtacccctccaatatgtgtttgttatgacctttacacttgatgatggaacaggagtactagaagcctatctcatggattctgacaaattcttccagattccagcatcagaagttctgatggatgatgaccttcagaaaagtgtggatatgatcatggatatgttttgtcctccaggaataaaaattgatgcatatccgtggttggaatgcttcatcaagtcatacaatgtcacaaatggaacagataatcaaatttgctatcagatttttgacaccacagttgcagaagatgtaatctaatattgccatccaatttagcatacataaaatgttgccactcaccttccctgtttgagcttcttttcctgacctgagttttgtatcagcaatgttgatgatgttagcatggatatgggattagaaaatgtccttaccttaaatctcttggcttttactgggtgcaaggtaaataatggctatggattttgttttgctttctgttttgcttttgtacaaagagacctgcttaaacaagtactgctgagataagtgtctgatcaagctacagtgtactttaagtagaaatggcaaagttgctttgttggggtgctgatactgatgattttaggataaattcatttctttaaacttgtaatacatggttttattgcttgtttctctccaggatagtagagatttctctatttcacctcaacctaataaaagtggtcagatttataatgttaatgacttaatattatccttttctaatagtctcatgtaaaatatgccgctattacaacttacaactaattgaatgagatgttaacttagtaaaatagtttgatttttacctgacagtgtttgtcaaatttaaaatcatgaatattcaattttatacaaacatttatatatatatatatagatttgtgtatgttatttgccaaagacagatataaattacctggtttaatattagtgaagaataaataagtgcacacat

SEQ ID NO: 11188 - protein, 634 aa, Homo sapiens
MSLVPATNYIYTPLNQLKGGTIVNVYGVVKFFKPPYLSKGTDYCSVVTIVDQTNVKLTCLLFSGNYEALPIIYKNGDIVRFHRLKIQVYKKETQGITSSGFASLTFEGTLGAPIIPRTSSKYFNFTTEDHKMVEALRVWASTHMSPSWTLLKLCDVQPMQYFDLTCQLLGKAEVDGASFLLKVWDGTRTPFPSWRVLIQDLVLEGDLSHIHRLQNLTIDILVYDNHVHVARSLKVGSFLRIYSLHTKLQSMNSENQTMLSLEFHLHGGTSYGRGIRVLPESNSDVDQLKKDLESANLTANQHSDVICQSEPDDSFPSSGSVSLYEVERCQQLSATILTDHQYLERTPLCAILKQKAPQQYRIRAKLRSYKPRRLFQSVKLHCPKCHLLQEVPHEGDLDIIFQDGATKTPVVKLQNTSLYDSKIWTTKNQKGRKVAVHFVKNNGILPLSNECLLLIEGGTLSEICKLSNKFNSVIPVRSGHEDLELLDLSAPFLIQGTIHHYGCKQCSSLRSIQNLNSLVDKTSWIPSSVAEALGIVPLQYVFVMTFTLDDGTGVLEAYLMDSDKFFQIPASEVLMDDDLQKSVDMIMDMFCPPGIKIDAYPWLECFIKSYNVTNGTDNQICYQIFDTTVAEDVI

SEQ ID NO: 11189 - DNA, 2611 bp, Homo sapiens
  CDS (63)..(2366)
aaaataaagatgactatatcagagacttgaaaaggatcattctctgttttctgatagtgtatatggccattttagtgggcacagatcaggatttttacagtttacttggagtgtccaaaactgcaagcagtagagaaataagacaagctttcaagaaattggcattgaagttacatcctgataaaaacccgaataacccaaatgcacatggcgattttttaaaaataaatagagcatatgaagtactcaaagatgaagatctacggaaaaagtatgacaaatatggagaaaagggacttgaggataatcaaggtggccagtatgaaagctggaactattatcgttatgattttggtatttatgatgatgatcctgaaatcataacattggaaagaagagaatttgatgctgctgttaattctggagaactgtggtttgtaaatttttactccccaggctgttcacactgccatgatttagctcccacatggagagactttgctaaagaagtggatgggttacttcgaattggagctgttaactgtggtgatgatagaatgctttgccgaatgaaaggagtcaacagctatcccagcctcttcatttttcggtctggaatggccccagtgaaatatcatggagacagatcaaaggagagtttagtgagttttgcaatgcagcatgttagaagtacagtgacagaactttggacaggaaattttgtcaactccatacaaactgcttttgctgctggtattggctggctgatcactttttgttcaaaaggaggagattgtttgacttcacagacacgactcaggcttagtggcatgttggatggtcttgttaatgtaggatggatggactgtgccacccaggataacctttgtaaaagcttagatattacaacaagtactactgcttattttcctcctggagccactttaaataacaaagagaaaaacagtattttgtttctcaactcattggatgctaaagaaatatatttggaagtaatacataatcttccagattttgaactactttcggcaaacacactagaggatcgtttggctcatcatcggtggctgttattttttcattttggaaaaaatgaaaattcaaatgatcctgagctgaaaaaactaaaaactctacttaaaaatgatcatattcaagttggcaggttcgactgttcctctgcaccagacatctgtagtaatctgtatgtttttcagccgtctctagcagtatttaaaggacaaggaaccaaagaatatgaaattcatcatggaaagaagattctatatgatatacttgcctctgccaaagaaagtgtgaattctcatgttaccacgcttggacctcaaaattttcctgccaatgacaaagaaccatggcttgttgatttctttgccccctggtgtccaccatgtcgagctttactaccagagttacgaagagcatcaaatcttctttatggtcagcttaagtttggtacactagattgtacagttcatgagggactctgtaacatgtataacattcaggcttatccaacaacagtggtattcaaccagtccaacattcatgagtatgaaggacatcactctgctgaacaaatcttggagttcatagaggatcttatgaatccttcagtggtctcccttacacccaccaccttcaacgaactagttacacaaagaaaacacaacgaagtctggatggttgatttctattctccgtggtgtcatccttgccaagtcttaatgccagaatggaaaagaatggcccggacattaactggactgatcaacgtgggcagtatagattgccaacagtatcattctttttgtgcccaggaaaacgttcaaagataccctgagataagattttttcccccgaaatcaaataaagcttatcattatcacagttacaatggttggaatagggatgcttattccctgagaatctggggtctaggatttttacctcaagtatccacagatctaacacctcagactttcagtgaaaaagttctacaagggaaaaatcattgggtgattgatttctatgctccttggtgtggaccttgccagaattttgctccagaatttgagctcttggctaggatgattaaaggaaaagtgaaagctggaaaagtagactgtcaggcttatgctcagacatgccagaaagctgggatcagggcctatccaactgttaaattttatttctacgaaagagcaaagagaaattttcaagaagagcagataaataccagagatgcaaaagcaatcgctgccttaataagtgaaaaattggaaactctccgaaatcaaggcaagaggaataaggatgaactttgataatgttgaagatgaagaaaaagtttaaaagaaattctgacagatgacatcagaagacacctatttagaatgttacatttatgatgggaatgaatgaacattatcttagacttgcagttgtactgccagaattatctacagcactggtgtaaaagaagggtctgcaaactttttctgtaaagggccggtttataaatattttagactttgcaggctataatatatggttcacacatgagaac

SEQ ID NO: 11190 - protein, 768 aa, Homo sapiens [sequence omitted]

SEQ ID NO: 11191 - DNA, 2558 bp, Homo sapiens
  CDS (165)..(950)
gaactgccacctggaagatacaggtggaaacccgaaaacagagtattgtatgggagtttgaaaaataccagcgattactagagaaaaagcagccaccacatcggcagctgggggcagaggtagcagcagctctggccagcctacagcgggaggcagcggagaccatgcagaaactggagttgaaccatagcgagctcatccagcagagccaggtcctgtggaggatgattgcagagttgaaagagaggtcgcagaggcctgtccgctggatgttgcaggatattcaggaagtgttaaacaggagcaaatcttggagcttgcagcagccagaaccaatctccctggagttgaagacagattgccgtgtgctggggctaagagagatcctgaagacttatgcagctgatgtgcgcttggatccagatactgcttactcccgtctcatcgtgtctgaggacagaaaacgtgtgcactatggagacaccaaccagaaactgccagacaatcctgagagattttaccgctataatatcgtcctgggaagccagtgcatctcctcaggcaggcactactgggaggtggaggtgggagacaggtctgagtggggcctgggagtatgtaagcaaaatgtagaccggaaggaggtggtctacttatccccccactatggattctgggtgataaggctgaggaagggaaatgagtaccgagcaggcaccgatgagtacccaatcctgtccttgccggtccctcctcgccgggtgggaatcttcgtggattatgaggcccatgacatttctttctacaatgtgactgactgtggctcccacatcttcactttcccccgctatcccttccctgggcgcctcctgccctattttagtccttgctacagcattggaaccaacaacactgctcctctggccatctgctccctggatggggaggactaagaaagctaccaccctaaccacagaggcttggaattgggcctggcccccatggggcttggaggaccgagccactgacaggtatcccctgaaactgagctgagcccagtatccaaggattcctctgtctgatcctttggtctttgctaccaggctgaagtctgtcatgaaaccacttattttaaaaagcagaggcccagtcaaatgagcattgcatcccatgagggaagcacgacagggctgatggtgaggatcagagcagttctaaggtgactcgttggggtaaggatcaggactttgtccatgtagtagccaaccaccctcttccctgattcccgtccggtgtcacagttcagtcagtgaggatgatgaagtagatacagtcttcaggacaccattagatgggctttcccaataggccaaaaaaatgctgcgcatacccagagctggttgttgtgctgaggccagtcagaggatgcttcccctgaggtttgctataactaagcaacctttatgtgactctcaccttctgacctcctggcaagagaaattcagtgcagcagggggacacagacctgcccaagccaccccactgccgttccctctctgagcacaagctgggcaaatcactgtcccttggactccagtagaccagtgtcctagtcttgctttttttctctaagtggcaggatcagaaaacctgcgagctttagtttgtattttcactttatgaatgaggaaactgaaatggccttaagggagcaagttatttcttttttttttgacacggagtctcgctctgttgcccaggctggagtgcagtggcacgatctcggctcactgcaggctctgcctcctgggttcacgccattctcctgcctcagcttcccgagtagctgggactacaggcgcccaccacgacgcctggctcatttttttgtatttttagtagagacggggtttcaccatgttagctaggatggtctcgatctcctgacctcatgatccgccctcctcagcctcccacagtgctgggattagaggcatgagccactgcgcccggcccctggagcaagttatttcttacaaagctgctgaaggtaagattatcaaaattataaagcatttttcacactcaagtgaaacaaggttgacaaactcacttcgcaggtcacatgcctatacatcacttattatatttgggtctgaaacttctcacatgtttgggaggttttatgtgtcctcattgggaaaatgggtgtaattcagcataaaacctcatatgattgtcctgcctcatggagctgttgtatagatcccagatccatcccatgatttgttcctgtctgaggcatagaggcaggcaagccgtggattttgcacatggtgactttcccactgtgccatgatacagtctgcatcttatagcagtgcctttgtctcagggcctctgctggcagtctagaccttttgggcagaaaggagcttcaaatggctgtgataaggaatattaaaaattgtgtttctactttaattgtattggctgttcatgtatgtaggagttaaaataggccaaactggggaaataaacgcattctgtccaccatg

SEQ ID NO: 11192 - protein, 262 aa, Homo sapiens
MQKLELNHSELIQQSQVLWRMIAELKERSQRPVRWMLQDIQEVLNRSKSWSLQQPEPISLELKTDCRVLGLREILKTYAADVRLDPDTAYSRLIVSEDRKRVHYGDTNQKLPDNPERFYRYNIVLGSQCISSGRHYWEVEVGDRSEWGLGVCKQNVDRKEVVYLSPHYGFWVIRLRKGNEYRAGTDEYPILSLPVPPRRVGIFVDYEAHDISFYNVTDCGSHIFTFPRYPFPGRLLPYFSPCYSIGTNNTAPLAICSLDGED

SEQ ID NO: 11193 - DNA, 2544 bp, Homo sapiens
  CDS (381)..(938)
aaaaaaacaaataccgaatttccaacattccatcactaatattcctcgacgccaccactgggaaggttgtgtgcaggaacgggctgctggtgatccgagatgacccagaaggtctggagttcccctggggaccgaaacccttcagggaagtcattgcagggcccttgcttagaaacaatgggcagtctctggagagcagcagcctggaggggtctcacgtgggcgtctatttctccgcacattggtgtccgccctgccgaagcctcacccgggtcctggtggaatcctaccggaagatcaaggaggcaggccagaacttcgagatcatcttcgttagtgcagacaggtcggaggagtccttcaaacagtacttcagtgagatgccctggctcgccgtcccctacacggatgaggcccggcggtcgcgcctcaaccggctgtacggaatccaaggcatccccacgctcatcatgctggacccgcagggcgaggtgatcacgcggcaggggcgggtggaggtgctgaacgacgaggactgccgggagttcccctggcaccccaagcccgtgctggagctctccgactccaacgccgcgcagcttaacgagggcccctgcctcgtcctttttgtagattctgaggatgacggagagtccgaggcggccaagcagctgattcagccgatagctgagaaaatcattgccaagtacaaagccaaagaggaggaggcaccccttctgttcttcgtagccggggaggatgacatgactgactccctgcgagattacaccaacctgcctgaggctgcccctttgctcaccatcctggacatgtcagcccgggccaagtacgtgatggacgtggaggagatcacccccgccatcgtggaggcctttgtgaatgacttcctagcagagaagctcaaaccggagcccatctagcgtggctccggcctcctgagacgttatttaaaactcagccttctcctcctccccctccttccttccgcccttggacttacccagcgtgccccgaatcccaccacccaagtgtccagcctctctgtggtgccttgtttctgcagtaaactcctcagccagcaccctggggtgtggaatcagcagcggcagagtccaccgtgtttggagactctgtttgggagcacgggatggccgggggcccggccagagcggggctgcatggctttcgcaaagtcactagcttttggtgaaggatctgccagggtgtcctgggcagagtgagcgtggagggccggtgggtcccgctcgggctctgactctgacgtcggcacacacggccccggacggccagaggggaaccgccgggtgacacctgcgtggaggctgagctgagaaagggcctccgcttagagctgcgggtgaggacgtccttttctaagcaacacagtcttcctcggtctgagagaaaagcagcccactcttgtgttctcaggcaggggatctccaaatgcaaaaggaagcttgtagaggttttttgggtgagaagaaaaatgtagctaaggtaatggttcatatcatacaaacagctcccacgatcctgaaattctgttaacgaatccttctctttggacatcttcccaagaaacttagccctgagtcctaggaggagcacctctgcaccagcacggacctctcgctccacccagctctgtgcccaaggcccctgatctctgctgaggtgcccacacccacgttcgatcacccctgccattcccttttattttcttttttttgagatggagtcttgctctgtcgcccaggctggagtgcagtggcaccatcttggctcacttcaacctccgcccccaaggttcaagtgattctcctgcctcagcctcccgagtagctgggattacaggcacccgccaccgtacctggctaatttttgtatttttagtagagatggggtttcaccatgttggctaggctggtctcgaactcctgacctcaggtgatccacccgcctcggcctcccaaagtgctgggattacaggcgtgagccgccgtgcccggcccccttttcttttcaaagcagaactacaaagatgagaaattaccagaagcctcgccttttcctaagcaccagcggaaggagctgtgccccgggatggagcgagggtggagggcgcgtcagccacgggtgggccttgtgtcgccttgtatcggcccaggtaggttgttggcctcttacttgggctgacctgacccccgaaagagaaacagacaactctgttctcaggattggggatggacggcttcggccaagcgttttagcctcattcactcaggccccactcagcactctgccagccaagaccattgatttggaaaatccggtccccacccgctaatgagctgttgacactgttgttccttgctgaattggattgttgacttgtagttcagaggcgtacaactagttggcgattagacttgttatgtgatgttaccagcctgaaatgcgatcaccccgtaggaaataaagcaggcatctctggacctc

SEQ ID NO: 11194 - protein, 186 aa, Homo sapiens
MPWLAVPYTDEARRSRLNRLYGIQGIPTLIMLDPQGEVITRQGRVEVLNDEDCREFPWHPKPVLELSDSNAAQLNEGPCLVLFVDSEDDGESEAAKQLIQPIAEKIIAKYKAKEEEAPLLFFVAGEDDMTDSLRDYTNLPEAAPLLTILDMSARAKYVMDVEEITPAIVEAFVNDFLAEKLKPEPI

SEQ ID NO: 11195 - DNA, 1846 bp, Homo sapiens
  CDS (5)..(1168)
tcgcatgaagatgaccaaaaacaaagggctggatgtttgcaattggactgatggggatgagatgcagtggggcccagccagggcagaggaggagcatggtgtctatgtgtatgacctgatggctactgtggtacacatcctggactcacgcacagggggcagcctggtggctcacatcaaagttggagagacctaccaccagcgcaaggagggcgttactcaccagcagtggtatctgttcaatgactttcttattgaacctattgataagcatgaagctgtgcagtttgacatgaattggaaagtacctgcaatcctttattatgtcaaacggaatctcaattccagatacaacctgaacatcaagaaccctattgaggcaagtgtcttgctggctgaagcctcgctggcacggaagcagcggaaaacacatactacctttattccactgatgctgaatgagatgccacagattggggacctggtgggtctggatgctgagtttgtcacccttaatgaggaggaagcagagttacgcagtgatggtaccaagtctaccattaaaccaagccagatgtcagtagccaggattacctgtgttcggggccagggacccaatgagggtatccccttcattgatgactacatctctacccaggagcaggtggtggattacttgactcaatactcgggtataaagcctggtggcctcgatgccaaaatttcctccaagcacctaacaactctcaagtctacctacttaaagcttcgttttctcattgacattggagtcaagtttgtgggtcatggcctgcagaaggacttccgggtcatcaacctgatggtgcccaaggaccaagtccttgacactgtctacctgttccatatgccccgaaaacgaatgatttccctgcgattccttgcttggtactttctggacctgaagattcaaggggaaacccatgacagtattgaggatgcccgcacagcccttcagctgtaccgaaagtatctggagctaagcaaaaatggcactgagcctgagtctttccacaaggtgctcaagggtctttatgagaagggcagaaagatggactggaaggtgcctgagcctgagggccaaacaagtcccaagaatgcagctgtcttctcctcagtgctggcgctctgactacccttcccaaagaaccacggccctctccctttactgttctatagccccagaactgggagatggcttcctaagttggctataccttgtccacttccagtactggacgtgctcagggtctagggtcacagatggtgctattaattgaactggaacacagcagaattgttgcaaaggttctaggagccagattcattccttcttcattctttgcaaaacagtggtacagacatggagtctagaattgacccagatggaaagtaattggtattcttaatatcctgggtgactaatatccaggcagagaagctcctggaaccataactgtaagttcctagctggctagggattgaagtcctggacagtgacagaggataccacagtagttcaagacttagcacaagtcaccaactgcttcagggatacctggaggggccagcaagtagagtgttggtggcccaagcaaaccagtgttgccaataccattgccaaaagggcctttggatcctggacaaagcttggctgccggcttcatttattcctgctgatggctgagaagcatctgtcttccatcccacttgcctgtcccaagttttgttccattttttaaaaatttgttgtaaactgcatgttttataaaataaaaataaaatatcgtttgttatttatctcatt

SEQ ID NO: 11196 - protein, 388 aa, Homo sapiens [sequence omitted]

SEQ ID NO: 11197 - DNA, 2067 bp, Homo sapiens
  CDS (72)..(1550)
atacttgtgcggttccaagtgtggagaaagcggctctgggtctagattgagggatactccccctttccaccatgggcaagaagggcaaagttggcaagagccgacgagacaagttttatcacttggcgaaggagacgggttaccgttcccgatctgctttcaagctgatccagctcaatcgccgctttcagttcctgcagaaagcccgagccttgctggacctgtgtgctgcgccagggggatggctgcaggtagctgccaagtttatgcctgtatccagccttattgtgggagtggacctggttccaatcaagcctctccccaatgtggtgactctccaggaggacatcacaacagaacgttgtaggcaggccctgaggaaggagctgaagacctggaaggttgatgttgtgctcaatgatggggcccccaacgttggggctagctgggtccatgatgcttactcacaagcccatttgacactgatggctctacgtttggcttgtgactttttggcccgtggtggcagcttcatcacaaaggttttccgttctcgtgactatcagcctctgctatggatctttcagcagctgttccgccgtgtccaggccaccaagccccaagcctctcgccatgaatctgcagagatctttgtagtctgccaaggattcctggcccctgacaaggttgacagtaaattctttgaccccaaatttgcctttaaggaggttgaagttcaggctaagaccgttactgaattggttactaagaagaagccaaaggctgaaggctatgctgagggtgacctcactctctatcaccgtacctcagtcactgacttcctccgagctgccaaccctgttgacttcctctccaaggccagcgaaatcatggtagatgatgaagagttggcacagcatccagctaccactgaggacatacgggtgtgctgtcaggacatcagagtgttggggcgcaaggagctcaggtcgctactaaactggagaacaaaacttcggcgatatgtggccaagaagctgaaagaacaagcaaaggcactggacatcagcctcagctctggagaggaagatgaaggtgatgaggaggactcaacagctggaaccacaaagcagccctctaaggaggaggaggaagaggaggaggaggaacaactgaaccagaccttggcagaaatgaaggcccaggaggtggcggaattgaagaggaagaaaaagaagctgttgcgtgagcagagaaagcagcgggagcgtgtggagctgaagatggatctgcctggggtttccattgcagacgagggggagactggcatgttctccttgtgcaccatccggggtcaccagttattagaggaagtaacacaaggggatatgagtgcagcagacacatttctgtccgatctgccaagggatgatatctatgtgttaatcattttccttatctgcttcctagtcctgtatgcccttttcctaacactcacaacaaaactaactaatactaacatctcagacgctcaggaaatagaaaccgtctgaactatcctgcccgccatcatcctagtcctcatcgccctcccatccctacgcatcctttacataacagacgaggtcaacgatccctcccttaccatcaaatcaattggccaccaatggtactgaacctacgagtacaccgactacggcggactaatcttcaactcctacatacttcccccattattcctagaaccaggcgacctgcgactccttgacgttgacaatcgagtagtactcccgattgaagcccccattcgtataataattacatcacaagacgtcttgcactcatgagctgtccccacattaggcttaaaaacagatgcaattcccggacgtctaaaccaaaccactttcaccgctacacgaccgggggtatactacggtcaatgctctgaaatctgtggagcaaaccacagtttcatgcccatcgtcctagaattaattcccctaaaaatctttgaaatagggcccgtatttaccctatagcaccccctctaccccctctagagcc

SEQ ID NO: 11198 - protein, 493 aa, Homo sapiens
MGKKGKVGKSRRDKFYHLAKETGYRSRSAFKLIQLNRRFQFLQKARALLDLCAAPGGWLQVAAKFMPVSSLIVGVDLVPIKPLPNVVTLQEDITTERCRQALRKELKTWKVDVVLNDGAPNVGASWVHDAYSQAHLTLMALRLACDFLARGGSFITKVFRSRDYQPLLWIFQQLFRRVQATKPQASRHESAEIFVVCQGFLAPDKVDSKFFDPKFAFKEVEVQAKTVTELVTKKKPKAEGYAEGDLTLYHRTSVTDFLRAANPVDFLSKASEIMVDDEELAQHPATTEDIRVCCQDIRVLGRKELRSLLNWRTKLRRYVAKKLKEQAKALDISLSSGEEDEGDEEDSTAGTTKQPSKEEEEEEEEEQLNQTLAEMKAQEVAELKRKKKKLLREQRKQRERVELKMDLPGVSIADEGETGMFSLCTIRGHQLLEEVTQGDMSAADTFLSDLPRDDIYVLIIFLICFLVLYALFLTLTTKLTNTNISDAQEIETV

SEQ ID NO: 11199 - DNA, 2390 bp, Homo sapiens
  CDS (119)..(2080)
cagactcgcagggatcagagatttcaagcagggacgccaccttctaacagtgctactgaaattgttcagttactgcgtgaaggtgaaagtcaaccggcagcaactggtcaaactggaaatgaacaccttgaacgtcatgctggggaccctaaacctggcccttgtagctgaacaagaaagcaaggacagtgggggtgcagctgtggctgagcaggtgcttagcatcatggagatcattctagatgagtccaatgctgagcccctgagtgaggacaagggcaacctcctcctgacaggtgacaaggatcaactggtgatgctcttggaccagatcaacggcacctttgttcgctccaaccccagtgtgctccagggcctgcttcgcatcatcccgtacctttcctttggagaggtggagaaaatgcagatcttggtggagcgattcaaaccatactgcaactttgataaatatgatgaagatcacagtggtgatgataaagtcttcctggactgcttctgtaaaatagctgctggcatcaagaacaacagcaatgggcaccagctgaaggatctgattctccagaaggggatcacccagaatgcacttgactacatgaaaaagcacatccctagcgccaagaatttggatgccgacatctggaaaaagtttttgtctcgcccagccttgccatttatcctaaggctgcttcggggcctggccatccagcaccctggcacccaggttctgattggaactgattccatcccgaacctgcataagctggagcaggtgtccagtgatgagggcattgggaccttggcagagaacctgctggaagccctgcgggaacaccctgacgtaaacaagaagattgacgcagcccgcagggagacccgggcagagaagaaacgcatggccatggcaatgaggcagaaggccctgggcaccctgggcatgacgacaaatgaaaagggccaggtcgtgaccaagacagcactcctgaagcagatggaagagctgatcgaggagcctggcctcacgtgctgcatctgcagggagggatacaagttccagcccacaaaggtcctgggcatttataccttcacgaagcgggtagccttggaggagttggagaataagccccggaaacagcagggctacagcaccgtgtcccacttcaacattgtgcactacgactgccatctggctgccgtcaggttggctcgaggccgggaagagtgggagagtgccgccctgcagaatgccaacaccaagtgcaacgggctccttccggtctggggacctcatgtccctgaatcagcttttgccacttgcttggcaagacacaacacttacctccaggaatgtacaggccagcgggagcccacgtatcagctcaacatccacgacatcaaactgctcttcctgcgcttcgccatggagcagtcgttcagcgcagacactggcgggggcggccgggagagcaacatccacctgatcccgtacatcattcacactgtgctttacgtcctgaacacaacccgagcaacttcccgagaagagaagaacctccaaggctttctggaacagcccaaggggaagtgggtggagagtgcctttgaagtggacgggccctactatttcacagtcttggcccttcacatcctgccccctgagcagtggagagccacacgtgtggaaatcttgcggaggctgttggtgacctcgcaggctcgggcagtggctccaggtggagccaccaggctgacagataaggcagtgaaggactattccgcttaccgttcttcccttctcttttgggccctcgtcgatctcatttacaacatgtttaagaaggtgcctaccagtaacacagagggaggctggtcctgctctctcgctgagtacatccgccacaacgacatgcccatctacgaagctgccgacaaagccctgaaaaccttccaggaggagttcatgccagtggagaccttctcagagttcctcgatgtggccggtcttttatcagaaatcaccgatccagagagcttcctgaaggacctgttgaactcagtcccctgaccaccacacagcagctgcggcggcgaagacgaagctggcttgccttccaccctctgttctccctccttgtgcattaagttccctccgcgggatgctgcattgttaccccgccctcccctctctcatttttcttggtgtggcttggggtttttaggcttcctgttttatctcgtgtgtgtggtgcaccagctatgaggttgtctgtaacccaagccatcaaagggcctgtacatacctaggagccatgagttgtcccggccagcttcgtacttgagtgtgcacatcttgagaaataaacaagtgactt

SEQ ID NO: 11200 - protein, 654 aa, Homo sapiens [sequence omitted]

SEQ ID NO: 11201 - DNA, 1540 bp, Homo sapiens
  CDS (204)..(590)
cccgttcctgcaccagccccgcaccctccccagaaggctggtcgccctggtctgagtggagtaagtgcactgacgacggagcccagagccgaagccggcactgtgaggagctcctcccagggtccagcgcctgtgctggaaacagcagccagagccgcccctgcccctacagcgagattcccgtcatcctgccagcctccagcatggaggaggccaccggctgtgcagggttcaatctcatccacttggtggccacgggcatctcctgcttcttgggctctgggctcctgaccctagcagtgtacctgtcttgccagcactgccagcgtcagtcccaggagtccacactggtccatcctgccacccccaaccatttgcactacaagggcggaggcaccccgaagaatgaaaagtacacacccatggaattcaagaccctgaacaagaataacttgatccctgatgacagagccaacttctacccattgcagcagaccaatgtgtacacgactacttactacccaagccccctgaacaaacacagcttccggcccgaggcctcacctggacaacggtgcttccccaacagctgataccgccgtcctggggacttgggcttcttgccttcataaggcacagagcagatggagatgggacagtggagccagtttggttttctccctctgcactaggccaagaacttgctgccttgcctgtggggggtcccatccggcttcagagagctctggctggcattgaccatgggggaaagggctggtttcaggctgacatatggccgcaggtccagttcagcccaggtctctcatggttatcttccaacccactgtcacgctgacactatgctgccatgcctgggctgtggacctactgggcatttgaggaattggagaatggagatggcaagagggcgggcttttaagtttgggttggagacaacttcctgtggcccccacaagctgagtctggccttctccagctggccccaaaaaaggcctttgctacatcctgattatctctgaaagtaatcaatcaagtggctccagtagctctggattttctgccagggctgggccattgtggtgctgccccagtatgacatgggaccaaggccagcgcaggttatccacctctgcctggaagtctatactctacccagggcatccctctggtcagaggcagtgagtactgggaactggaggctgacctgtgcttagaagtcctttaatctgggctggtacaggcctcagccttgccctcaatgcacgaaaggtggcccaggagagaggatcaatgccataggaggcagaagtctggcctctgtgcctctatggagactatctttcagttgctgctcaacagagttgttggctgagacctgcttgggagtctctgctggcccttcatctgttcaggaacacacacacacacacactcacacacgcacacacaatcacaatttgctacagcaacaaaaaagacattgggctgtggcattattaattaaagatgatatccagtc

SEQ ID NO: 11202 - protein, 129 aa, Homo sapiens
MEEATGCAGFNLIHLVATGISCFLGSGLLTLAVYLSCQHCQRQSQESTLVHPATPNHLHYKGGGTPKNEKYTPMEFKTLNKNNLIPDDRANFYPLQQTNVYTTTYYPSPLNKHSFRPEASPGQRCFPNS

SEQ ID NO: 11203 - DNA, 1570 bp, Homo sapiens
  CDS (130)..(939)
aacgggatggggagctggaccagcagattatgagcttacagaaagcctggcctacattttactctttttggatttcttcctcatcaagagactgctgcagtgcctgtcatgtgacagcggcatggacatatgccccaggctttcctgctggggtccatccatgagcctgcaggtgccctcatggagccccagccctgccctggaagcttggctgagagcttcctggaggaggagcttcggctcaatgctgagctgagccagctgcagttttcggagcctgtgggcatcatctacaatcccgtggagtatgcatgggagccacatcgcaactacgtgactcgctactgccagggccccaaggaagtactcttcctgggcatgaaccctggaccttttggcatggcccagactggggtgccctttggggaagtaagcatggtccgggactggttgggcattgtggggcctgtgctgacccctccccaagagcatcctaaacgaccagtgctgggactggagtgcccacagtcagaagtgagtggtgcccgattctggggctttttccggaacctctgtggacagcctgaggtcttcttccatcactgttttgtccacaatctatgccctctgcttttcctggctcccagcgggcgcaaccttactcctgctgagctgcctgccaagcagcgagaacagcttcttgggatctgtgatgcagccctctgccggcaggtgcagctgctgggggtgcggctggtggtgggagttgggcgactggcagagcagcgggcacgacgggctctggcaggcctgatgccagaggtccaggtggaagggctcctgcatccctctccccgtaacccacaggccaacaagggctgggaggcagtggccaaggaaagattgaatgagctggggctgctgccactgctgttgaaatgagtgcccttggggccttgcatgggacacattcaagacctcgaagtcattcttggccaagcagatgacaacacatctcctggactggagcaaaaggtccttctgtgcaccctggtcgctgggaaacgtattctttgatctgttgaactgtcttccaacctgccatggcagttttgacactactcctgtttgccctcctgattcctgctttctttaccttttaacattgcccctttcaggggaccccactttgtagggaatctgcagaaggtgtgcttttgcacttgcagactgctctacctcagtgtttccttgggagactttattcagctgagagtgccctagacagtaacttctaaggtcacgtttactatttcagaggaaatatcttgccaggatacctacccatccttatagaacagttacctttagctgacccctttcctcacagggaccaagacaaagcatgggacatgaaattaagagtgaacttcttatgggaggctgcagctggatcagaggaaaaatccagtgtgacagagtgcaagtcagaagacctggcttttcatcccagctttgaaacttggaactttttgattgacaaattaataaacctctctatgcctcaggc

SEQ ID NO: 11204 - protein, 270 aa, Homo sapiens
MPQAFLLGSIHEPAGALMEPQPCPGSLAESFLEEELRLNAELSQLQFSEPVGIIYNPVEYAWEPHRNYVTRYCQGPKEVLFLGMNPGPFGMAQTGVPFGEVSMVRDWLGIVGPVLTPPQEHPKRPVLGLECPQSEVSGARFWGFFRNLCGQPEVFFHHCFVHNLCPLLFLAPSGRNLTPAELPAKQREQLLGICDAALCRQVQLLGVRLVVGVGRLAEQRARRALAGLMPEVQVEGLLHPSPRNPQANKGWEAVAKERLNELGLLPLLLK

SEQ ID NO: 11205 - DNA, 1419 bp, Homo sapiens
  CDS (58)..(1026)
gataattacccagcctaaccatttctcaggtgcttgcgaggtgatcagaaggcaaagatgtcggagcgaaaagtattaaacaaatactacccgccggactttgacccatcaaagatccccaaactcaagctccccaaagaccggcagtacgtggtgcggctgatggcccccttcaacatgaggtgtaagacgtgcggagaatacatctacaaggggaagaaattcaatgctcggaaggagacggtgcagaacgaggtctacctgggcctgcccatcttccgcttttacatcaagtgcacgcgctgcctggcagagatcaccttcaagacagaccctgaaaacacagactacaccatggagcatggagccgcgcggaatttccaggctgagaagctcctggaggaggaggagaagagggtgcagaaggagcgggaggacgaggagctgaacaaccccatgaaggtgctggagaaccggaccaaggactccaagctggagatggaggtgctggagaacctccaggagctgaaagacctgaaccagcggcaggcgcacgtggacttcgaggctatgctgaggcagcaccgcctgtcggaggaggagcggcggaggcagcagcaggaggaggacgagcaggagaccgcggccctgttggaggaagccagaaagcgaagactgctggaggactccgactcagaggatgaggctgctccctcgcccctgcagccagcccttcggcccaaccccaccgccatcctggatgaggccccaaagcccaagaggaaggtggaggtctgggagcagagcgttggcagcctgggcagccggcccccgctgtcgaggctggtcgtggtgaagaaggcaaaggccgacccggactgcagcaacgggcagcctcaggcggcccccaccccaggagccccgcagaacaggaaggaggccaaccctacacccctgacgcctggcgcgtcctccctgagccaactgggtgcatacctggacagtgacgacagcaacggcagcaactgagccctcccaggaccccctcacggggtcaaagtcacacgtccagcttcagccacattgaggccagcattgctggtggtcagggcaggaggccttggcgtgactggaggccggacagacaagcgccagcgtgctccaacacatagggccaccaggggcctcagccccaggaggtcccttctctgtgccctcaccagcctctcaacacctcggggacccctgctgctcctgcccccacctgtcactgtgcttagggctgcaacatccctggagcagcttccaacactacttcagggtggcagtgtttggggcactgggcgagcctgccggcctctagatggcctcatctcttccttccacaaactgtctagaaccaataaaaggaaacctgcc

SEQ ID NO: 11206 - protein, 323 aa, Homo sapiens
MSERKVLNKYYPPDFDPSKIPKLKLPKDRQYVVRLMAPFNMRCKTCGEYIYKGKKFNARKETVQNEVYLGLPIFRFYIKCTRCLAEITFKTDPENTDYTMEHGAARNFQAEKLLEEEEKRVQKEREDEELNNPMKVLENRTKDSKLEMEVLENLQELKDLNQRQAHVDFEAMLRQHRLSEEERRRQQQEEDEQETAALLEEARKRRLLEDSDSEDEAAPSPLQPALRPNPTAILDEAPKPKRKVEVWEQSVGSLGSRPPLSRLVVVKKAKADPDCSNGQPQAAPTPGAPQNRKEANPTPLTPGASSLSQLGAYLDSDDSNGSN

SEQ ID NO: 11207 - DNA, 2634 bp, Homo sapiens
  CDS (299)..(2065)
taatgaaaactttacatgaatgcttatttaggttgttcaaagtaaaaagggctacaggtcacagatcgtcagtgcctgagaaagaacattgacttactctatatcaattgaggggaaagtgcagtaccgtcatcttcaagccttgtaagcataaaagagaataggctgcccatataagtcaaaggaaaatgagcccaggccttgctatgaagcagtgtgtgaatggacaatgttgaatgaatgtctggctcagtgatggagagccaggttcatctttgaaatctagggctcttcactcatgaagcagactcctattagaatgttactaggggcagaagcagtgggattggtaaaagagtgcaatgataacaccatgagagccttcacatacagaaccagacagaacttcaaaggttttgatgataacaatgatgatttcctgacaatggcagaatgtcaattcattatcaaacatgaacttgaaaatcttagagctaaagatgaaaaaatgatccctggttaccctcaggcaaagttgtatccaggaaaatcattgttgagaagattgctcacgtctggcatcgtgattcaggtgtttccactgcatgacagtgaagccctgaagaagcttgaggacacctggtacactcggtttgctttgaagtatcagcccatagacagtattcgtggctactttggggaaacaattgctctgtactttggatttttggagtatttcacttttgcattaatccccatggctgtcattgggttaccttactacttgtttgtgtgggaagactatgacaagtacgtgatctttgcctcgttcaacctcatctggtccacggtgattctggaactgtggaagcgtggctgtgccaacatgacctacaggtgggggacactgctcatgaagagaaagtttgaggagccccggccaggatttcatggtgtcttgggtatcaattccatcactgggaaggaggagcctctgtaccccagctacaagagacagttgcgcatttacctggtctccctgccattcgtgtgcctctgcctctatttctcactgtatgtcatgatgatttacttcgacatggaggtttgggccttgggtctacatgagaacagcgggtctgagtggaccagtgtcctgttgtatgtgcccagcatcatctatgccattgtgattgagatcatgaatcgtctctatcgatatgctgccgagtttttaacttcatgggagaatcacagattggaatctgcctatcagaaccatctaattctgaaagttttagtgttcaacttcctcaattgctttgcctcactcttctatattgcctttgtcttgaaagatatgaagcttttgcgccagagcttggccactctcctaattacctcccagatcctcaaccaaattatggaatcttttcttccttattggctccaaaggaagcatggtgtgcgggtgaagaggaaggtgcaggctttaaaggcagacattgatgctacattatatgaacaagtcatcctggaaaaagaaatgggaacttatttgggcacctttgatgattacttggagttattcctgcagtttggttatgtgagccttttctcctgtgtttacccattagcagctgcctttgctgtgttaaataacttcactgaagtaaattcagatgccttaaaaatgtgcagggtcttcaaacgtccattctcagaaccttcagccaatattggtgtgtggcagttggcttttgaaacgatgagtgttatatctgtggtcactaactgtgcgctgattggaatgtcaccacaagtgaatgcagtctttccagaatcaaaagcagacctcattttgattgtagtagcagtggagcacgcactcctggctttaaagtttatacttgcatttgccatacctgataagccacggcatatccagatgaaactagccagactggaatttgagtctttggaggcactcaagcagcagcaaatgaagctcgtgaccgagaacctgaaggaggaaccaatggaaagcgggaaggagaaggcaacctgagtgcccagcgtgcccagctgccctgttggcagaggcctgtgtctgtgccacacctgccacggtggcagggggggtacccggggcagcatcgtggctcctgaacccagacccaatgcttagccaaacgaagtggctcccatgtggcaagcacccttctcagtttcgcagtggcttggctcgggatccttggcagttcccccagccccaccctgtctgctccttcccagttccttcccgggccccacacgctgctccagctgccaactttgctgcagagccactgccgcccttgagcctctcaccatgagtgagccaccagctctccacgttcccctcatagcagtgtcactcccaaccccaccatggcccagggacccgtggacaggttggggatggggtgtgtgcccactgtgctcatcacaggagcctcagttgagagtgagcggggtacagtaaggcagtgcttcccacactggacctctttcctggttctcttttgcaatacattaacagaccctttatcaacataaacaatagtaactgagctattaaaggcaacctctctg

SEQ ID NO: 11208 - protein, 589 aa, Homo sapiens
MKQTPIRMLLGAEAVGLVKECNDNTMRAFTYRTRQNFKGFDDNNDDFLTMAECQFIIKHELENLRAKDEKMIPGYPQAKLYPGKSLLRRLLTSGIVIQVFPLHDSEALKKLEDTWYTRFALKYQPIDSIRGYFGETIALYFGFLEYFTFALIPMAVIGLPYYLFVWEDYDKYVIFASFNLIWSTVILELWKRGCANMTYRWGTLLMKRKFEEPRPGFHGVLGINSITGKEEPLYPSYKRQLRIYLVSLPFVCLCLYFSLYVMMIYFDMEVWALGLHENSGSEWTSVLLYVPSIIYAIVIEIMNRLYRYAAEFLTSWENHRLESAYQNHLILKVLVFNFLNCFASLFYIAFVLKDMKLLRQSLATLLITSQILNQIMESFLPYWLQRKHGVRVKRKVQALKADIDATLYEQVILEKEMGTYLGTFDDYLELFLQFGYVSLFSCVYPLAAAFAVLNNFTEVNSDALKMCRVFKRPFSEPSANIGVWQLAFETMSVISVVTNCALIGMSPQVNAVFPESKADLILIVVAVEHALLALKFILAFAIPDKPRHIQMKLARLEFESLEALKQQQMKLVTENLKEEPMESGKEKAT

SEQ ID NO: 11209 - DNA, 1737 bp, Homo sapiens
  CDS (112)..(1167)
ctgtcacgcttgttacttattgccaaaactgggaagttgaaggaagcccaagcatgtgttgaagctaacagagaccccatagtaaaaatcctgggctctgattataatacaatgaaagaaaactcaattgcattaaatattcttggcaaaattaccagagatgatgatcctgaaagtgaaattaagatgaagattgctatgctgcttaagcaattggatctgcacctcctcaatcattctctaaaacatatttcattagaaataagtttaagtcccatgacggtgaagaaggatatagaactgctcaaacgtttctcaggaaaaggaaaccaaacagtcttggaatctattgaatatacctcagattatgaattttcaaatggatgtcgagccccaccgtggagacaaattcgtggggaaatttgttatgtgctggtgaaacctcacgatggtgagactctgtgcattacttgcagtgcaggaggagtatttttaaatggtggcaaaacagatgatgaaggggacgttaattatgagagaaaaggttcaatttataaaaaccttgtcacatttttaagagaaaaatcaccaaaattttcagaaaatatgtctaaattgggaattagcttcagtgaagaccagcaaaaggaaaaggatcagcttggcaaagcccccaagaaggaagaagcagctgccctccgcaaagacatttctggttcagacaaaaggtcactggagaggaaccaaattaatttttggaggaatcaaatgaccaagagatgggaaccaagcttaaactggaagaccactgttaattacaaaggcaaaggctcagcaaaagaaatccaagaggacaaacacacaggaaaacttgaaaaaccaagaccatctgtttcacacggaagagcacaattacttcggaagagtgctgaaaagattgaggaaactgttagcgatagctcctcagaaagtgaggaagatgaagaaccacctgaccatcgtcaggaagcaagtgcagatttgccatcagaatattggcaaattcagaagctggtgaaatatttaaagcaaaaggaaacaagtcaaaatggcagaaacaaaagatggatcaggaagcagaataccagagtgattagaagcatgatctttgacgttggaaagaccagttgagttgaaattctgccgcttactcaatggccttgggtgatgatgctgtaccctaattctaaaggaagcaatgaacccccttttcagctaccttactgataagcacttatgttctgccttctgctatcctgatggttcgggttgtctgtcttactatctacttcttgagtagagagaccacattaaatttattgctgtatctcacagggcatcttgctagtgtgcacaggctcgcctccctacctctgccccgatggtgtgaaggggagagggcgaggttccttagtggcagggctttgctgttcttcactctcagccccctgaaagcagttcttcctgcctctgagcctgtctttccttctgctgttaacttctttcctacttttcttgcatccctctcccttccttttcctgccgtctttcttgtagacatactagttgattgctgtatttgctgactttatatggatattattttttcctctggccaaaattgttttaaaatcttgcaaggaaaatgtcttgcttttgatcacttccagcgattaaaggagatggtttgttaatgtc

SEQ ID NO: 11210 - protein, 352 aa, Homo sapiens [sequence omitted]

SEQ ID NO: 11211 - DNA, 2809 bp, Homo sapiens
  CDS (116)..(2392)
acttccggaatctctcggcgtgtgagcttggttgtcctaccaaagccagcgtttcggctcgcgtgcgccggcctagtttgctcgcgccctcacgcgctttgggtttcccggtctcatggccggcctgaccttatttgtgggccgcctcccgccctcggcccgcagtgagcagctggaggaactgttcagtcaggtggggccggtgaagcagtgcttcgtggtgactgaaaaagggagtaaggcatgtcgaggctttggctatgtcactttttcaatgctggaagatgttcagagggccctcaaggagattaccacctttgaaggttgcaagatcaacgtgactgttgccaagaaaaaactgaggaacaagacaaaggaaaaggggaaaaatgaaaactcagagtgcccaaagaaggagccgaaggctaaaaaagccaaagtggcagataagaaagccagattaattattcggaacctgagctttaagtgttcagaagatgacttgaagacagtatttgctcaatttggagctgtcctggaagtaaatatccctaggaaaccagatgggaagatgcgcggttttggttttgttcagttcaaaaacctcctagaagcaggtaaagctctcaaaggcatgaacatgaaagagataaaaggccggacagtggctgtggattgggccgtggcaaaggataaatataaagatacacagtctgtttctgctataggtgaggaaaagagccatgaatctaaacatcaggaatcagttaaaaagaagggcagagaggaagaggatatggaagaggaagaaaacgatgatgatgacgatgatgatgatgaagaagatggggtttttgatgatgaagatgaagaggaagagaatatagaatcaaaggtgaccaagcctgtgcaaattcagaagagagcagtcaagagaccagcccctgcaaaaagcagtgatcattctgaggaggacagtgacctagaggaaagcgatagtattgatgatggagaggaactggctcagagtgataccagcactgaggagcaagaggataaagctgtgcaagtctcaaacaaaaagaagaggaaattaccctctgatgtgaatgaagggaaaactgtttttatcagaaatctgtcctttgactcagaagaagaagaacttggggagcttctccaacagtttggagaactcaaatatgtccgcattgtcttgcatccagacacagagcattctaaaggttgtgcatttgcccagttcatgactcaagaagcagctcagaaatgccttctagctgcttctccagagaatgaggctggtgggcttaaactggatggccggcagctcaaggttgacttggcggtgacccgtgatgaggctgcaaagcttcagacgacgaaggtgaagaagccgactggcacccggaatctctatctggcccgagaaggcttgattcgtgctgggacgaaggctgcagagggtgtgagtgctgctgatatggccaaaagagaacggtttgagctgctgaagcatcagaaactcaaggaccagaatatctttgtctcccgaaccaggctctgcctgcacaatctcccaaaggctgtagatgacaaacagctcagaaagctgctgctgagtgctactagtggagagaaaggggtgcgcatcaaggagtgtagagtgatgcgagacctcaaaggagttcatgggaacatgaagggtcagtccctgggctacgcctttgcggagttccaagagcacgagcatgccctgaaagccctccgcctcatcaacaacaatccagaaatctttgggcctctgaagagaccaatagtggagttctctttagaagatcgaagaaaacttaaaatgaaggaattaaggatccagcgcagcttgcaaaaaatgagatccaagcctgcaactggtgagcctcagaaggggcaaccagagcctgcaaaagaccagcaacagaaggcagctcaacaccacacagaggaacaaagcaaggtgcccccagagcagaagagaaaggcgggctctacctcatggaccgggttccagaccaaggctgaagtggagcaggtggagctgcctgatggaaagaagagaagaaaggtcctggcgctcccctcacaccgaggccccaaaatcaggttgcgggacaaaggcaaagtgaagcccgtccatcccaaaaagccaaagccacagataaaccagtggaagcaggagaagcagcaattatcgtccgagcaggtatctaggaaaaaagctaagggaaataagacggaaacccgcttcaaccagctggtcgaacaatataagcggaaattattgggaccttctaaaggagcacctcttgcaaagaggagcaaatggtttgatagttgatgatggcagcaggctgggtaagaagctgggttgtgtactttctggtgacactcctgggctcctccccatcccccgtgtctctcactgagggaaagaaaatccccaagggcactgccactgtgctcggaggtgccctggactgtgtacatctgaactttggtccatcctttgatgtgtggttcgttagccacaaagagaaatatctgaaagtcaacatgatgcttcttgcatattatccagattattgtatgaagttgtgtctataattattaccaattttttattctttatttctcaaatggaaacacctgaaaaagcattctggagtgctgaatttttaagatgtatattttgttaagcatattctctaaatgagatattgtgtggctttttagtaacaacgtcatttctaat

SEQ ID NO: 11212 - protein, 759 aa, Homo sapiens
MAGLTLFVGRLPPSARSEQLEELFSQVGPVKQCFVVTEKGSKACRGFGYVTFSMLEDVQRALKEITTFEGCKINVTVAKKKLRNKTKEKGKNENSECPKKEPKAKKAKVADKKARLIIRNLSFKCSEDDLKTVFAQFGAVLEVNIPRKPDGKMRGFGFVQFKNLLEAGKALKGMNMKEIKGRTVAVDWAVAKDKYKDTQSVSAIGEEKSHESKHQESVKKKGREEEDMEEEENDDDDDDDDEEDGVFDDEDEEEENIESKVTKPVQIQKRAVKRPAPAKSSDHSEEDSDLEESDSIDDGEELAQSDTSTEEQEDKAVQVSNKKKRKLPSDVNEGKTVFIRNLSFDSEEEELGELLQQFGELKYVRIVLHPDTEHSKGCAFAQFMTQEAAQKCLLAASPENEAGGLKLDGRQLKVDLAVTRDEAAKLQTTKVKKPTGTRNLYLAREGLIRAGTKAAEGVSAADMAKRERFELLKHQKLKDQNIFVSRTRLCLHNLPKAVDDKQLRKLLLSATSGEKGVRIKECRVMRDLKGVHGNMKGQSLGYAFAEFQEHEHALKALRLINNNPEIFGPLKRPIVEFSLEDRRKLKMKELRIQRSLQKMRSKPATGEPQKGQPEPAKDQQQKAAQHHTEEQSKVPPEQKRKAGSTSWTGFQTKAEVEQVELPDGKKRRKVLALPSHRGPKIRLRDKGKVKPVHPKKPKPQINQWKQEKQQLSSEQVSRKKAKGNKTETRFNQLVEQYKRKLLGPSKGAPLAKRSKWFDS

SEQ ID NO: 11213 - DNA, 1716 bp, Homo sapiens
  CDS (88)..(1605)
tgcaacactgtggtgctgccccagtggcactccttctccaggacccacaacgtctgtgaactctgtgtcaaccagacctccgggggcatgaagccgagctcggtcagcgtgccacagtgcagcttttttgaaatggcagcagctctggattctttctacctcaaggagcagaccttttatcatgtggcatcagacagcatagaatgcagcaattttttaacttcctatagccccttcagctactacactgcatgttgcaggaccataagcaggggtgtgtcaggcttcatcgactctgaacaaggtgtctttgaagcccctactgttgcattttcttcccttgagaagaaatgtgaggttgatgccccaagctccgttcctcacattgaggagaacaggtatctctttccagaagtggacatgactagcacaaacttcacaggcctgagctgcagaaccaacaagactctcaacatctaccttttggattcaaatttgttttggttatatgcagagagactgggtgctccgagctccactcaggtgaaagaatttgcggcaattgttgacgtgaaagaagaatctcattacatcttggatccaaagcaagcactgatgaagctcaccctagagtcttttattcaaaacttcagcgttctctatagtcccttgaaaaggcatctcattggaagtggctctgcccagttcccgtctcagcatttaatcactgaagtgacaactgataccttttgggaagtagtccttcaaaaacaggacgttctcctgctctattacgctccgtggtgcggcttctgtccatccctcaatcacatcttcatccagctagctcggaacctgcccatggacacattcactgtggcaaggattgacgtgtctcagaatgaccttccttgggaatttatggtcgatcgtcttcctactgtcttgttttttccctgcaacagaaaggacctaagtgtgaaataccccgaagacgtccccatcacccttccaaacctgttgaggttcattttgcatcactcagaccctgcttccagcccccagaatgtggctaactctcctaccaaggagtgtcttcagagcgaggcagtcttacagcgggggcacatctcccacttggagagagagatccagaaactgagagcagaaataagcagcctccagcgagcacaagtgcaggtggagtcccagctctccagtgcccgcagagatgagcaccggctgcggcagcagcagcgggccctggaagagcagcacagcctgctccacgcacacagtgagcagctgcaggccctctatgagcagaagacacgtgagctgcaggagctggcccgcaagctgcaggagctggccgatgcctcagaaaacctccttaccgagaacacgtggctcaagatcctggtggcgaccatggagaggaaactggagggcagggatggagctgaaagcctggcggcccagagagaggtccaccccaagcagcctgagccctcagccaccccccagctccctggcagctcccctccacctgccaatgtcagcgccacactggtgtctgaaaggaataaggagaacaggacagactaactttttaaatgatatgaagaaatcagaggtgaaaattgtacattgggaatatatttatgcaaattttattgaaatttattgtaaataaagattttctcagtggtctag

SEQ ID NO: 11214 - protein, 506 aa, Homo sapiens
MKPSSVSVPQCSFFEMAAALDSFYLKEQTFYHVASDSIECSNFLTSYSPFSYYTACCRTISRGVSGFIDSEQGVFEAPTVAFSSLEKKCEVDAPSSVPHIEENRYLFPEVDMTSTNFTGLSCRTNKTLNIYLLDSNLFWLYAERLGAPSSTQVKEFAAIVDVKEESHYILDPKQALMKLTLESFIQNFSVLYSPLKRHLIGSGSAQFPSQHLITEVTTDTFWEVVLQKQDVLLLYYAPWCGFCPSLNHIFIQLARNLPMDTFTVARIDVSQNDLPWEFMVDRLPTVLFFPCNRKDLSVKYPEDVPITLPNLLRFILHHSDPASSPQNVANSPTKECLQSEAVLQRGHISHLEREIQKLRAEISSLQRAQVQVESQLSSARRDEHRLRQQQRALEEQHSLLHAHSEQLQALYEQKTRELQELARKLQELADASENLLTENTWLKILVATMERKLEGRDGAESLAAQREVHPKQPEPSATPQLPGSSPPPANVSATLVSERNKENRTD

SEQ ID NO: 11215 - DNA, 1966 bp, Homo sapiens
  CDS (158)..(1804)
aagattgcatgggaactggatcagactgtacttggaggaaaagcattcagaagtcctattcaacctgggctccaaggttctcaggcagtacctggatgctctgaagacgctgagcttgtccctgagtgcacaagtggcccagtacgacatctattcgatgatggtggggactgtcgtggttttggaggttctcaccctgctcctgctcagcgtcccacaggcactgcgcagaaaggctgagctggaagtcccactgtcatctcctgggttttctctgctcttttatttggtgatcctggttctttcggccgttcacgtcattgtgtgcacctcagctgaaagttcgtgctacttctgtggcctctcgtggctggcggcaggtggggtgatggtgctggcctcggcgctgctgtgtgtgattgtgtctgttctgaccaacgtgctcgtgggtggaaacaccccaaggaagaaccccatgcatcccagctcaaggtggtcagagctagaccttcttattctgttggggacggcgggccacgtcttgagcctgggcgccagcagcttcgtggaggaggagcaccagacctggtacttccttgtgaacaccctgtgtctagctctgagccaagaaacctacagaaactactttctgggagatgacggtgagcctccgtgtggcctctgtgtggaacaagggcatgacggggccacagcagcgtggcaggacgggcctggctgtgatatcctggagcgagacaaaggccacggaagcccctctacctccgaagtgctcagaggccgcgagaagtggatggtgctggccagtccgtggctaatactggcctgctgccggctgctgcgctccctaaaccagacaggtgtgcagtgggctcaccggcctgacctcggccactggctcaccagctctgaccacaaagccgagctctctgtcctggctgccctctccctcctcgtagtttttgtgctggtgcagagggggtgctcccctgtgtccaaggctgccctggcgctggggctgctgggcgtctactgctaccgggcggccatcgggagtgtccggttcccgtggcggccggacagcaaggacatttccaagggtattattgaagctcgttttgtttatgtctttgtccttggcattctgttcacgggcaccaaagacttacttaaatctcaagtcattgctgcagacttcaaactcaagactgtaggtttatgggagatatatagtggattagttcttctggcagccttgctctttagaccacataatcttccggtcttagcatttagcctcttgattcagactctaatgactaaattcatctggaagcccctgagacacgatgcagctgagattactgtgatgcattattggtttggtcaagcattcttctattttcagggcaactccaacaacattgccaccgtggacatctccgcaggcttcgtgggcttagacacctacgtggaaatcccagccgtgctcctgacagcgtttgggacgtacgcagggcctgtgctgtgggccagccacttagtgcacttcctgagctcagaaacacgcagtggttcagcactgagtcatgcttgcttctgctacgcactgatttgttctattccagttttcacgtacatcgttttggtgacatctctgcgttatcatttatttatatggagtgtattttctccaaaacttctctacgagggaatgcacctgctcattacagctgctgtctgtgtattcttcacggcaatggatcaaaccagactcacacagtcttagactaagctgaacactggaaaaataatacatgcttaaagtctgctgttattctaaaatgaaagatatgaattcaacaaagttgatggataactttctttgactgctctacctgaatttagactaagcagtaaatagtttaataaaagatcactttaatat

SEQ ID NO: 11216 - protein, 549 aa, Homo sapiens [sequence omitted]

SEQ ID NO: 11217 - DNA, 1624 bp, Homo sapiens
  CDS (519)..(1502)
atgaccttctacagtgaggtgaaacaaatagagaagagaaggttgaaaagagaagtaacagtgacagcaaagaaaaccgggaaacaaaattaaatggtcctggtgaaaacgtcagtgaggatgaggctcagtcaagtaatcaacgtaagagagctaataagcacaagtgggtaccactccacttagatgttgtaagatcagagagtcaagaaagacctggatcccggaacagctcaagatgtcaacctgaagcaaataaaccaacacataacaataggagaaatgatacacgaagttggaagcgagatagagaaaaaagagatgatcaagatgacgtttccagtgtgagaagtgagggtggtaatatccgaggttcctttagaggtcgaggaagaggccgaggacggggaagaggacgaggcagaggaaatcctcgatcgaactttgattattcatatggttatcaagaacatggtgaaaggactgatcaaccatttcaaacagaacttaataccagtatgatgtattactatgatgatggtacaggtgtacaggtgtatcctgtggaagaagcgttgcttaaagagtatattaagcgtcaaattgaatattacttcagtgtagaaaatttggaacgagacttctttcttcggggaaagatggatgaacaaggtttcttgcctatttccctgattgctggttttcagcgtgttcaggctctcactacaaaccttaatctcatcttagaggcactgaaggatagcacagaagtagaaattgtggatgagaaaatgagaaaagagatagaaccagaaaaatggccaattccaggccctcctccacgcagtgtgccaccaacagacttctctcaactgattgattgtccagagtttgtaccaggccaagccttttgctcacatacagagtctgccccaaattctccaagaattggaagcccattgagcccaaagaaaaacagtgaaacaagtattcttcaagcaatgtctagaggtttgtctaccagtttgcctgacttggactcagaaccttggatagaagttaaaaaaagacatcagccagccccagtgaaattgagggaatcagtgtctgtccctgaagggtcattaaatcagctatgttcttcagaagaaccagaacaagaagaacttgattttttgtttgatgaagagattgaacaaataggacgaaaaaacacatttactgattggtctgataatgattcagattatgaaattgatgaccaagacttaaacaagattttgattgtaactcagacaccaccttatgtgaaaaaacatcgtggaggagatcgaacaggcacccacatgtctcgggcaaaaatcacatctgaacttgctaaagttatcaatgatggcttatattattatgaacaggatctatggatggaagaagatgaaaacaaacacacagccataaaggtaattgtttctggccaacatctttctactgatgctttgttttgattgtatgttgctgtttatattttctcaaacttgaggctctattttatgaaatgttgaatataaatacattgtatttaacttgaaaaattcctggaaatatacctgataattaccacctg

SEQ ID NO: 11218 - protein, 328 aa, Homo sapiens [sequence omitted]

SEQ ID NO: 11219 - DNA, 2500 bp, Homo sapiens
  CDS (99)..(1958)
caggggagctcagtctgctatcgtacattaggcctgacgttaaagggctttcaacgcttcaggatattgaaataggagtgcagcatattttagcagatatgattgctaaagacaaagacacgcttgacttcattcggaacttgtgccagaagagacatgtttgtatccagtcatctctggcaaaagtatcctcaaaaaaggtaaatgagaaagatgttgataagtttctgctctaccagcatttttcctgcaacataagaaacattcaccatcatcagattctggcaattaaccgtggagaaaatttgaaggtactgacggttaaggtcaatatttctgatggagtgaaggatgaattctgtaggtggtgcatccaaaacaggtggagaccacgtagctttgcaaggccagagttaatgaagatcttatataattcactgaatgattcctttaaacgccttatttatcctcttctctgtagagaattcagagccaaactaacatcagatgcagagaaggaatcagtaatgatgtttggacggaaccttcgtcagctccttttaacaagccctgttccagggcgcaccttaatgggagtggatcctggttataaacatggttgcaaattagctataatttctcctactagtcagatacttcatactgatgtggtttacttgcattgtggacaaggcttccgagaggcggagaaaataaagacacttttgctgaatttcaactgcagcacagtagtgattggaagtggaactgcctgcagggaaacagaagcttactttgctgacctgataatgaagaattattttgcaccactggatgttgtttactgtatcgtcagtgaagcaggagcatcaatctacagtgtcagccctgaagctaacaaagagatgccagggctggaccctaatttgagaagtgcagtttccatagcaaggcgtgtacaagatccattagctgagctagtgaaaattgagccaaagcacattggagttggaatgtatcagcatgacgtatcccagactttactcaaggcaacactggacagtgttgtagaagaatgtgtcagctttgtgggagtggatattaacatctgttcagaagttttgttaaggcatattgcaggactcaatgccaacagggccaaaaatattattgaatggcgagagaaaaatggaccctttatcaaccgagaacagctgaagaaagtgaaagggctgggcccaaaatccttccaacagtgtgctggcttcatcagaatcaaccaggattatatccgaacgttttgcagtcagcaaactgaaacttcaggccaaattcaaggagttgctgtgacatctccagcagacgttgaggtcacaaatgagaagcagggcaaaaagaagagcaaaactgcagtgaatgttttactgaagccaaatcctttggaccaaacttgtattcatccagaatcatatgacatagcaatgaggtttttgtcatccattggagggacactgtatgaggttggaaagcctgaaatgcaacaaaaaataaattcattccttgaaaaggaaggaatggagaaaattgcagaaagattgcaaacaacagtacacaccttacaggtcatcatagatggtctcagccagcctgaaagctttgactttcgaacagattttgataaacctgatttcaagagaagcatagtatgcctggaagatctgcagattgggacagttcttacaggcaaagttgagaatgccactctctttggaatttttgtggatataggagtggggaaatctgggctgattcccatacgaaatgtaacagaagcaaaactttcaaaaacaaagaagagaagaagccttggactgggccccggagaaagagtggaagtccaagtactcaacattgacatcccccgatctaggattactctggacctcattcgggtgttatgagtatcccacgaaggccagacgctgattttattttctcatttccacagattgacaaggataagtcagttgtttgtaaactctaggtagcagatgagaaataattcacttaatatcagaaatattttccaaacactttcctttattttttcttctgaataaatagaaaaccaacagtttgatttccttttcccttaaaggaaacaactaatacacattcttatatggctttatgtagtaatagttttctgactaaaattttgttttttattttttgtaatttatctttaactccttttgcattttgtataacagattgcttaacttctacttgccaacatctgccttgctggacttgtatgggattgtcttcttgatttgaattgtaccgtctttgttgacacagtagggctgggcagtgtttaatccttccattttatagatttttttttaatcaggccttttggacttcattcataattttgcaataatctcttttcccttgtcatgcaagccaaaaatataccagtaaaacagaaaac

SEQ ID NO: 11220 - protein, 620 aa, Homo sapiens
MIAKDKDTLDFIRNLCQKRHVCIQSSLAKVSSKKVNEKDVDKFLLYQHFSCNIRNIHHHQILAINRGENLKVLTVKVNISDGVKDEFCRWCIQNRWRPRSFARPELMKILYNSLNDSFKRLIYPLLCREFRAKLTSDAEKESVMMFGRNLRQLLLTSPVPGRTLMGVDPGYKHGCKLAIISPTSQILHTDVVYLHCGQGFREAEKIKTLLLNFNCSTVVIGSGTACRETEAYFADLIMKNYFAPLDVVYCIVSEAGASIYSVSPEANKEMPGLDPNLRSAVSIARRVQDPLAELVKIEPKHIGVGMYQHDVSQTLLKATLDSVVEECVSFVGVDINICSEVLLRHIAGLNANRAKNIIEWREKNGPFINREQLKKVKGLGPKSFQQCAGFIRINQDYIRTFCSQQTETSGQIQGVAVTSPADVEVTNEKQGKKKSKTAVNVLLKPNPLDQTCIHPESYDIAMRFLSSIGGTLYEVGKPEMQQKINSFLEKEGMEKIAERLQTTVHTLQVIIDGLSQPESFDFRTDFDKPDFKRSIVCLEDLQIGTVLTGKVENATLFGIFVDIGVGKSGLIPIRNVTEAKLSKTKKRRSLGLGPGERVEVQVLNIDIPRSRITLDLIRVL

SEQ ID NO: 11221 - DNA, 1966 bp, Homo sapiens
  CDS (28)..(1098)
aaaaaaaaaggtaacttcagtgcgtttatgcagaaggagatcttcgaacagccagaatcagttttcaatactatgagaggtcgggtgaattttgaaaccaacacagtgctcctgggtggcttgaaggaccacttgaaggagattcgacgatgccgacggctcatcgtgattggctgtggaaccagctaccacgctgccgtggctacgcggcaagttttggaggaactgactgagcttcctgtgatggttgaacttgctagtgattttctggacaggaacacacctgtgttcagggatgacgtttgctttttcatcagccagtcaggcgagaccgcggacaccctcctggcgctgcgctactgtaaggaccgcggcgctctcaccgtgggcgtcaccaacaccgtgggcagctccatctctcgcgagaccgactgcggcgtccacatcaacgcagggccggagatcggcgtggccagcaccaaggcttataccagtcagttcatctctctggtgatgtttggtttgatgatgtctgaagaccgaatttcactacaaaacaggaggcaagagatcatccgtggcttgagatctttacctgagctgatcaaggaagtgctgtctctggaggagaagatccacgacttggccctggagctctacacgcagagatcgctgctggtgatggggcggggctacaactatgccacctgcctggaaggagccctgaaaattaaagagataacctacatgcactcagaaggcatcctggctggggagctgaagcacgggcccctggcactgattgacaagcagatgcccgtcatcatggtcattatgaaggatccttgcttcgccaaatgccagaacgccctgcagcaagtcacggcccgccagggtcgccccattatactgtgctccaaggacgatactgaaagttccaagtttgcgtataagacaattgagctgccccacactgtggactgcctccagggcatcctgagcgtgattccgctgcagctgctgtccttccacctggctgttctccgaggatatgacgttgacttccccagaaatctggccaagtctgtaactgtggaatgaggctgagaccgtgacaagaccatcaccacctttcatctgattccagacctgtcccaacagcagggatgctacatgggaagagaagtggacatcccacatgttctgcgtgctcctgtagagcttgacagcttccacgtgccttctacccaagtgcttttgcttacagcagatactgtttctctgtgtcctgaagtcgccagaggagaagggaatcattgtttacacatggggatcagagcagacttctccactactgtgcaatagagatacagctctcttcagagtaactgtgaaccttttataaccaacactagagttagttttaaaagacaagatatttataatgacgactgtatagcttttaagttatttttctagtatgtggctttctgtagccgtggtaacggccaaactgttcatcctagctacccatgctctgtgtccaggcttgctcctggcaggtggcattcatctcagatgtgagcacaaggcattggccctctggactcctttctccttttctttcctctctaggctgctcctgaatcctgttctctgacatccgtggagcccctcctgcatccacctatgcctcctataagtccagttgaaatctcagcctccttcaacattttcttctcgtgtgtggcccacatccctccacttctccaacttctgtttaatctgatcacggctctttttaagccctggcagcattttggtccctgctccttgcccatagtaaaacagcttgaaatatcccatgcaagagagtagtttcaagtgggcaactctgctctctatttaaaagcgttcacaatcaaaagtactatgcaattttaggacaataaagaacatacagttt

SEQ ID NO: 11222 - protein, 357 aa, Homo sapiens
MQKEIFEQPESVFNTMRGRVNFETNTVLLGGLKDHLKEIRRCRRLIVIGCGTSYHAAVATRQVLEELTELPVMVELASDFLDRNTPVFRDDVCFFISQSGETADTLLALRYCKDRGALTVGVTNTVGSSISRETDCGVHINAGPEIGVASTKAYTSQFISLVMFGLMMSEDRISLQNRRQEIIRGLRSLPELIKEVLSLEEKIHDLALELYTQRSLLVMGRGYNYATCLEGALKIKEITYMHSEGILAGELKHGPLALIDKQMPVIMVIMKDPCFAKCQNALQQVTARQGRPIILCSKDDTESSKFAYKTIELPHTVDCLQGILSVIPLQLLSFHLAVLRGYDVDFPRNLAKSVTVE

SEQ ID NO: 11223 - DNA, 2058 bp, Homo sapiens
  CDS (1)..(684)
atggcagtggagtcattcatggcaacagccccctttgtccaaattggcaggtttttcctctcgtcaggcctcatcgacaaagtcgacaacttcaagtccctgagcctatccaagctggaggaccctcatgtggacatcattcgccgtggagactttttctaccacagcgaaaatcccaagtatccagaggtgggagacttgcgtgtctccttttcctatgctggactgagcggcgatgaccctgacctgggcccagctcacgtggtcactgtgattgcccggcagcggggtgaccagctagtcccattctccaccaagtctggggataccttactgctcctgcaccacggggacttctcagcagaggaggtgtttcatagagaactaaggagcaactccatgaagacctggggcctgcgggcagctggctggatggccatgttcatgggcctcaaccttatgacacggatcctctacaccttggtggactggtttcctgttttccgagacctggtcaacattggcctgaaagcctttgccttctgtgtggccacctcgctgaccctgctgaccgtggcggctggctggctcttctaccgacccctgtgggccctcctcattgccggcctggcccttgtgcccatccttgttgctcggacacgggtgccagccaaaaagttggagtgaaaagaccctggcacccgcccgacacctgcgtgagccctaggatccaggtcctctctcacctctgacccagctccatgccagagcaggagccccggtcaattttggactctgcactccctctcctcttcaggggccagacttggcagcatgtgcaccaggttggtgttcaccagctcatgtcttccccacatctcttcttgccagtaagcagctttggtgggcagcagcagctcatgaatggcaagctgacagcttctcctgctgtttccttcctctcttggactgagtgggtacggccagccactcagcccattggcagctgacaacgcagacacgctctacggaggcctgctgataaagggctcagccttgccgtgtgctgcttctcatcactgcacacaagtgccatgctttgccaccaccaccaagcacatctgtgatcctgaagggcggccgttagtcattactgctgagtcctgggtcaccagcagacacactgggcatggacccctcaaagcaggcacacccaaaacacaagtctgtggctagaacctgatgtggtgtttaaaagagaagaaacactgaagatgtcctgaggagaaaagctggacatatactgggcttcacacttatcttatggcttggcagaatctttgtagtgtgtgggatctctgaaggccctatttaagtttttcttcgttactttgctgcttcatgtgtactttcctaccccaagaggaagttttctgaaataagatttaaaaacaaaacaaaaaaaacacttaatatttcagactgttacaggaaacaccctttagtctgtcagttgaattcagagcactgaaaggtgttaaattggggtatgtggtttgattgataaaaagttacctctcagtattttgtgtcactgagaagctttacaatggatgcttttgaaacaagtatcagcaaaaggatttgttttcactctgggaggagagggtggagaaagcacttgctttcatcctctggcatcggaaactcccctatgcacttgaagatggtttaaaagattaaagaaacgattaagagaaaaggttggaagctttatactaaatgggctccttcatggtgacgccccgtcaaccacaatcaagaactgaggcctgaggctggttgtacaatgcccacgcctgcctggctgctttcacctgggagtgctttcgatgtgggcacctgggcttcctagggctgcttctgagtggttctttcacgtgttgtgtccatagctttagtcttcctaaataagatccacccacacctaagtcacagaatttctaagttccccaactactctcacacccttttaaagataaagtatgttgtaaccag

SEQ ID NO: 11224 - protein, 228 aa, Homo sapiens
MAVESFMATAPFVQIGRFFLSSGLIDKVDNFKSLSLSKLEDPHVDIIRRGDFFYHSENPKYPEVGDLRVSFSYAGLSGDDPDLGPAHVVTVIARQRGDQLVPFSTKSGDTLLLLHHGDFSAEEVFHRELRSNSMKTWGLRAAGWMAMFMGLNLMTRILYTLVDWFPVFRDLVNIGLKAFAFCVATSLTLLTVAAGWLFYRPLWALLIAGLALVPILVARTRVPAKKLE

SEQ ID NO: 11225 - DNA, 1863 bp, Homo sapiens
  CDS (7)..(1329)
agatgcatgttgcagtgtccatcagtagaagtcagcttcttacctctcatagtgaatacagttgctctgcctgatgaattgagctacatatgtacacatggggaagactgggatgtagcttacattattcatctttatccttctctcactttgcggaatcttctcccatattccctaagatatttacttgagggaacagcagaaactcatgagctggcagaaggcagtactgctgatgttctgcattcgagaatcagtggtgaaataatggaattagtcctggtgaaataccagggcaaaaactggaatggacatttccgcatacgtgatacactaccagaattctttcctgtgtgtttttcttctgactccacagaagtgacgacagtcgacctgtcagtccacgtcaggagaattggcagccggatggtgctgtctgtctttagtccctattggttaatcaacaagactacccgggttctccagtatcgttcagaagatattcatgtgaaacatccagctgatttcagggatattattttattttctttcaagaagaagaacatttttactaaaaataaggtacaattaaaaatttcaaccagtgcctggtccagtagtttctcattggatacagtgggaagttatgggtgtgtgaagtgtcctgccaacaatatggagtacctggttggtgttagcatcaaaatgagcagtttcaacctttcacgaatagttaccctgactcccttttgtaccattgcaaacaagtcatcattagaactagaagttggcgagattgcatctgatggctcaatgccaactaataaatggaactatattgcttcttcagagtgccttccattttggccagaaaatttgtcaggcaaactttgtgtgagagtggtgggctgtgaaggatcttccaaaccattcttttataaccgacaggataatggcactttattgagcttagaagatctgaatgggggtatcttggtggatgtaaacactgccgaacattcaactgtcataactttttctgattaccatgagggatctgcacctgccttgataatgaaccatacaccatgggacatcctcacatacaaacagagtgggtcaccagaagaaatggtcttgctgccaagacaggctcgactttttgcctgggcagatcctactggtaccagaaaacttacatggacatatgcagcaaatgttggggaacatgatctgttaaaggtatcttttgatgtgaatgagtgctatatgagttacctgacagtgaaggaagtagagaagctatcttcactgactccttgtcctaattgaactaaaagtgaattggaagtatttccagaataagtagcttttggactttagatggcaaatactgtagttcaaaccagtatattactttagctctatcaaagtaatttatttacaatttaaaaaatagacctgctttatcttgcctatgtaaagcacctttttaattaatttacctattttaaaaggaaggaattgtaagactaagttaaaaacaactttattttgaacatacctatgccacttttggctatgagtttttaaagcttgttttcctaagcacagctatgtattttgttaattaatgaagtctgatagtatgcaaattatcgcatgtaagaaatttagtgaaatatttatcgaaacaatatttaggtagctgagttgattaaatatgttattttttagactcttagcctctgaaagggcccaaagaattcatataccatcctcccatctgatataggaattgctcctgcattagtaatatatcatccagtttctgtatgaataaaatccatgatgaaagagttt

SEQ ID NO: 11226 - protein, 441 aa, Homo sapiens
MLQCPSVEVSFLPLIVNTVALPDELSYICTHGEDWDVAYIIHLYPSLTLRNLLPYSLRYLLEGTAETHELAEGSTADVLHSRISGEIMELVLVKYQGKNWNGHFRIRDTLPEFFPVCFSSDSTEVTTVDLSVHVRRIGSRMVLSVFSPYWLINKTTRVLQYRSEDIHVKHPADFRDIILFSFKKKNIFTKNKVQLKISTSAWSSSFSLDTVGSYGCVKCPANNMEYLVGVSIKMSSFNLSRIVTLTPFCTIANKSSLELEVGEIASDGSMPTNKWNYIASSECLPFWPENLSGKLCVRVVGCEGSSKPFFYNRQDNGTLLSLEDLNGGILVDVNTAEHSTVITFSDYHEGSAPALIMNHTPWDILTYKQSGSPEEMVLLPRQARLFAWADPTGTRKLTWTYAANVGEHDLLKVSFDVNECYMSYLTVKEVEKLSSLTPCPN

SEQ ID NO: 11227 - DNA, 2088 bp, Homo sapiens
  CDS (755)..(1483)
actcattgttcgcagctgatgtcactcgcagttgtgagcggccgcctctcccggggacaatgtgggactgagcggcccagccgccgtgccgccgccgccgccgccgcaggacagccccagcgaggccatttccagcacatagaagagagattggaaaccaacgtgcagaactgccagtcccctgacacgctgtgccccacccactgcagcccagtgctgaatgaaccctgcccagaggtgtctgtagtgagcttctgccctagtgacttttggtaggtgggagtgtgcctcaattcccccctcaacccctgcctcaagcctttaccaggcagtggcaagacctgaccacacccgaggcctccctgccttcaaggcttcccatggctgctccagcttcctccccagctgctcttctgtgctccatccaccatctggctgctggacgaaagtgcctctcatatggaagccggccaggttgcagcgcggacacactcgcaggtcgctgtggccccagcctcgcctgacagaatgagcggctcggacgggggactggaggaggagccagagctcagcatcaccctcacgctgcggatgctgatgcacgggaaggaagtgggcagcatcatcgggaagaagggcgagactgtaaagcgaatccgggagcagtgcccggatcaccatctccgagggctcctgccctgaacgcatcaccaccatcaccgggtctacagcagctgtcttccatgcagtctccatgattgctttcaaactggatgaggacctttgtgctgctcctgcaaatggtggaaatgtctccaggcctccagtgaccctgcgccttgtcatccctgccagtcagtgtggctcactgattgggaaggctggcaccaagatcaaggagatccgagaggtcaccaagctccagcagctctcaagccatgcggtcccctttgccacacccagcgtggtgccaggactggatcccggcacacagaccagctcacaggagttcttggttcccaacgatttgattggctgtgtgatcgggcgccagggcagcaagatcagcgagatccggcagatgtcaggggcacatatcaagatcgggaaccaagcagagggcgctggggagcggcatgtcaccatcactggctctccggtctccatcgccctggcccagtacctcatcactgcctgtctagagacggccaagtctacctctggggggacgcccagctcggcccccgcagacctgcctgcccccttctcgccacccctgacggccctgcccacagctccccctggcctgctgggcacaccctatgccatctccctctccaacttcatcggcctcaagcccatgcccttcttggctttaccacctgcttccccagggccgccgccgggcttggcggcctacactgccaagatggcagcagctaatgggagcaagaaggctgagcggcagaaattctccccctactgaggccagctgaggtacaggcaggggcaggcaggaccaccagcagggggctgcctctgcaccctacccgcccaaggagactccaccctggggtcccaaacgccgctaacgcccagacgcatggatgcaccccctaccctgcctccatctatgggagttctttctctcagagtgggggcagtttctggcccaggggtctgagctgcggcagccccagggcagggggccctacctcctcagctctgtgcttggatacagggagcagccaggagactccctagtgcccccaccatggcgggtgtcactcacgcactccccatcccttagggcttcctggcctactgcatccttgtgggagtcagggaggagggcccgttgggtagctggggccaggcttctctccccaccacctgcagatttcttgctgcttccactgatacccttttgactggaatgaactggctgggcttgtcagggggcaccccaaagagggggcactgccaggtagctgggggagtggcatggggcaggggcccagttctcagcagcagacactctgtacagttttttcaatccctgtttttgaataaatattctcagcgacc

SEQ ID NO: 11228 - protein, 243 aa, Homo sapiens
MIAFKLDEDLCAAPANGGNVSRPPVTLRLVIPASQCGSLIGKAGTKIKEIREVTKLQQLSSHAVPFATPSVVPGLDPGTQTSSQEFLVPNDLIGCVIGRQGSKISEIRQMSGAHIKIGNQAEGAGERHVTITGSPVSIALAQYLITACLETAKSTSGGTPSSAPADLPAPFSPPLTALPTAPPGLLGTPYAISLSNFIGLKPMPFLALPPASPGPPPGLAAYTAKMAAANGSKKAERQKFSPY

SEQ ID NO: 11229 - DNA, 1972 bp, Homo sapiens
  CDS (442)..(1566)
gaagaagaagaacttctaggtcctaaactagaagaggaagaagaagaggaagtagttgaaaatgatgaggagatagccttttcaggcaaggacaagccagcttcagagaatagtgaggagaagctgatcagtaagtttgacaagcttccagtaaagatcgtacagaagaatgatccatttgtggtggactgctcagataagcttgggcgtgtgcaggagtttgacagtggcctgctgcactggcggattggtgggggggacaccactgagcatatccagacccacttcgagagcaagacagagctgctgccttcccggcctcacgcaccctgcccaccagcccctcggaagcatgtgacaacagcagagggtacaccagggacaacagaccaggaggggcccccacctgatggacctccagaaaaacggatcacagccactatggatgacatgttgtctactcggtctagcaccttgaccgaggatggagctaagagttcagaggccatcaaggagagcagcaagtttccatttggcattagcccagcacagagccaccggaacatcaagatcctagaggacgaaccccacagtaaggatgagaccccactgtgtacccttctggactggcaggattctcttgccaagcgctgcgtctgtgtgtccaataccattcgaagcctgtcatttgtgccaggcaatgactttgagatgtccaaacacccagggctgctgctcatcctgggcaagctgatcctgctgcaccacaagcacccagaacggaagcaggcaccactaacttatgaaaaggaggaggaacaggaccaaggggtgagctgcaacaaagtggagtggtggtgggactgcttggagatgctccgggaaaacaccttggttacactcgccaacatctcggggcagttggacctatctccataccccgagagcatttgcctgcctgtcctggacggactcctacactgggcagtttgcccttcagctgaagcccaggaccccttttccaccctgggccccaatgccgtcctttccccgcagagactggtcttggaaaccctcagcaaactcagcatccaggacaacaatgtggacctgattctggccacaccccccttcagccgcctggagaagttgtatagcactatggtgcgcttcctcagtgaccgaaagaacccggtgtgccgggagatggctgtggtactgctggccaacctggctcagggggacagcctggcagctcgtgccattgcagtgcagaagggcagtatcggcaacctcctgggcttcctagaggacagccttgccgccacacagttccagcagagccaggccagcctcctccacatgcagaacccaccctttgagccaactagtgtggacatgatgcggcgggctgcccgcgcgctgcttgccttggccaaggtggacgagaaccactcagagtttactctgtacgaatcacggctgttggacatctcggtatcaccgttgatgaactcattggtttcacaagtcatttgtgatgtactgtttttgattggccagtcatgacagccgtgggacacctcccccccccgtgtgtgtgtgcgtgtgtggagaacttagaaactgactgttgccctttatttatgcaaaaccacctcagaatccagtttaccctgtgctgtccagcttctcccttgggaaaaagtctctcctgtttctctctcctccttccacctcccctccctccatcacctcacgcctttctgttccttgtcctcaccttactcccctcaggaccctaccccaccctctttgaaaagacaaagctctgcctacatagaagactttttttattttaaccaaagttactgttgtttacagtgagtttggggaaaaaaaataaaataaaaatggctttcccagtccttgcatcaacgggatgccacatttcataactgtttttaatggt

SEQ ID NO: 11230 - protein, 375 aa, Homo sapiens
MDDMLSTRSSTLTEDGAKSSEAIKESSKFPFGISPAQSHRNIKILEDEPHSKDETPLCTLLDWQDSLAKRCVCVSNTIRSLSFVPGNDFEMSKHPGLLLILGKLILLHHKHPERKQAPLTYEKEEEQDQGVSCNKVEWWWDCLEMLRENTLVTLANISGQLDLSPYPESICLPVLDGLLHWAVCPSAEAQDPFSTLGPNAVLSPQRLVLETLSKLSIQDNNVDLILATPPFSRLEKLYSTMVRFLSDRKNPVCREMAVVLLANLAQGDSLAARAIAVQKGSIGNLLGFLEDSLAATQFQQSQASLLHMQNPPFEPTSVDMMRRAARALLALAKVDENHSEFTLYESRLLDISVSPLMNSLVSQVICDVLFLIGQS

SEQ ID NO: 11231 - DNA, 1898 bp, Homo sapiens
  CDS (112)..(1350)
cacgtccaaggaaccgatcttcctgacccaattgctacatttcagcaacttgaccaggaatataaaatcaattctcgactacttcagaacattctagatgcaggtttccaaatgcctacgccaatccaaatgcaagccatcccagttatgctgcatggtcgggaacttctggcttctgctccaactggatctggaaaaacattagcttttagcattcctattttaatgcagctgaaacaacccgcaaataaaggcttcagagccctgattatatcaccaacacgagaacttgccagccagattcacagagagttaataaaaatttctgagggaacaggattcagaatacacatgatccacaaagcagcagtggcagccaagaaatttggacctaaatcatctaaaaagtttgatattcttgtgactactccaaatcgactaatctatttattaaagcaagatccccccggaatcgacctagcaagtgttgagtggcttgtagtagacgaatcagataaactgtttgaagatggcaaaactgggttcagagaccagctggcttccattttcctggcctgcacatcccacaaggtccgaagagctatgttcagtgcaacttttgcatatgatgttgaacagtggtgcaaactcaacctggacaatgtcatcagtgtgtccattggagcaaggaattctgcagtagaaactgtagaacaagagcttctctttgttggatctgagaccggaaaacttctggccgtgagagaacttgttaaaaagggtttcaatccacctgttcttgtttttgttcagtccattgaaagggctaaagaactttttcatgagctcatatatgaaggtattaatgtggatgttattcatgcagagagaacacaacaacagagagataacacagtccacagtttcagagcaggaaaaatctgggttctgatttgtacagccttgctagcaagagggattgattttaaaggtgtgaacttggtgatcaactatgactttccaactagctcagtggaatatatccacaggataggtcgaactggaagagcagggaataagggaaaagcaattacatttttcactgaggatgataagccattattaagaagcgttgctaatgttatacagcaggctgggtgtcctgtaccagaatacataaaaggttttcagaaactactaagcaaacaaaagaaaaagatgattaagaaaccattggaaagggagagcattagtacaactccaaaatgtttcttagaaaaagctaaggataaacagaaaaaggtcactggtcagaacagcaagaagaaagtagctcttgaagacaaaagttaaaaacagactttaaaaatactgtcccagaaatgtaattttatgatcccagcatgaatgttattttcatggaatacttgaagtcttacagtcacctgtaccaaacatttgaaatcaactacaagtacatgggactggtgataaatgatcctaaactatcaagtcagtttcaatttgtaggtgccttttttttttcctgtagagatgagggtcttgccatgttgtccaggctggtcttgaactcctgacctcacacaatcctcctgccttagcctcctgagtaactgagattacaggcacaagctgctgcacccagctctgtaggtgacttttaaatgattatacaatggaaataacattcattgacatttctgtggtttgaatccagagagatacttcttatagaaaaacaaatgtttatgctaaaaataacaccaaaatgtggtgaactcttaaggacttttcccttcaagtgtgaaggaaggtgtgatgaatgctgtggagaggcatctggaacagaaattcaaaataaagccttgacattaaat

SEQ ID NO: 11232 - protein, 413 aa, Homo sapiens
MPTPIQMQAIPVMLHGRELLASAPTGSGKTLAFSIPILMQLKQPANKGFRALIISPTRELASQIHRELIKISEGTGFRIHMIHKAAVAAKKFGPKSSKKFDILVTTPNRLIYLLKQDPPGIDLASVEWLVVDESDKLFEDGKTGFRDQLASIFLACTSHKVRRAMFSATFAYDVEQWCKLNLDNVISVSIGARNSAVETVEQELLFVGSETGKLLAVRELVKKGFNPPVLVFVQSIERAKELFHELIYEGINVDVIHAERTQQQRDNTVHSFRAGKIWVLICTALLARGIDFKGVNLVINYDFPTSSVEYIHRIGRTGRAGNKGKAITFFTEDDKPLLRSVANVIQQAGCPVPEYIKGFQKLLSKQKKKMIKKPLERESISTTPKCFLEKAKDKQKKVTGQNSKKKVALEDKS

SEQ ID NO: 11233 - DNA, 1868 bp, Homo sapiens
  CDS (85)..(1215)
ctccccgagctgaccaagctggacatcaccaataacccacggctgtccttcatccacccccgcgccttccaccacctgccccagatggagaccctcatgctcaacaacaacgctctcagtgccttgcaccagcagacggtggagtccctgcccaacctgcaggaggtaggtctccacggcaaccccatccgctgtgactgtgtcatccgctgggccaatgccacgggcacccgtgtccgcttcatcgagccgcaatccaccctgtgtgcggagcctccggacctccagcgcctcccggtccgtgaggtgcccttccgggagatgacggaccactgtttgcccctcatctccccacgaagcttccccccaagcctccaggtagccagtggagagagcatggtgctgcattgccgggcactggccgaacccgaacccgagatctactgggtcactccagctgggcttcgactgacacctgcccatgcaggcaggaggtaccgggtgtaccccgaggggaccctggagctgcggagggtgacagcagaagaggcagggctatacacctgtgtggcccagaacctggtgggggctgacactaagacggttagtgtggttgtgggccgtgctctcctccagccaggcagggacgaaggacaggggctggagctccgggtgcaggagacccacccctatcacatcctgctatcttgggtcaccccacccaacacagtgtccaccaacctcacctggtccagtgcctcctccctccggggccagggggccacagctctggcccgcctgcctcggggaacccacagctacaacattacccgcctccttcaggccacggagtactgggcctgcctgcaagtggcctttgctgatgcccacacccagttggcttgtgtatgggccaggaccaaagaggccacttcttgccacagagccttaggggatcgtcctgggctcattgccatcctggctctcgctgtccttctcctggcagctgggctagcggcccaccttggcacaggccaacccaggaagggtgtgggtgggaggcggcctctccctccagcctgggctttctggggctggagtgccccttctgtccgggttgtgtctgctcccctcgtcctgccctggaatccagggaggaagctgcccagatcctcagaaggggagacactgttgccaccattgtctcaaaattcttgaagctcagcctgttctcagcagtagagaaatcactaggactactttttaccaaaagagaagcagtctgggccagatgccctgccaggaaagggacatggacccacgtgcttgaggcctggcagctgggccaagacagatggggctttgtggccctgggggtgcttctgcagccttgaaaaagttgcccttacctcctagggtcacctctgctgccattctgaggaacatctccaaggaacaggagggactttggctagagcctcctgcctccccatcttctctctgcccagaggctcctgggcctggcttggctgtcccctacctgtgtccccgggctgcaccccttcctcttctctttctctgtacagtctcagttgcttgctcttgtgcctcctgggcaagggctgaaggaggccactccatctcacctcggggggctgccctcaatgtgggagtgaccccagccagatctgaaggacatttgggagagggatgcccaggaacgcctcatctcagcagcctgggctcggcattccgaagctgactttctataggcaattttgtacctttgtggagaaatgtgtcacctcccccaacccgattcactcttttctcctgttttgtaaaaaataaaaataaataataacaat

SEQ ID NO: 11234 - protein, 377 aa, Homo sapiens
METLMLNNNALSALHQQTVESLPNLQEVGLHGNPIRCDCVIRWANATGTRVRFIEPQSTLCAEPPDLQRLPVREVPFREMTDHCLPLISPRSFPPSLQVASGESMVLHCRALAEPEPEIYWVTPAGLRLTPAHAGRRYRVYPEGTLELRRVTAEEAGLYTCVAQNLVGADTKTVSVVVGRALLQPGRDEGQGLELRVQETHPYHILLSWVTPPNTVSTNLTWSSASSLRGQGATALARLPRGTHSYNITRLLQATEYWACLQVAFADAHTQLACVWARTKEATSCHRALGDRPGLIAILALAVLLLAAGLAAHLGTGQPRKGVGGRRPLPPAWAFWGWSAPSVRVVSAPLVLPWNPGRKLPRSSEGETLLPPLSQNS

SEQ ID NO: 11235 - DNA, 1834 bp, Homo sapiens
  CDS (173)..(1816)
agtgctttcaaaagaattggcgtccgctgttcgcctctcctcccgggagtcttctgcctactcccagaagaggagggaagcacaggtgggtttctttagctctgcgtcggatccctgagaacttcgaagccatcctggctgaggctaatctccgctgtgcttcctctgcagtatgaagactttggagactcaaccgttagctccggactgctgtccttcagaccaggacccagttccagcccatccttctccccacgcttccccgatgaataaaaatgcggactctgaactgatgccaccgcctcccgaaaggggggatccgccccggttgtccccagatcctgtggctggctcagctgtgtcccaggagctacgggagggggacccagtttctctctccactcccctggaaacagagtttggttcccctagtgagttgagtcctcgaatcgaggagcaagaactttctgaaaatacaagccttcctgcagaagaagcaaacgggagcctttctgaagaagaagcgaacgggccagagttggggtctggaaaagccatggaagatacctctggggaacccgctgcagaggacgagggagacaccgcttggaactacagcttctcccagctgcctcgatttctcagtggttcctggtcagagttcagcacccaacctgagaacttcttgaaaggctgtaagtgggctcctgacggttcctgcatcttgaccaatagtgctgataacatcttgcgaatttataacctgcccccagagctgtaccatgagggggagcaggtggaatatgcagaaatggtccctgtccttcgaatggtggaaggtgataccatctatgattactgctggtattctctgatgtcctcagcccagccagacacctcctacgtggccagcagcagccgggagaacccgattcatatctgggacgcattcactggagagctccgggcttcctttcgcgcctacaaccacctggatgagctgacggcagcccattcgctctgcttctccccggatggctcccagctcttctgtggcttcaaccggactgtgcgtgttttttccacggcccggcctggccgagactgcgaggtccgagccacatttgcaaaaaagcagggccagagcggcatcatctcctgcatagccttcagcccagcccagcccctctatgcctgtggctcctacggccgctccctgggtctgtatgcctgggatgatggctcccctctcgccttgctgggagggcaccaagggggcatcacccacctctgctttcatcccgatggcaaccgcttcttctcaggagcccgcaaggatgctgagctcctgtgctgggatctccggcagtctggttatccactgtggtccctgggtcgagaggtgaccaccaatcagcgcatctacttcgatctggacccgaccgggcagttcctagtgagtggcagcacgagcggggctgtctctgtgtgggacacggacgggcctggcaatgatgggaagccggagcccgtgttgagttttctgccccagaaggactgcaccaatggcgtgagcctgcaccctagcctgcctctcctggccactgcctccggtcagcgtgtgtttcctgagcccacagagagtggggacgaaggagaggagctgggccttcccttgctctccacgcgccacgtccaccttgaatgtcggcttcagctctggtggtgtgggggggcgccagactccagcatccctgatgatcaccagggcgagaaagggcagggaggaacggagggaggtgtgggtgagctgatataaaaaggtttttatgat

SEQ ID NO: 11236 - protein, 548 aa, Homo sapiens
MKTLETQPLAPDCCPSDQDPVPAHPSPHASPMNKNADSELMPPPPERGDPPRLSPDPVAGSAVSQELREGDPVSLSTPLETEFGSPSELSPRIEEQELSENTSLPAEEANGSLSEEEANGPELGSGKAMEDTSGEPAAEDEGDTAWNYSFSQLPRFLSGSWSEFSTQPENFLKGCKWAPDGSCILTNSADNILRIYNLPPELYHEGEQVEYAEMVPVLRMVEGDTIYDYCWYSLMSSAQPDTSYVASSSRENPIHIWDAFTGELRASFRAYNHLDELTAAHSLCFSPDGSQLFCGFNRTVRVFSTARPGRDCEVRATFAKKQGQSGIISCIAFSPAQPLYACGSYGRSLGLYAWDDGSPLALLGGHQGGITHLCFHPDGNRFFSGARKDAELLCWDLRQSGYPLWSLGREVTTNQRIYFDLDPTGQFLVSGSTSGAVSVWDTDGPGNDGKPEPVLSFLPQKDCTNGVSLHPSLPLLATASGQRVFPEPTESGDEGEELGLPLLSTRHVHLECRLQLWWCGGAPDSSIPDDHQGEKGQGGTEGGVGELI

SEQ ID NO: 11237 - DNA, 1901 bp, Homo sapiens
  CDS (407)..(955)
ctttattacggggccaacgcagtcaccgccgtccgcagtcacagtccagccactgaccgcagcagcgcccttgcgtagcagccgcttgcagcgagaacactgaattgccaacgagcaggagagtctcaaggcgcaagaggaggccagggctcgacccacagagcaccctcagccatcgcgagtttccgggcgccaaagccaggagaagccgcccatcccgcagggccggtctgccagcgagacgagagttggcgagggcggaggagtgccgggaatcccgccacaccggctatagccaggcccccagcgcgggccttggagagcgcgtgaaggcgggcatccccttgacccggccgaccatccccgtgcccctgcgtccctgcgctccaacgtccgcgcggccaccatgatgcaaatctgcgacacctacaaccagaagcactcgctctttaacgccatgaatcgcttcattggcgccgtgaacaacatggaccagacggtgatggtgcccagcttgctgcgcgacgtgcccctggctgaccccgggttagacaacgatgttggcgtggaggtaggcggcagtggcggctgcctggaggagcgcacgcccccagtccccgactcgggaagcgccaatggcagctttttcgcgccctctcgggacatgtacagccactacgtgcttctcaagtccatccgcaacgacatcgagtggggggtcctgcaccagccgcctccaccggctgggagcgaggagggcagtgcctggaagtccaaggacatcctggtggacctgggccacttggagggtgcggacgccggcgaagaagacctggaacagcagttccactaccacctgcgcgggctgcacactgtgctctcgaaactcacgcgcaaagccaacatcctcactaacagatacaagcaggagatcggcttcggcaattggggccactgaggcgtggcgcccgtggctgcccagcaccttcttcgacccatctcaccctctctcattcctcaaagctttttttttttcctggctggggggcgggaagggcagactgcaaactggggggctgcgtacgtgcaggaggcgcggtggggctgcgtggaggagggggccacgtgtgagagagaagaaaatggtggccggagatgggagggcccaaggaacctcctgggagggggcctgcattctatgttggtgggaatgggactgggctgacgccctgcattcagcctgtgcctttcctggggtttcttttctgttcttttcggaggagagggcccgagaaggggccataccagggcgcggcgctgggttgccacacttgggaaagcagcccggagctgggtgctggggaaggcggggcgcgtagcctcccgccgccctgcggttgggccggtggaggcccaggcgttgctaggattgcatcagttttcctgtttgcactatttctttttgtaacattggccctgtgtgaagtatttcgaatctcctccttgctctgaaacttcagcgattccattgtgataagcgcacaaacagcactgtctgtcggtaatcggtactactttattaatgattttctgttacactgtatagtagtcctatggcacccccaccccatccctttcgtgccactcccgtccccacccccaccccagtgtgtataagctggcatttcgccagcttgtacgtagcttgccactcagtgaaaataataacattattatgagaaagtggacttaaccgaaatggaaccaactgacattctatcgtgttgtacatagaatgatgaagggttccactgttgttgtatgtcttaaatttatttaaaactttttttaatccagatgtagactatattctaaaaaataaaaaagcaaatgtgtcaact

SEQ ID NO: 11238 - protein, 183 aa, Homo sapiens
MMQICDTYNQKHSLFNAMNRFIGAVNNMDQTVMVPSLLRDVPLADPGLDNDVGVEVGGSGGCLEERTPPVPDSGSANGSFFAPSRDMYSHYVLLKSIRNDIEWGVLHQPPPPAGSEEGSAWKSKDILVDLGHLEGADAGEEDLEQQFHYHLRGLHTVLSKLTRKANILTNRYKQEIGFGNWGH

SEQ ID NO: 11239 - DNA, 1699 bp, Homo sapiens
  CDS (91)..(708)
atttaccaagggacattggagctccccacaccactcattgctgcccaccagctatacaactacgtggctgatcacgccagctcttaccacatgaagccattgcgaatggcccggccagggggcccagaacacaacgagtatgccctggtgtcggcatggcacagttctggctcctacctggactctgagggacttcgacaccaggatgactttgatgtgtctctgcttgtctgtcactgtgctgcaccctttgaggagcaaggagaggctgagcggcacgttctgcggctacagttcttcgtggtgctcaccagccagcgagagctcttccccaggctcactgctgacatgcgccgcttccggaagccacccagactgccccctgagccagaggctcctgggagttcagctggcagccctggggaggcctcagggcttattctagcgcctggaccggctcctctgttcccaccactggctgcagaggtgggcatggcacgagcacggctggctcagctggtgcggctggctggagggcactgccgtcgggacaccctttggaagcgcctcttcttgctggagccaccggggcctgatcgactgcggctaggggggcgcctggccctggcagagctggaggaactcctagaagcagtccatgccaaatccattggggacatcgacccccagctggactgttcctatccatgacggtctcctggtaccagagcctgatcaaagttctcctaagccgcttcccccagagctgtcgccatttccaaagcccagacttgggaactcagtacctggttgtgctgaatcagaagttcactgactgctttgtgctagtgtttctggactcccacttaggaaagacgtctctgacagtggttttccgagagcccttcccagtacagccccaggacagcgagagcccccctgcccaactggtctccacctaccaccacctggagtctgtcatcaacacagcctgtttcaccctctggacccgcctcctctgagggagtggactggaccactgaatgtcactgttccttgaatcatgggcctaccagattgcctgccagaggcaggactgaccagcccttctgggccccagggcaagccagacactgagtgacaccaaaggctttgtaactatgtcttgagggtctgctgccccagcctggcagcaggaaccgccctccccaaacacccacagccactgacccatccaggactccagagagtcaggtcaaccccaaggaccccttgggcccttctggggtactcctttcggcccccctggtagagtctcgggagttcacacagggtggcaaacaccccctagagctcctctgcctgaatcctgccccctagcctttgaccactgtcagccacctgtgtcccttgagccttcgggtcttcacttcccacttggacatcactgctggacattcccatcgagatgacacctgggttccaatcccagctctgcctttgaagcacttgcggccatcgtcaagtccctttgctctcggaccctgggtttctcatcctttaatgaggtgggttcagaagctctcccatcttcacagcaaccctggcactggcttctcaatgggagggaagcagcagagaaactgaagtgttagacactatgtgtcccaccaccccattacagagacatatgacaatg

SEQ ID NO: 11240 - protein, 206 aa, Homo sapiens
MKPLRMARPGGPEHNEYALVSAWHSSGSYLDSEGLRHQDDFDVSLLVCHCAAPFEEQGEAERHVLRLQFFVVLTSQRELFPRLTADMRRFRKPPRLPPEPEAPGSSAGSPGEASGLILAPGPAPLFPPLAAEVGMARARLAQLVRLAGGHCRRDTLWKRLFLLEPPGPDRLRLGGRLALAELEELLEAVHAKSIGDIDPQLDCSYP

SEQ ID NO: 11241 - DNA, 1800 bp, Homo sapiens
  CDS (122)..(1150)
tattgaagatgctcttgttttaaacaaggcctctttagacagaggctttgggcgttgccttgtatataaaaatgctaaatgtacgttgaaacgatacaccaatcagacttttgataaagtgatggggcccatgttggatgctgctacaaggaaacctatctggcgacatgaaatcttagatgcagatggtatttgttctccaggtgagaaagtagaaaacaaacaagtgcttgtaaataagtccatgcccacagtgactcagattcctttggaaggaagtaatgtaccacagcaaccacagtacaaagatgtacccataacctacaaaggagcaacagactcatatattgaaaaagtgatgatatcttcaaatgctgaagatgcttttctgatcaaaatgctgctgagacagacaaggcgtccagaaattggagacaaattcagcagtcgtcatgggcaaaaaggtgtttgtggcttgatcgtcccccaggaagacatgccattttgtgattctggcatctgtccggacatcatcatgaacccacacggctttccatcacgaatgacggtggggaagctcattgagctgctggctggcaaggccggtgtgctggacggcagattccactacggcactgcgtttggaggcagtaaagtgaaggatgtgtgtgaggacctcgttcgccatggttataactacttggggaaagactatgttacatccggcatcacaggtgagcccttagaagcatacatctattttggccccgtgtactatcagaagctgaaacacatggtgctagataaaatgcatgcccgggcccggggcccacgagccgtccttaccaggcaacccactgaaggacggtctcgtgatggtggcttgcgtctcggggaaatggaacgtgactgtttaatcggttatggagccagtatgcttttgctagagagactaatgatttcaagtgatgcctttgaggttgatgtctgtgggcagtgtggacttctggggtattctggctggtgccattactgcaagtcatcctgccacgtgtcttccctccgtattccgtatgcctgcaagctgctcttccaggaactacagtctatgaacatcatccccaggttaaaactgtccaagtacaatgaatgaggatggaaaaaatgattattaaagagaacaagtgatacatccaatgcaacggaaagcagaagggatttaggactacgtctcctcctgtgaagaattcccttgcgtattctctctctaaaacaaccaaaaaaaaatggagaggctttttatatactctaagactggctaaacaaccttgatcattgagcctcgagccatgggagagatgctgaccatgtggactgcaaggctgcttgattcacagatggatgtgacctaaaggataaataagctattacttatgtgctgatctcttgacattcactcattagaagaccttactccttcaagcaaatgtttggggtcaaatttaccatatcttctggctaaccatattcaagattcttctgaaacttggaggatgtaaagaatccatttgatttggtcagcctggcttttgtcgtggtggctggctcggataaattttcccaacaattaaatcttgcctttacacacccaaactttgtaattttagtcttggtgaaatataatgaatttgttcctaccttgtcaagcaagaatgtcgtcttctcctatggactcaattgctattattttaaacctgcatgattgtaccatgcaatactattcgttaaatatctgaatct

SEQ ID NO: 11242 - protein, 343 aa, Homo sapiens
MGPMLDAATRKPIWRHEILDADGICSPGEKVENKQVLVNKSMPTVTQIPLEGSNVPQQPQYKDVPITYKGATDSYIEKVMISSNAEDAFLIKMLLRQTRRPEIGDKFSSRHGQKGVCGLIVPQEDMPFCDSGICPDIIMNPHGFPSRMTVGKLIELLAGKAGVLDGRFHYGTAFGGSKVKDVCEDLVRHGYNYLGKDYVTSGITGEPLEAYIYFGPVYYQKLKHMVLDKMHARARGPRAVLTRQPTEGRSRDGGLRLGEMERDCLIGYGASMLLLERLMISSDAFEVDVCGQCGLLGYSGWCHYCKSSCHVSSLRIPYACKLLFQELQSMNIIPRLKLSKYNE

SEQ ID NO: 11243 - DNA, 1972 bp, Homo sapiens
tgctggccagtacttgttctcccttgccccaaccctttaccggatatcttgacaaactctccaattttctaaaatgatatggagctctgaaaggcatgtccataaggtctgacaacagcttgccaaatttggttagtccttggatcagagcctgttgtgggaggtagggaggaaatatgtaaagaaaaacaggaagatacctgcactaatcattcagacttcattgagctctgcaaactttgcctgtttgctattggctaccttgatttgaaatgctttgtgaaaaaaggcacttttaacatcatagccacagaaatcaagtgccagtctatctggaatccatgttgtattgcagataatgttctcatttatttttgatgtagaatttacattgccatgggtgttaaataagctttgagtcaaaagtcaagaaagtgactgaatatacagtcaccttttatgaaatgagtctctgtgttactgggtggcatgactgattgaggtgaagctcacggggccaggctgaccgtcttgaccgttccacttgagataggttggtcatcgtgcagaaggccccaggacctcagcacacacagcctcctcttggtctgagtaggcatcatgtgggggccagatctgcctgctgtttccatgggttacatttactgtgctgtatctcagatgttggtgtctggaagtttattcttaagagactgctacccagctggtctgtattattggaagttgcagttcgtgctttggttggccttctggtctaaagctgtgtcctgaatattagggatcacaattcactgaaatacagcagtgtgtggaggtgatggccagttaatctgctgaactggttttgactaatgacaaacctctttttaagatggtagaatggaggtgatagtcacaaaagtaaatgttccatttttatgaatgactttctacagagtttctatttctaaagaaaaaacaattgttcacatcccatctgatgattagcatgtgtgtaatgaatgctgtcttggtctcccctgtggaaacccttctccctgtgccttagagcaggtgtgtacatctctcactacctttctcatgggtgctgttagattttggcacccgttttctcagcattcagcccagggaatgtggttttcacttcttcgtcaagaccaacatgaaggggtatgttgagaaacatcctgaggcaaggtgggaggtgggatggggcaggactttcccttccaagcacatgcatggcaggtggggaaaggggggcttgcacccctgctggaaagaaaaggtttgtgtatatttctgatgcaaatgtcatactcactgctctgtaaaggcagctggcagctttttgggaaaagaacgtgctcgtctgttctctggcatcaagtttcttgcagctgctctgagggagagacagtgagctgcaagactgcctccccataacaacaggcaactcagagaagagtcattttatgttgttcctatggaatctggaatgagtgcagagctcctacccacacatgactgccccgccatttcatcctaggcattctgtgaaggagattggttagtccaaacttgctaacatacgaaaattcacttggaacatgatgagagatttcttattgaggccaagagatgtttcctgtcccagaggaaccattaggagtcgcttttagggtattcagctttgttcatgaaataaggcatctctgagaaagtggccccagggagagaatggaggactgggaggagaagcattaactgagctccaagggtgtgtgggcagagagcttgctatgtgaactcactccttaagaaaatggaagagaaaaagagagtgctagttaaaaaatcgggatgttttagtttggatttagggttttgatacttatgttgaaatactaatgtttctgatcaataaaatcaaactcttaatataccgagt

SEQ ID NO: 11244 - DNA, 1771 bp, Homo sapiens
  CDS (220)..(1662)
ggcctactggtttatgaagagctcgactctgactccgaggacctagaccccaatcctgaagatctggacccggtttctgaagacccagagcctgatcctgaagacctcaacactgtcccggaagacgtggaccccagctatgaagatctggagcccgtctcggaggatctggaccccgacgccgaagctccgggctcggaaccccaagatcccgaccccatgtcttcgagtttcgacctcgatccagatgtgattggccccgtacccctgattctcgatcctaacagcgacaccctcagccccggcgatccaaaagtggaccccatctcctctggcctcactgccaccccccaggtcttggccaccagccccgcggtgctccccgcccccgccagcccgccccggcccttctcctgcccggattgcgggcgagccttccgccgcagctccgggctgagccagcatcgccgcacgcacagcggcgagaagccgtaccgctgccccgactgcgggaagtccttcagccacggtgccaccctggctcagcaccgtggcatccacactggggcgcggccgtaccagtgcgcggcctgcggcaaggccttcggctggcgctccacgctgctgaaacatcgcagcagccacagcggggagaagccgcaccactgcccggtgtgtggcaaggccttcgggcacggctcgctcctggcacagcacctgcgcacgcacggcggcccgcggccccacaagtgcccggtgtgcgccaagggcttcggccagggctctgcgctgctcaaacacctgcgcacgcacacgggcgagcggccctacccgtgtccgcagtgcggcaaggccttcgggcagagctcggcgctgctgcagcaccagcgcacacacacggccgagcgcccctaccgctgcccccactgcggcaaagccttcgggcagagctccaacttgcaacaccacctgcgcatccacacgggcgagcggccctacgcctgcccgcactgctccaaggccttcggccagagctcagcgctgctccagcacctgcacgtgcattcgggcgagcgtccctatcgctgtcagctctgcgggaaggccttcggccaggcctccagcctcaccaagcacaaacgggtgcatgagggtgcagccgctgctgcagctgccgcggccgctgcagctgcagcagcggccgccggcctgggcctcgggcctggcctaagccctgcatccatgatgaggccggggcaggtctccctcctgggtcctgatgctgtttctgtgctcggctctggcttgggcctcagccctggcaccagctctggccgcaaccctgaccctggctctgggccgggcactctgccggatcccagctccaaacccctccccggctccagatccacccccagccctactcctgtggaatcttctgacccaaaggctgggcacgacgctggtcctgaccttgtgcccagcccagaccttgatcctgtgcccagcccagaccctgatcctgtgcccagccctgatcccaaccctgtgtcctgccctgacccctgttctcccactcgtggcactgtcagcccagccctccctaccggcgagagtccagagtgggtacaggagcaaggggcactgctggggcctgatggctgaaggagacgccggcatcctcgggggcctggggaagttgtgtgttgtgcagtcagtaaaatcctcccactgcctccggaaaaaaaaaaaaaaaaaaaaggccacatgt

SEQ ID NO: 11245 - protein, 481 aa, Homo sapiens
MSSSFDLDPDVIGPVPLILDPNSDTLSPGDPKVDPISSGLTATPQVLATSPAVLPAPASPPRPFSCPDCGRAFRRSSGLSQHRRTHSGEKPYRCPDCGKSFSHGATLAQHRGIHTGARPYQCAACGKAFGWRSTLLKHRSSHSGEKPHHCPVCGKAFGHGSLLAQHLRTHGGPRPHKCPVCAKGFGQGSALLKHLRTHTGERPYPCPQCGKAFGQSSALLQHQRTHTAERPYRCPHCGKAFGQSSNLQHHLRIHTGERPYACPHCSKAFGQSSALLQHLHVHSGERPYRCQLCGKAFGQASSLTKHKRVHEGAAAAAAAAAAAAAAAAAGLGLGPGLSPASMMRPGQVSLLGPDAVSVLGSGLGLSPGTSSGRNPDPGSGPGTLPDPSSKPLPGSRSTPSPTPVESSDPKAGHDAGPDLVPSPDLDPVPSPDPDPVPSPDPNPVSCPDPCSPTRGTVSPALPTGESPEWVQEQGALLGPDG

SEQ ID NO: 11246 - DNA, 2036 bp, Homo sapiens
  CDS (153)..(1397)
tgtgttacatccatattgctgctctcattgcagagtatctgaaaagaaagggttactggaaagtggaaaagatttgcacagcatccctgctctcggaggatacccacccctgtgatagcaactcattactaacaactcccagtggaggaagcatgttctctatgggatggccagcttttttgagcattacaccaaacattaaggaagaaggagcgatgaaagaggattctggaatgcaagatacaccatacaatgagaatatcctggtggagcagctatacatgtgtgtggagtttctctggaagtctgagcgatatgaactcattgctgatgtcgacaagcccatcattgctgtctttgagaaacaacgagacttcaaaaaattgtcagatctctactacgacattcatcggtcatatctgaaagtggcagaggtggtgaattcggagaagcggctgtttggtcgctactatcgtgtggcattttatgggcagggcttttttgaagaagaagaaggtaaagagtatatttataaagagcctaagctgacaggtctgtccgagatttcccaaagattactcaagctctatgcagataaatttggagcagacaatgtgaagataatccaggattccaacaaggtaaaccccaaggatttggaccccaaatatgcctacatccaggtgacctatgtgacgccgttctttgaggaaaaggaaatcgaagaccggaagacagatttcgaaatgcaccacaacatcaaccgctttgtcttcgagacacccttcacgctgtcgggcaagaagcacggtggggtggcggagcagtgcaagcggcggacgatcctgacaacgagtcacctgttcccctacgtgaagaagagaatacaagtaattagccaatcgagcacagaactgaatccaattgaagtggcaattgacgagatgtccaagaaggtttctgagcttaatcagctttgcacaatggaagaagtggacatgatcagactgcagctcaaactgcaaggaagtgtcagcgtgaaggttaatgctgggccaatggcctatgcacgagcttttcttgaagaaaccaatgcaaagaagtaccctgacaaccaagtaaagcttttgaaggagatcttcaggcaatttgcagatgcatgtgggcaggcccttgacgtgaatgagcgcctcatcaaagaggaccagctggagtaccaggaagaactgaggtcccactacaaggacatgctcagcgaactctccacagtcatgaatgagcagattacgggcagggacgacctgtcaaagcgcggagtggaccaaacctgcactcgagtaattagcaaagcaactccggccctacccacggtctccatctcatctagtgctgaagtctgagggctctgcagcatcagacccacctctaagagaactttctgaatttgcagctaatctcggggaagagaaagataggtttaatttatttgaagttttcatggtgttaatatttttgtttacctcgctagcttcagaattttgccaacctctgaatttgcacattttgtataatttttttttctttgagcagtgttgatcaagccaggttgaatatttgccatgaaattccagtgaatgtgtagctcaaatgcaaaccctaagtttgctgtcagttattgtatggtcagtaccccagtcctagtacacatattttaaaggttaaagtgaatgtttttgtaacatttaagcatatttcagatgtaaataaaagattgtaaaatatacggtttttaccaaatttaaaagatcctttttagttaatactatgacagtactaaaaatatatgaataacatttcagataccattatattaaaatatttgtgtatgtgtacaaaagcgttgataaatactaatctttaaagtttgtggagttcctttatttgtaatatatgtgctcttaaaagcaatgggatgtgaaattatgaaagtattttattgttcatagaaataaaaaacacagttactttgcatttgg

SEQ ID NO: 11247 - protein, 415 aa, Homo sapiens [sequence omitted]

SEQ ID NO: 11248 - DNA, 2291 bp, Homo sapiens
  CDS (305)..(2212)
taagaagtctcttgaaataaaagaagaaaaaattgctgctttagaagctcgattagaagaatccacgaattataaccagcaattgcgccaagaacttaaaacaaatgctacactgcaagcagagaagcaagcgttgaaaactcaactgaagcaacttgagacacagaacaataatttgcaggctcagattcttgcacttcagaggcagacagtgtcattacaagaacagaataccactcttcaaacacagaatgccaagcttcaggttgaaaattccacccttaattcccaaagtacctcactcatgaaccagaatgcccaactcctaatccagcagtcttccttagaaaatgaaaatgaatctgtaatcaaagagcgagaagacctaaaatctctctatgattctctgatcaaagatcatgaaaagctggaacttcttcatgaacgtcaggcttcagagtatgaatctcttatctctaaacatggaactctgaagtctgcccacaaaaatcttgaggtggaacatagagaccttgaagaccgttacaatcagttattaaaacagaaaggacagttggaagatttggaaaaaatgctcaaagtagaacaggaaaaaatgctgcttgaaaataaaaatcatgaaacagtagctgcagaatacaagaaactttgtggtgaaaatgataggctgaatcatacctatagtcaacttttaaaagagactgaagttttacaaactgaccataaaaatttgaaaagtcttctgaataattccaaactggaacaaacaagattagaagctgaattttcaaaactaaaggaacaataccaacaattggatattacatcaaccaagctgaataaccagtgtgagttgctaagccaacttaaaggaaatttagaagaagaaaatcggcatctactagatcaaattcagacattaatgctacagaacagaacacttttggagcagaatatggaaagcaaggatctttttcatgttgaacaaagacagtacattgataagttaaatgaattaagacgtcagaaggagaaactagaagagaaaattatggatcaatacaaattttatgacccatctcctcctagaaggagaggcaactggattactctaaaaatgagaaaattgataaagtctaagaaagatattaatcgggaacgccagaaatctctaacattaacacccacccgctcagactccagtgaaggatttcttcagctccctcatcaagacagtcaagatagttcttcagtaggttcaaactctttagaagatggccagaccttggggaccaagaaaagcagcaccatgaatgacctggtgcagtccatggtcctagcaggacagtggacaggtagtactgagaatttggaggttcctgatgttatttcaacgggtaaaaggagaaaagaattgggagctatggccttctctactacagccatcaacttttcaactgtcaactcttctgcaggcttcagatccaagcagttggttaataataaagatactacatcctttgaagacataagtccacaaggtgttagtgatgattctagtacgggatcaagagttcatgcttcaagaccagccagccttgatagtggcagaacatccactagcaatagcaataataatgcttcactacatgaagtcaaagcaggtgcagttaataaccaaagcaggccacaaagccacagcagtggagaatttagcctgcttcatgaccatgaggcttggtccagcagtggtagcagtccaatccagtacttgaaaagacagaccagatcaagcccagtgctccagcacaaaatatctgaaacactggagagtcgacatcacaagatcaaaactggttcccctggaagtgaagttgttactctacaacagtttttggaagaaagcaataagcttacctcagtacagataaagtcctcaagtcaagagaatcttttagatgaagtaatgaaaagtttgtctgtctcttctgactttttgggaaaagacaaaccagttagctgtggtctggccaggtcagtaagtggaaaaaccccaggggacttctatgatagacggacaactaagcctgagtttttgagacctggtcctcgaaaaactgaagatacctacttcattagttctgcgggaaaacctacaccaggcactcaaggaaaaataaaatcagaagactgaaggagttgaaagaccagtagacgctcctctactctttgagacatcactggcctataataaatgggttaatttatgt

SEQ ID NO: 11249 - protein, 636 aa, Homo sapiens
MNQNAQLLIQQSSLENENESVIKEREDLKSLYDSLIKDHEKLELLHERQASEYESLISKHGTLKSAHKNLEVEHRDLEDRYNQLLKQKGQLEDLEKMLKVEQEKMLLENKNHETVAAEYKKLCGENDRLNHTYSQLLKETEVLQTDHKNLKSLLNNSKLEQTRLEAEFSKLKEQYQQLDITSTKLNNQCELLSQLKGNLEEENRHLLDQIQTLMLQNRTLLEQNMESKDLFHVEQRQYIDKLNELRRQKEKLEEKIMDQYKFYDPSPPRRRGNWITLKMRKLIKSKKDINRERQKSLTLTPTRSDSSEGFLQLPHQDSQDSSSVGSNSLEDGQTLGTKKSSTMNDLVQSMVLAGQWTGSTENLEVPDVISTGKRRKELGAMAFSTTAINFSTVNSSAGFRSKQLVNNKDTTSFEDISPQGVSDDSSTGSRVHASRPASLDSGRTSTSNSNNNASLHEVKAGAVNNQSRPQSHSSGEFSLLHDHEAWSSSGSSPIQYLKRQTRSSPVLQHKISETLESRHHKIKTGSPGSEVVTLQQFLEESNKLTSVQIKSSSQENLLDEVMKSLSVSSDFLGKDKPVSCGLARSVSGKTPGDFYDRRTTKPEFLRPGPRKTEDTYFISSAGKPTPGTQGKIKSED

SEQ ID NO: 11250 - DNA, 2088 bp, Homo sapiens
  CDS (7)..(1872)
aaaagaatggaggagtcggaacccgaacggaagcgggctcgcaccgacgaggtgcctgccggaggaagccgctccgaggcggaagatgaggacgacgaggactacgtgccctatgtgccgttacggcagcgccggcagctactgctccagaagctgctgcagcgaagacgcgagggagctgcggaggaagagcagcaggacagcggtagtgaaccccggggagatgaggacgacatcccgctaggccctcagtccaacgtcagcctcctggatcagcaccagcaccttaaagagaaggctgaagcgcgcaaagagtctgccaaggagaagcagctgaaggaagaagagaagatcctggagagtgttgccgagggccgagcattgatgtcagtgaaggagatggctaagggcattacgtatgatgaccccatcaaaaccagctggactccaccccgttatgttctgagcatgtctgaagagcgacatgagcgcgtgcggaagaaataccacatcctggtggagggagacggtatcccaccacccatcaagagcttcaaggaaatgaagtttcctgcaaccatcctgagaggcctgaagaagaaaggcattcaccacccaacacccattcagatccagggcatccccaccattctatctggccgtgacatgataggcatcgctttcacgggttcaggcaagacactggtgttcacgttgcccgtcatcatgttctgcctggaacaagagaagaggttacccttctcaaagcgcgaggggccctatggactcatcatctgcccctcgcgggagctggcccggcagacccatggcatcctggagtactactgccgcctgctgcaggaggacagctcaccactcctgcgctgcgccctctgcattgggggcatgtccgtgaaagagcagatggagaccatccgacacggtgtacacatgatggtggccaccccggggcgcctcatggatttgctgcagaagaagatggtcagcctagacatctgtcgctacctggccctggacgaggcggaccgcatgatcgacacgggcttcgagggtgacatccgtaccatcttctcctacttcaagggccagcgacagaccctgctcttcagtgccaccatgccgaagaagattcagaactttgctaagagtgcccttgtaaagcctgtgaccatcaatgtggggcgcgctggggctgccagcctggatgtcatccaggaggtagaatatgtgaaggaggaggccaagatggtgtacctgctcgagtgcctgcagaagacacccccgcctgtactcatctttgcagagaagaaggcagacgtggacgccatccacgagtacctgctgctcaagggggttgaggccgtagccatccatgggggcaaagaccaggaggaacggactaaggccatcgaggcattccgggagggcaagaaggatgtcctagtagccacagacgttgcctccaagggcctggacttccctgccatccagcacgtcatcaattatgacatgccagaggagattgagaactatgtacaccggattggccgcaccgggcgctcgggaaacacaggcatcgccactaccttcatcaacaaagcgtgtgatgagtcagtgctgatggacctcaaagcgctgctgctagaagccaagcagaaggtgccgcccgtgctgcaggtgctgcattgcggggatgagtccatgctggacattggaggagagcgcggctgtgccttctgcgggggcctgggtcatcggatcactgactgccccaaactcgaggctatgcagaccaagcaggtcagcaacatcggtcgcaaggactacctggcccacagctccatggacttctgagccgacagtcttcccttctctccaagaggcctcagtccccaagactgccaccagtctacacatacagcagccccctggacagaatcagcatttcagctcagctggcctggaatgggccaggctggtcctggctgcctgttccctgtgctcttcagaattactgtttttgtttccttttaccccagctgccattaaagcccaaacctctagccc

SEQ ID NO: 11251 - protein, 622 aa, Homo sapiens [sequence omitted]

SEQ ID NO: 11252 - DNA, 2124 bp, Homo sapiens
aattaatacaagtcccaggcccaatgcctaagagaccagacgtgggcaaagacaagtttggatggaaaggtgttatcacagagccctgtccagctcctagaattcctcaggccagtgacacttttttgctgctggccacccatgcctctgatgagaacacttgccaatttggccagcagaaagagagtaggccggatgttttcatgagcccacaaatttagaaactctcctagtagtactttttctctctccatttaagagacaactacggtcaaaagtttgagccattctcttctaccccttcagtgtctgaccctttcactggctcttatctgtaaacacagggaggcaggtatggatttttcacagtagacaatgggtcaacagcatgagtttgaggacctgctgtgaagatttctcctccaaaatacatctcatgggcaggattcttcctgctccatatctgtttcaattttaagaaagcaccacatacaagacacattcagaagtcattcctgagcattgctggtgtttgcacacttgccacctgcattaccaattctgtaaatttcaattcctggtggaaagtgaccactttgaccatggatttcccaaagaagagttcctttgcagaccataggtggaaaagtcaatgagcatctccttccttgccaaagcatgtcccaacatgtaacaaactctagggatacaaaaggtttatattcagcatctgatgtcagatgtacagttcctcccctcccatatataaaccccggtgtagaatctgcagcgccctgctcttcggaaaccaaggaacaagccacctgctcacacaccttgttcaacttttcagctcctaaggaaccccacccccatgcaatttgactgtgcttgagaggtgaatacagttaccttcgagaaacagagggagctcctcaccccgtccttccagtccttttggctaaaatgcttaactatcactcacaaacaaatgtggagataccaggagctcatttgattcataccccaactttgtgttctgaaaaacatcagagggattttacattgcccagtttctccaccaacaagccttagggtggacccaaccctttccgcaagtggtaggaacgaatgcatcttagcaattacctgatttccaaagtccttttgtagcaaatgtcacctcattcgtggtctttttacctatcctaagcttatgatgatgagttatgtatgccaaatatttatctgaagagtttctcctcattgtgaatgtgtatgtaaaatatgaagacaagaaagggtgctttcatctgaggaaccaaggggtgagagtatcccaaaggaggacaccagcatcatcttttcttcgtactccaggacccaccaatattccagttctgggtcatttagagagataatggggcgtttattcccctattacctttgctaagtgctatattattggctgtttctcccgtaaccatgctgaaaagggggtcttagagagaactgtcatccaagcggcattcctagtaagttgggtagaaatgacattttccagagctgaaggagtgaagagcccttggccatactagggctctccttcccccggggagtgggaactcagccacattcagaattcacatcgcctttgttatgtccagaggagaggcataaaaaggcactctcccccaccacccctaccaaatctgggtttggtttggttttatttaactagcaaagttaatccagtaatcgcaaattactccagatggttaaagaaaaccctttcagaatacagaacgagaaaactagagtttgaccaataagaccaatttctgccatgaagaaccgggggacgcaagttaattgtttaacgtactctcattttaagcaccttctttcctgtctcttgattgttttttctgaaggaagtgtaaagaatgtctcagtctgccttaaaggaactgtgaaggcttctctgtaatttaagcttgattgaagtgaactgaaacattgtctaatgtctttgtggctttagagcttttgttatattgtgcctataaagcaaattatgtttacataaaaatataaataaagtattcagcatagcaaaacctc

SEQ ID NO: 11253 - DNA, 1926 bp, Homo sapiens
  CDS (80)..(1855)
gaaaacagtttactcctcctttgctaggcccgatgtcaccactgaaccctttggtccagataactgtttgcatttcaatatgactccaaactgccagtaccgtccccagagtgtacctccccatcacaataaattggagcagcaccaagtgtatggtgccaggtcagagccaccagcctccatgggtcttcgttataacacatatgtggccccaggaagaaacgcatctggacaccactccaagccatgcagccgggtcgagtatgtgtcttctttgagctcctctgtcaggaatacctgttaccccgaagacattccaccgtaccctaccatccggagagtgcagtctctccatgctccgccgtcttccatgattcgctctgttcccatttcacggacagaagttcccccagatgatgagccagcctactgcccaagacctctgtaccaatataagccatatcagtcctcccaggcccgctcagattatcatgtcactcagcttcagccttactttgagaatggccgggtccactacaggtatagcccatattccagttcttctagttcctattacagtccagatggggccctgtgtgatgtggatgcctatggcacagtccagttgagaccccttcaccgccttcccaatcgagactttgctttctacaatcctaggctgcaaggaaagagcttgtacagttatgctggtttggctccacgtccccgggccaacgtgactggctatttctctcccaacgaccataatgtagtcagcatgcctccggctgctgatgtgaagcacacctacacctcatgggatcttgaggacatggaaaaataccgcatgcagtccatccggagagagagccgtgctcggcagaaggtgaaagggcctgtcatgtcccaatatgataacatgaccccggcggtgcaggacgacttgggtgggatctatgtcatccatctgcgtagtaaatcagatcctgggaaaactggacttctctcagtggcagaaggaaaggagagccgccatgcagccaaggccatcagtcccgagggagaggaccgcttctataggaggcatcccgaggcagagatggacagagcccaccatcacggaggccatggtagcacgcagccggagaagccatccctgcctcagaagcagagcagcctgaggagcaggaagcttcctgacatgggctgcagtcttcctgagcacagggcacaccaagaagcaagccataggcagttctgtgagtcaaagaatgggcccccttatccccagggagctggccagttagattatgggtccaaagggattccagacacttctgagccagtcagctaccacaactctggagtaaaatatgctgcatccgggcaagaatctttaagactgaaccacaaagaggtaaggctctccaaagagatggagcgaccctgggttaggcagccttctgccccagagaaacactccagagactgctacaaggaggaagaacacctcactcagtcaatcgtcccaccccctaaaccagagaggagtcatagcctcaaactccatcatacccagaacgtggagagggaccccagtgtgctgtaccagtaccaaccacacggcaagcgccagagcagtgtgactgttgtgtcccagtatgataacctggaagattaccactccctgcctcagcaccagcgaggagtctttggagggggcggcatggggacgtatgtgccccctggctttccccatccacagagcaggacctatgctacagcgttgggtcaaggggccttcctgcccgcagagttgtccttgcagcatcctgaaacacagatccatgcagaatgagccctgcgagcaatagagttgaagcagcctctgctggacagtggactgttctatttttttcaataacc

SEQ ID NO: 11254 - protein, 592 aa, Homo sapiens
MTPNCQYRPQSVPPHHNKLEQHQVYGARSEPPASMGLRYNTYVAPGRNASGHHSKPCSRVEYVSSLSSSVRNTCYPEDIPPYPTIRRVQSLHAPPSSMIRSVPISRTEVPPDDEPAYCPRPLYQYKPYQSSQARSDYHVTQLQPYFENGRVHYRYSPYSSSSSSYYSPDGALCDVDAYGTVQLRPLHRLPNRDFAFYNPRLQGKSLYSYAGLAPRPRANVTGYFSPNDHNVVSMPPAADVKHTYTSWDLEDMEKYRMQSIRRESRARQKVKGPVMSQYDNMTPAVQDDLGGIYVIHLRSKSDPGKTGLLSVAEGKESRHAAKAISPEGEDRFYRRHPEAEMDRAHHHGGHGSTQPEKPSLPQKQSSLRSRKLPDMGCSLPEHRAHQEASHRQFCESKNGPPYPQGAGQLDYGSKGIPDTSEPVSYHNSGVKYAASGQESLRLNHKEVRLSKEMERPWVRQPSAPEKHSRDCYKEEEHLTQSIVPPPKPERSHSLKLHHTQNVERDPSVLYQYQPHGKRQSSVTVVSQYDNLEDYHSLPQHQRGVFGGGGMGTYVPPGFPHPQSRTYATALGQGAFLPAELSLQHPETQIHAE

SEQ ID NO: 11255 - DNA, 2057 bp, Homo sapiens
  CDS (35)..(2056)
agccgagccgcgaggagcgcgctccgtggccccgatggagcggtacaaagccctggaacagctgctgacagagttggatgacttcctcaagattcttgaccaggagaacctgagcagcacagcactggtgaagaagagctgcctggcggagctcctccggctttacaccaaaagcagcagctctgatgaggagtacatttatatgaacaaagtgaccatcaacaagcaacagaatgcagagtctcaaggcaaagcgcctgaggagcagggcctgctacccaatggggagcccagccagcactcctcggcccctcagaagagccttccagacctcccgccacccaagatgattccagaacggaaacagcttgccatcccaaagacggagtctccagagggctactatgaagaggctgagccatatgacacatccctcaatgaggacggagaggctgtgagcagctcctacgagtcctacgatgaagaggacggcagcaagggcaagtcggccccttaccagtggccctcgccggaggccggcatcgagctgatgcgtgacgcccgcatctgcgccttcctgtggcgcaagaagtggctgggacagtgggccaagcagctctgtgtcatcaaggacaacaggcttctgtgctacaaatcctccaaggaccacagccctcagctggacgtgaacctactgggcagcagcgtcattcacaaggagaagcaagtgcggaagaaggagcacaagctgaagatcacaccgatgaatgccgatgtgattgtgctgggcctgcagagcaaggaccaggctgagcagtggctcagggtcatccaggaagtgagcggcctgccttccgaaggagcatctgaaggaaaccagtacaccccggatgcccagcgctttaactgccagaaaccagatatagctgagaagtacctgtcggcttcagagtatgggagctccgtggatggccaccctgaggtcccagaaaccaaagacgtcaagaagaaatgttctgctggcctcaaactgagcaacctaatgaatctgggcaggaagaaatccacctcactggagcctgtggagaggtccctcgagacatccagttacctgaacgtgctggtgaacagccagtggaagtctcgctggtgctctgtcagggacaatcacctgcacttctaccaggaccggaaccggagcaaggtggcccagcaacccctcagcctggtgggctgcgaggtggtcccagaccccagccccgaccacctctactccttccgcatcctccacaagggcgaggagctggccaagcttgaggccaagtcttccgaggaaatgggccactggctgggtctcctgctctctgagtcaggctccaagacagacccagaagagttcacctacgactatgtggatgccgatagggtctcctgtattgtgagtgcggccaaaaactctctcttactgatgcagagaaagttctcagagcccaacacttacatcgatggcctgcctagccaggaccgccaggaggagctgtatgacgacgtggacctgtcagagctcacagctgcggtggagcctaccgaggaagccacccctgttgcagatgacccaaatgagagagaatctgaccgggtgtacctggacctcacacctgtcaagtcctttctgcatggccccagcagtgcacaggcccaggcctcctccccgacgttgtcctgcctggacgatgcaactgaggccctcccggcagactcaggcccaggtcccaccccagatgagccctgcataaagtgtccagagaacctgggagaacagctggagagtttggagccagagtatccttccctgagaatcaccaccgtcaaaatccagacggaacagcagagaatctccttcccaccgagctgcccggatgccgtggtggccaccccacctggtgccagcccacctgtgaaggacaggttgcgcgtgaccagtgcagagatcaagcttggcaagaatcggacagaagctgaggtgaagcggtacacagaggagaaggagaggcttg

SEQ ID NO: 11256 - protein, 674 aa, Homo sapiens
MERYKALEQLLTELDDFLKILDQENLSSTALVKKSCLAELLRLYTKSSSSDEEYIYMNKVTINKQQNAESQGKAPEEQGLLPNGEPSQHSSAPQKSLPDLPPPKMIPERKQLAIPKTESPEGYYEEAEPYDTSLNEDGEAVSSSYESYDEEDGSKGKSAPYQWPSPEAGIELMRDARICAFLWRKKWLGQWAKQLCVIKDNRLLCYKSSKDHSPQLDVNLLGSSVIHKEKQVRKKEHKLKITPMNADVIVLGLQSKDQAEQWLRVIQEVSGLPSEGASEGNQYTPDAQRFNCQKPDIAEKYLSASEYGSSVDGHPEVPETKDVKKKCSAGLKLSNLMNLGRKKSTSLEPVERSLETSSYLNVLVNSQWKSRWCSVRDNHLHFYQDRNRSKVAQQPLSLVGCEVVPDPSPDHLYSFRILHKGEELAKLEAKSSEEMGHWLGLLLSESGSKTDPEEFTYDYVDADRVSCIVSAAKNSLLLMQRKFSEPNTYIDGLPSQDRQEELYDDVDLSELTAAVEPTEEATPVADDPNERESDRVYLDLTPVKSFLHGPSSAQAQASSPTLSCLDDATEALPADSGPGPTPDEPCIKCPENLGEQLESLEPEYPSLRITTVKIQTEQQRISFPPSCPDAVVATPPGASPPVKDRLRVTSAEIKLGKNRTEAEVKRYTEEKERL

SEQ ID NO: 11257 - DNA, 2386 bp, Homo sapiens
  CDS (9)..(1262)
ctccgggcatggacccgatagcctcggctctgcgcacgcccatctccatcaccagctcctatgcggcgcccttcgccatgatgagccaccatgagatgaacggctccctcaccagtcctggcgcctacgccggcctccacaacatcccaccccagatgagcgccgccgccgctgctgcagccgctgcctatggccgatcgccaatggttggttttgaccctcaccccccgatgcgggccacaggcctcccctcaagcctggcctccattcctggaggaaaaccagcgtactcattccatgtgagtgctgatgggcagatgcagcccgtgcccttcccccacgacgccctggcaggccccggcatcccgaggcacgcccggcagatcaacacactcagccacggggaggtggtgtgtgccgtgaccatcagcaaccccacgaggcacgtctacacaggtggcaagggctgcgtgaagatctgggacatcagccagccaggcagcaagagccccatctcccagctggactgcctgaacagggacaattacatccgctcctgcaagctgctccctgatgggcgcacgctcatcgtgggcggcgaggccagcacgctcaccatctgggacctggcctcgcccacgccccgcatcaaggccgagctgacgtcctcggctcccgcctgttatgccctggccattagccctgacgccaaagtctgcttctcctgctgcagcgatgggaacattgctgtctgggacctgcacaaccagaccctggtcaggcagttccagggccacacagatggggccagctgcatagacatctcccatgatggcaccaaactgtggacagggggcctggacaacacggtgcgctcctgggacctgcgggagggccgacagctacagcagcatgacttcacttcccagatcttctcgctgggctactgccccactggggagtggctggctgtgggcatggagagcagcaacgtggaggtgctgcaccacatcaagcctgacaagtaccagctgcacctgcacgagagctgcgtgctctccctcaagttcgcctactgcggcaagtggttcgtgagcactgggaaagataaccttctcaacgcctggaggacgccttatggagccagcatattccagtctaaagaatcctcgtctgtcttgagttgtgacatttcagcggatgacaaatacattgtaacaggctctggtgacaagaaggccacagtttatgaggtcatctactaaacaagaactccagcagggctgtcaaactctgggagaaaccgactcggctctgacagggagacccccaggcgaggggccccgaggatggcggaggatgggccgcaggcagccgagcgttcagggctgcgctccggccggctgagagggcacgtgccccgtcacagtctggactcctgggcctggattgatgtgtctcacagactcggaagggttctgctcctcctcctccccctgaacaatgttggcagttgctacaaatagatttattggaggcttatggctccggttcccccacagacccgctcatgagtctctgtttgttcttcccttttcttttgccctgtccctcaccctgggtcgggggtgctggagtggaccacaatgttgtgctgggggatgggggggtctctctttgccgattgtgcagtgcacaagatttgtgaaaaatgtaaataacagactcctattgcggactgatcagtgggagaggaggccccttcccaccggaaactctgagtgtgtatttcgcctgctgtatttgtaatccactcgtggtggtggcttttttttttttttttttttaaataaacagatgctctcacctgggaagaggagacagggaggggaaccaattgaagaaagaggagaaaagtcttagagtgtggaaaaggcaaccaggttggccgtaaggtgcctgctggaatgcgtgtgcctccacacgggtctgggcatccggactgataaccagccggccagactgagggatggaaggcactgagatgggggcccgtccaggcggacacccgcagaaatggagctttctgtggtctcttgcactctggctgcctcttgccctctctgtgtctctctttcttggtctctccctctctcctcctcagccaggtctttctctttggtgcacacttagtcattgttgtgagcaatggaagttcaaaggaactccctctccagctcttctgaatcttgggacacagcctaaaaaggacaaaaagttagaagacagcatagcaactcagctcagggagctaccagagaaaaatagcaactgatgtgggtgcttttttttttttttttaatttgaataaaaagaattagaagtg

SEQ ID NO: 11258 - protein, 418 aa, Homo sapiens [sequence omitted]

SEQ ID NO: 11259 - DNA, 2024 bp, Homo sapiens
  CDS (32)..(850)
ttattatgcttctggatccgaatttgatgagatgtttgtgggtgtgggagccagccgtatcagaaatctttttagggaagcaaaggcgaatgctccttgtgttatatttattgatgaattagattctgttggtgggaagagaattgaatctccaatgcatccatattcaaggcagaccataaatcaacttcttgctgaaatggatggttttaaacccaatgaaggagttatcataataggagccacaaacttcccagaggcattagataatgccttaatacgtcctggtcgttttgacttgcaagttacagttccaaggccagatgtaaaaggtcgaacagaaattttgaaatggtatctcaataaaataaagtttgatcaatccgttgatccagaaattatagctcgaggtactgttggcttttccggagcagagttggagaatcttgtgaaccaggctgcattaaaagcagctgttgatggaaaagaaatggttaccatgaaggagctggagttttccaaagacaaaattctaatggggcctgaaagaagaagtgtggaaattgataacaaaaacaaaaccatcacagcatatcatgaatctggtcatgccattattgcatattacacaaaagatgcaatgcctatcaacaaagctacaatcatgccacgggggccaacacttggacatgtgtccctgttacctgagaatgacggatggaatgaaatagagcccagctgcttgcacaaatggatgttagtatgggaggaagagtggcagaggagcttatatttggaaccgaccatattacaacaggtgcttccagtgattttgataatgccactaaaatagcaaagcggatggttaccaaatttggaatgagtgaaaagcttggagttatgacctacagtgatacagggaaactaagtccagaaacccaatctgccatcgaacaagaaataagaatccttctaagggactcatatgaacgagcaaaacatatcttgaaaactcatgcaaaggagcataagaatctcgcagaagctttattgacctatgagactttggatgccaaagagattcaaattgttcttgaggggaaaaagttggaagtgagatgataactctcttgatatggatgcttgctggttttattgcaagaatataagtagcattgcagtagtctacttttacaacgctttcccctcattcttgatgtggtgtaattgaagggtgtgaaatgctttgtcaatatttgtcacatttatccagtttgggttattctcattatgacacctattgcaaattagcatcccatggcaaatatattttgaaaaaataaagaactatcaggattgaaaacagctcttttgaggaatgtcaattagttattaagttgaaagtaattaatgattttatgtttggttactctactagatttgataaaaattgtgcctttagccttctatatacatcagtggaaacttaagatgcagtaattatgttccagattgaccatgaataaaatattttttaatctaaatgtagagaagttgggattaaaagcagtctcggaaacacagagccaggaatatagccttttggcatggtgccatggctcacatctgtaatcccagcacttttggaggctgaggcgggtggattgcttgaggccaggagttcgagaccagcctggccaacgtggtgaaacgctgtctctactaaaatacaaaaaaatagggctgggcgcggttgctcacgcctgtaatcccagcacttttcagaggccaaggcgggcaaatcacctgaggtcaagagtttgagaccagcctggccaacatggtgaaaccccatctctactaaacatgcaaaaattacctgggcatggtggcaggtgcttataatcccagctactctgggggccaaggcaggagaattgcttgagcctgggagatggaggttgcagtgagctgagatcatgccactgcactccagcctgggcaacagagcaagactctgcctc

SEQ ID NO: 11260 - protein, 273 aa, Homo sapiens
MFVGVGASRIRNLFREAKANAPCVIFIDELDSVGGKRIESPMHPYSRQTINQLLAEMDGFKPNEGVIIIGATNFPEALDNALIRPGRFDLQVTVPRPDVKGRTEILKWYLNKIKFDQSVDPEIIARGTVGFSGAELENLVNQAALKAAVDGKEMVTMKELEFSKDKILMGPERRSVEIDNKNKTITAYHESGHAIIAYYTKDAMPINKATIMPRGPTLGHVSLLPENDGWNEIEPSCLHKWMLVWEEEWQRSLYLEPTILQQVLPVILIMPLK

SEQ ID NO: 11261 - DNA, 1827 bp, Homo sapiens
  CDS (137)..(1393)
atgtcaatgtgtctgtccttcactcctccattgtctgccgccactgctgctgctgctgctgctgccgctgctgctgcacgaatcgccgcagcccccagccttgcgcgtcgtcgctacctcctcggacagaaattttatgaataagcatcagaagccagtgctaacaggccagcggttcaaaactcggaaaagggatgaaaaagagaaattcgaacccacagtcttcagggatacacttgtccaggggcttaatgaggctggtgatgaccttgaagctgtagccaaatttctggactctacaggctcaagattagattatcgtcgctatgcagacacactcttcgatatcctggtggctggcagtatgcttgcccctggaggaacgcgcatagatgatggtgacaagaccaagatgaccaaccactgtgtgttttcagcaaatgaagatcatgaaaccatccgaaactatgctcaggtcttcaataaactcatcaggagatataagtatttggagaaggcatttgaagatgaaatgaaaaagcttctcctcttccttaaagccttttccgaaacagagcagacaaagttggcgatgctgtcggggattctgctgggcaatggcaccctgcccgccaccatcctcaccagtctcttcaccgacagcttagtcaaagaaggcattgcggcctcatttgctgtcaagcttttcaaagcatggatggcagaaaaagatgccaactctgttacctcgtctttgagaagagccaacttagacaagaggctgcttgaactctttccagttaacagacagagtgtggatcattttgctaaatacttcactgacgcaggtcttaaggagctttccgacttcctccgagtccagcagtccctgggcaccaggaaggaactgcagaaggagctccaggagcgtctttctcaggaatgcccgatcaaggaggtggtgctttatgtcaaagaagaaatgaagaggaatgatcttccagaaacagcagtgattggtcttctgtggacatgtataatgaacgctgttgagtggaacaagaaggaagaacttgttgcagagcaggctctgaagcacctgaagcaatatgctcccctgctggccgtgttcagctcccaaggccagtcagagctgatcctcctccagaaggttcaggaatactgctacgacaacatccatttcatgaaagcctttcagaagattgtggttctcttttataaagctgatgttctgagcgaagaagcaatactgaaatggtataaggaagcacatgttgctaaaggcaaaagtgtttttcttgaccagatgaagaaatttgttgagtggttacaaaatgcagaagaagaatccgaatcggaaggtgaggaaaattaaatggctcaacaagcacaatacctaggttaccacacaccactttttgattgggaatgctgaaccatttgagaagagaaacttggcttctgttttcgcaaaggaaaaaaaaaataggataggcttcccttgtgcagagggagaaatggttttgtttttgttttgtttttaaatggagccctgaggcatcagctattatacttgggactctacctctcactcactatatgctaacttaaagccattcaacaaggagtcaagtagatctgaaattaaatactcaacagactcctccttttttagctgtatttttcaggtactgtgtggtgaccgccccactggtgtctattacaggccactttggtagttgtgtatctgctcatgtatgtgatttgacaaaccagttttttaaaataaatggctttttaaaaatc

SEQ ID NO: 11262 - protein, 419 aa, Homo sapiens [sequence omitted]

SEQ ID NO: 11263 - DNA, 1833 bp, Homo sapiens
  CDS (34)..(1335)
ttatttgctaattgcacagacgataacatctacatgtttaatatgactgggttgaagacttctccagtggctattttcaatggacaccagaactctaccttttatgtaaaatccagccttagtccagatgaccagtttttagtcagtggctcaagtgatgaagctgcctacatatggaaggtctccacaccctggcaacctcctactgtgctcctgggtcattctcaagaggtcacgtctgtgtgctggtgtccatctgacttcacaaagattgctacctgttctgatgacaatacactaaaaatctggcgcttgaatagaggcttagaggagaaaccaggaggtgataaactttccacggtgggttgggcctctcagaagaaaaaagagtcaagacctggcctagtaacagtaacgagtagccagagtactcctgccaaagcccccagggtaaagtgcaatccatccaattcttccccgtcatccgcagcttgtgccccaagctgtgctggagacctccctcttccttcaaatactcctacgttctctattaaaacctctcctgccaaggcccggtctcccatcaacagaagaggctctgtctcctccgtctctcccaagccaccttcatctttcaagatgtcgattagaaactgggtgacccgaacaccttcctcatcaccacccatcactccacctgcttcggagaccaagatcatgtctccgagaaaagcccttattcctgtgagccagaagtcatcccaagcagaggcttgctctgagtctagaaatagagtaaagaggaggctagactcaagctgtctggagagtgtgaaacaaaagtgtgtgaagagttgtaactgtgtgactgagcttgatggccaagttgaaaatcttcatttggatctgtgctgccttgctggtaaccaggaagaccttagtaaggactctctaggtcctaccaaatcaagcaaaattgaaggagctggtaccagtatctcagagcctccgtctcctatcagtccgtatgcttcagaaagctgtggaacgctacctcttcctttgagaccttgtggagaagggtctgaaatggtaggcaaagagaatagttccccagagaataaaaactggttgttggccatggcagccaaacggaaggctgagaatccatctccacgaagtccgtcatcccagacacccaattccaggagacagagcggaaagacattgccaagcccggtcaccatcacgcccagctccatgaggaaaatctgcacatacttccatagaaagtcccaggaggacttctgtggtcctgaacactcaacagaattatagattctaatctgagtgagttactgagctttggtccactaaaacaagctgagctttggtccactaaaacaagatgaaaaatacaagagtgactctataactctggtctttaagaaagctgccttttcatttttagacaaaatcttttcaacgctgaaatgtacctaatctggttctactaccataatgtatatgcagcttcccgaggatgaatgctgtgtttaaatttcataaagtaaatttgtcactctagcattttgaatgaatagtcttcactttttaaattattcatcttctctataataatgacatcccagttcatggaggcaaaaaacaagtttcttgttatcctgaaactttctatgctcagtggaaagtatctgccagccacagcatgaggcctgtgaaggctgactgagaaatcctctgctgaagacccctggttctgttctgcctccaacatgtataattttatttgaaatacataatcttttcact

SEQ ID NO: 11264 - protein, 434 aa, Homo sapiens
MFNMTGLKTSPVAIFNGHQNSTFYVKSSLSPDDQFLVSGSSDEAAYIWKVSTPWQPPTVLLGHSQEVTSVCWCPSDFTKIATCSDDNTLKIWRLNRGLEEKPGGDKLSTVGWASQKKKESRPGLVTVTSSQSTPAKAPRVKCNPSNSSPSSAACAPSCAGDLPLPSNTPTFSIKTSPAKARSPINRRGSVSSVSPKPPSSFKMSIRNWVTRTPSSSPPITPPASETKIMSPRKALIPVSQKSSQAEACSESRNRVKRRLDSSCLESVKQKCVKSCNCVTELDGQVENLHLDLCCLAGNQEDLSKDSLGPTKSSKIEGAGTSISEPPSPISPYASESCGTLPLPLRPCGEGSEMVGKENSSPENKNWLLAMAAKRKAENPSPRSPSSQTPNSRRQSGKTLPSPVTITPSSMRKICTYFHRKSQEDFCGPEHSTEL

SEQ ID NO: 11265 - DNA, 2157 bp, Homo sapiens
  CDS (35)..(1909)
ttatgatattaaccagatcatttctacagctgtaatgacctatacgaagcactttgatgctcatggccgtatcaaggagattcaatatgagatattcaggtcgctcatgtactggattacaattcagtatgataacatgggtcgggtaaccaagagagagattaaaatagggccctttgccaacaccaccaaatatgcttatgaatatgatgttgatggacagctccaaacagtttacctcaatgaaaagataatgtggcggtacaactacgatctgaatggaaacctccatttactgaacccaagtaacagtgcgcgtctgacaccccttcgctatgacctgcgagacagaatcactcgactgggtgatgttcaatatcggttggatgaagatggtttcctacgtcaaaggggcacggaaatctttgaatatagctccaaggggcttctaactcgagtttacagtaaaggcagtggctggacagtgatctaccgttatgacggcctgggaaggcgtgtttctagcaaaaccagtctaggacagcacctgcagtttttttatgctgacttaacttatcccactaggattactcatgtctacaaccattcgagttcagaaattacctccctgtattatgatctccaaggacatctttttgccatggaaatcagcagtggggatgagttctatattgcatcggataacacagggacaccactggctgtgttcagtagcaatgggcttatgctgaaacagattcagtacactgcatatggggaaatctattttgactctaatattgactttcaactggtaattggatttcatggtggcctgtatgacccactcaccaaattaatccactttggagaaagagattatgacattttggcaggacggtggacaacacctgacatagaaatctggaaaagaattgggaaggacccagctccttttaacttgtacatgtttaggaataacaaccctgcaagcaaaatccatgacgtgaaagattacatcacagatgttaacagctggctggtgacatttggtttccatctgcacaatgctattcctggattccctgttcccaaatttgatttaacagaaccttcttacgaacttgtgaagagtcagcagtgggatgatataccgcccatcttcggagtccagcagcaagtggcgcggcaggccaaggccttcctgtcgctggggaagatggccgaggtgcaggtgagccggcgccgggccggcggcgcgcagtcctggctgtggttcgccacggtcaagtcgctgatcggcaagggcgtcatgctggccgtcagccagggccgcgtgcagaccaacgtgctcaacatcgccaacgaggactgcatcaaggtggcggccgtgctcaacaacgccttctacctggagaacctgcacttcaccatcgagggcaaggacacgcactacttcatcaagaccaccacgcccgagagcgacctgggcacgctgcggttgaccagcggccgcaaggcgctggagaacggcatcaacgtgacggtgtcgcagtccaccacggtggtgaacggcaggacgcgcaggttcgcggacgtggagatgcagttcggcgcgctggcgctgcacgtgcgctacggcatgaccctggacgaggagaaggcgcgcatcctggagcaggcgcggcagcgcgcgctcgcccgggcctgggcgcgcgagcagcagcgcgtgcgcgacggcgaggagggcgcgcgcctctggacggagggcgagaagcggcagctgctgagcgccggcaaggtgcagggctacgacgggtactacgtactctcggtggagcagtaccccgagctggccgacagcgccaacaacatccagttcctgcggcagagcgagatcggcaggaggtaacgcccgggccgcgcccgccgagccgctcacgccctgcccacattgtcctgtggcacaacccgagtgggactctccaacgcccaagagccttcctcccgggggaatgagactgctgttacgacccacacccacaccgcgaaaacaaggaccgcttttttccgaatgaccttaaaggtgatcggctttaacgaatatgtttacatatgcatagcgctgcactcagtcggactgaacgtagccagagg

SEQ ID NO: 11266 - protein, 625 aa, Homo sapiens
MTYTKHFDAHGRIKEIQYEIFRSLMYWITIQYDNMGRVTKREIKIGPFANTTKYAYEYDVDGQLQTVYLNEKIMWRYNYDLNGNLHLLNPSNSARLTPLRYDLRDRITRLGDVQYRLDEDGFLRQRGTEIFEYSSKGLLTRVYSKGSGWTVIYRYDGLGRRVSSKTSLGQHLQFFYADLTYPTRITHVYNHSSSEITSLYYDLQGHLFAMEISSGDEFYIASDNTGTPLAVFSSNGLMLKQIQYTAYGEIYFDSNIDFQLVIGFHGGLYDPLTKLIHFGERDYDILAGRWTTPDIEIWKRIGKDPAPFNLYMFRNNNPASKIHDVKDYITDVNSWLVTFGFHLHNAIPGFPVPKFDLTEPSYELVKSQQWDDIPPIFGVQQQVARQAKAFLSLGKMAEVQVSRRRAGGAQSWLWFATVKSLIGKGVMLAVSQGRVQTNVLNIANEDCIKVAAVLNNAFYLENLHFTIEGKDTHYFIKTTTPESDLGTLRLTSGRKALENGINVTVSQSTTVVNGRTRRFADVEMQFGALALHVRYGMTLDEEKARILEQARQRALARAWAREQQRVRDGEEGARLWTEGEKRQLLSAGKVQGYDGYYVLSVEQYPELADSANNIQFLRQSEIGRR

SEQ ID NO: 11267 - DNA, 2005 bp, Homo sapiens
  CDS (17)..(949)
attctgcctcgaaggcatggaggagtcaggctctgagggcctagacgagctgatttttgcccggaaagacacattctttaaggatgtggactatgtctgcatttctgacaattactggctgggaaagaagaagccctgcatcacctacggcctcaggggcatttgctactttttcatcgaggtggagtgcagcaacaaagacctccattctggggtgtacgggggctcggtgcatgaggccatgactgatctcattttgctgatgggctctttggtggacaagagggggaacatcctgatccccggcattaacgaggccgtggccgccgtcacggaagaggagcacaagctgtacgacgacatcgactttgacatagaggagtttgccaaggatgtgggggcgcagatcctcctgcacagccacaagaaagacatcctcatgcaccgatggcggtacccgtctctgtccctccatggcatcgaaggcgccttctctgggtctggggccaagaccgtgattcccaggaaggtggtcggcaagttctccatcaggctcgtgccgaacatgactcctgaagtcgtcggcgagcaggtcacaagctacctaactaagaagtttgctgaactacgcagccccaatgagttcaaggtgtacatgggccacggtgggaagccctgggtctccgacttcagtcaccctcattacctggctgggagaagagccatgaagacagtttttggtgttgagccagacttgaccagggaaggcggcagtattcccgtgaccttgacctttcaggaggccacgggcaagaacgtcatgctgctgcctgtggggtcagcggatgacggagcccactcccagaatgaaaagctcaacaggtataactacatagagggaaccaagatgctggccgcgtacctgtatgaggtctcccagctgaaggactaggccaagccctctgtgtgccatctccaatgagaaggaatcctgccctcacctcacccttttccaacttgcccagggaagtggaggttccctctttcctttccctcttgtcaggtcatccatgactttagagaacagacacaagtgtatccagctgtccacgggtggagctacccgttgggcttatgagtgacctggagtgacagctgagtcaccctgggtaagttctcagagtggtcaggatggcttgacctgcagaagatacccaaggtccaaaagcacaaggtctgcggaaagttctggttgtcggctgggcaccacggctcacacctataatcgagcactttgggaggccaagacaggaggatcacttgaggccaggagtctgagacaagcctaggcaacaaaacaagactctgtctctacaaaaagtttaagaaatgagccagacatggtggtgtatgcctgtagtcccagccactcagaaggctgaggcaggaggatcgcttgagaccaagagtttgagcctgcggtgagctgtgaatgcaccacggcactcaagcctgggcaatgtagcaagatcctgtctctacaagaaattttttaaaaatgagccaagtgtggtggtgcatgcctgtagttccagctactcaggacactgacgtaggagggttgcttgagactgagagttggaggctgcgatgagccatgaatgccccactgcactccagcctgggcgacagaacgagaccccatctcaaaaaaaataagttctggttgtcattgaattgggataaacagagagcttgatgctttctgccttctgtctcaggtgatgcattgcacatttgggatatttggaaaggaaatgaggaaagaaattagggcctcctctgatctctcgctatctgcgggtcctgtccttttctcaagaccttcaccattactggtgttttcctgtcttctctttagtatgatccctcaaaacctcactaactggaaggatgattttgtctcagtttgtactcctaaataaaaagtaaacatgacacctct

SEQ ID NO: 11268 - protein, 311 aa, Homo sapiens
MEESGSEGLDELIFARKDTFFKDVDYVCISDNYWLGKKKPCITYGLRGICYFFIEVECSNKDLHSGVYGGSVHEAMTDLILLMGSLVDKRGNILIPGINEAVAAVTEEEHKLYDDIDFDIEEFAKDVGAQILLHSHKKDILMHRWRYPSLSLHGIEGAFSGSGAKTVIPRKVVGKFSIRLVPNMTPEVVGEQVTSYLTKKFAELRSPNEFKVYMGHGGKPWVSDFSHPHYLAGRRAMKTVFGVEPDLTREGGSIPVTLTFQEATGKNVMLLPVGSADDGAHSQNEKLNRYNYIEGTKMLAAYLYEVSQLKD

SEQ ID NO: 11269 - DNA, 1787 bp, Homo sapiens
  CDS (158)..(1726)
gactgggggaacatttgtacaaaactaacgatgaagttattcatggcatcttcaaagcttacattcagaggctgcttcacgccttggctcgacactgccagctggatcagaccatgagggggttcctgaggagactgatgactttggggagtttcgcatgagggtatcagacctggtaaaggacttgattttcttgatagggtctatggagtgttttgctcagttatattctactctgaaagaaggcaacccaccctgggaggtgacagaagcggttctctttatcatggctgctatagcaaagagtgttgatccggaaaacaatccaacacttgtggaagtcctagaaggagttgtccgcctcccggagaccgtacatacggctgtgcgatacatcagcattgaattggttggagagatgagtgaagtcgttgatcgaaatcctcagttccttgaccctgtgttgggctatttgatgaaaggcctgtgtgaaaagcccctggcttctgctgcagccaaagccattcataacatttgctctgtctgccgagatcacatggctcagcactttaatggactcctggagattgcccgctccctcgattccttcctgttgtctccagaagctgctgtgggcttgctaaaagggacagcacttgtcctagcccgattacctttggataagattaccgaatgtcttagtgaactatgttctgttcaggttatggcattgaaaaagctgttgtctcaagagcccagcaatggcatatcctcagatcccacagtgttcttagatcgccttgcagtgatatttaggcataccaatcccattgtggaaaatggacagactcatccgtgtcagaaagtcatacaggaaatatggccagttttatccgagactctaaataagcaccgagctgataatcggattgtagagcgttgttgcaggtgcctgcgctttgctgttcgctgtgtaggcaaaggatctgcagcactgctgcagccactagtcacacagatggtgaatgtgtaccacgtacatcagcattcctgcttcctgtaccttggcagtatccttgtggatgaatatggcatggaagaaggctgtcggcagggactgctagacatgctccaggcactgtgcatccccacctttcagctcctagaacagcagaatggtctccagaatcaccctgacactgtagatgacctgttccggctagccaccaggtttattcagcgtagccctgtcaccttgctgcggagccaagtggtcatccctatcttacagtgggccattgcctctactaccctggaccaccgggatgccaattgtagtgtcatgaggtttctacgagacctcattcatacaggggtagccaatgatcatgaagaagactttgaattacggaaagaactgattggacaggtgatgaaccagcttggacagcagcttgtcagccagctgctgcacacctgctgcttttgcctccccccctataccctaccagatgtggctgaagtgctctgggagatcatgcaggttgacagaccgactttttgtcgatggttagaaaattccttaaaaggtttgccaaaggaaacaaccgtgggagccgtcacagtgacacacaaacaacttacagacttccacaagcaagtcactagtgctgaggaatgtaaacaagtttgctgggccttgcgagacttcaccaggttgtttcgatagctcacactcctgcactgtgcctgtcacccaggaatgtcttttttaattagaagacagg

SEQ ID NO: 11270 - protein, 523 aa, Homo sapiens [sequence omitted]

SEQ ID NO: 11271 - DNA, 2020 bp, Homo sapiens
  CDS (23)..(1345)
agaccccgaattcacagcaagcatggaaagcaaaatctgccccttcaccatcgccattttcctaaagtacagtaatgatcccgtcgtcgcctcactggctcaggacatcttcaaggagctgtcccagattgaagcctgtcagggcccaatgcaaatgaggctgattcccactctggtcagcataatgcaggccccagcagacaagattcctgcagggctttgtgcgacagccattgatatcctgacaacagtagtacgaaatacaaagcctcccctttcccagcttctcatctgccaagctttccctgctgtggcacagtgtacccttcacacagatgacaatgccaccatgcagaatggcggagagtgcttgcgggcctatgtgtcagtgaccctggaacaagtagcccagtggcatgatgagcagggccacaatggactgtggtatgtgatgcaagtggtgagccagctcctggacccccgcacctcagagttcactgcggcctttgtgggccgccttgtttccaccctcatctccaaggcagggcgggaactcggggagaatctagaccagattcttcgtgccatcctcagtaagatgcagcaggcagagacgctcagtgtcatgcagtccctgatcatggtgttcgctcatctggtgcacactcagctagaacctctcttggagttcctgtgtagcctcccaggacctactggcaaacctgctctagagtttgtgatggctgagtggacaagccgacagcacctgttctatggacagtatgaaggcaaagtcagctctgtggcactctgtaagctgctccagcatggcatcaatgcagatgacaaacggctacaggatatccgtgtgaagggagaggagatctacagcatggatgagggcatccgcacccgctctaagtcagccaaaaacccagaacgctggacaaacattcctttgctggtcaagatcctaaagctgatcatcaacgagctctccaacgtcatggaggctaatgccgctcgccaggccactcctgcagagtggagtcaagatgactccaatgatatgtgggaggaccaggaggaggaagaggaggaggaggaggatggtttagctggccaacttttatctgacattcttgctacaagtaaatatgaggaggattactacgaggatgatgaggaagatgaccctgatgccctgaaggatcctctctatcagattgatctgcaggcatatctcacagatttcctctgccagtttgctcagcagccctgctacataatgttttcaggccaccttaatgacaatgagaggcgagttctacagaccatcggcatctaaaaaggggagcctttctacatttgctccttctgggccagccgcaaaccattttgcagccctcactggccttgagatgcactttcttctcaacctaaagtggcatcttgacccttggcccttggcctcggcagtgacactgatgacaattcagaccaggctcaccggtgccgtcacttaggaatgctggaacaaaggacatttctcaaagttcccctgaagacatgccatctctagaaccttttttctccccgactctacccccacctctgttcctagagccctctgctggcgagtccagaaacattattgcccagaaggattatgtgtttatggattattttgccccgcctcaggagcgcaggaagtcactaccatttatattctaaaacagaactatctatgttcataggacttctgatgtgttcagataggaatcctcatgagagatcattatgctttgtgccctggaccactgccgctctgggttctcaggaggaacaggcaagggcagcttcattctaagcctttccagtgacctcagccttgcttctcttctacaacactaaggctcctctgtcagaggaggtcgtcttgtttttgcttcattgcatgacataacccttcccctcaagctgttcctatatatacatgcacacacaaaataagccagac

SEQ ID NO: 11272 - protein, 441 aa, Homo sapiens
MESKICPFTIAIFLKYSNDPVVASLAQDIFKELSQIEACQGPMQMRLIPTLVSIMQAPADKIPAGLCATAIDILTTVVRNTKPPLSQLLICQAFPAVAQCTLHTDDNATMQNGGECLRAYVSVTLEQVAQWHDEQGHNGLWYVMQVVSQLLDPRTSEFTAAFVGRLVSTLISKAGRELGENLDQILRAILSKMQQAETLSVMQSLIMVFAHLVHTQLEPLLEFLCSLPGPTGKPALEFVMAEWTSRQHLFYGQYEGKVSSVALCKLLQHGINADDKRLQDIRVKGEEIYSMDEGIRTRSKSAKNPERWTNIPLLVKILKLIINELSNVMEANAARQATPAEWSQDDSNDMWEDQEEEEEEEEDGLAGQLLSDILATSKYEEDYYEDDEEDDPDALKDPLYQIDLQAYLTDFLCQFAQQPCYIMFSGHLNDNERRVLQTIGI

SEQ ID NO: 11273 - DNA, 2092 bp, Homo sapiens
  CDS (64)..(960)
cttccgggagcctggggcccaggactgcagcggcttcggaaggtgggctctgccagcgggaccatgctgctccgagccgcttggaggcgggcggcagtggcggtgacagcggctccagggccgaagcccgcggcgcccactcgggggctgcgcctgcgcgttggagaccgtgctcctcagtctgcggttcccgcagatacagccgctgccccggaggtggggccagtgctgcgacctctctatatggatgtgcaagctacaactcctctggacccccgggtgcttgatgccatgctcccttacctaatcaactactatgggaacccacactcccggacacatgcttatggctgggagagtgaggcagccatggaacgtgctcgtcagcaagtagcatctctgattggagctgatcctcgtgagatcatttttactagtggtgctactgaatccaacaacatagcaattaagggggtggcccgattctacaggtcacggaaaaagcacttgatcaccacccagacagaacacaaatgtgtcttggactcctgccgttcactggaagctgagggctttcaggtcacctacctcccagtgcagaagagtgggatcattgacctaaaggaactagaggctgctatccagccagatactagcctggtgtcagtcatgactgtgaacaatgagattggagtgaagcagcctattgcagaaatagggcggatttgcagttccagaaaggtatatttccatactgatgcagcccaggctgttggaaaaatcccacttgatgtcaatgacatgaaaattgatctcatgagcattagtggtcacaaaatctacggtcccaaaggggttggtgccatctacatccgtcgccggccccgtgtgcgtgtggaggccctgcagagtggaggggggcaggagcggggtatgcggtctgggacagtgccacacccttagtggtggggctgggggctgcgtgtgaggtggcacagcaagagatggagtatgaccacaagcgaatctcaaagttgtcagagcggctgatacagaatataatgaagagccttccagatgtggtgatgaatggggaccctaagcaccattatcccggctgtatcaacctctcctttgcatatgtggaaggggaaagtctgctgatggcactgaaggacgttgccttatcctcagggagtgcctgcacctctgcatccctggagccctcttatgtgcttagagcaattggcactgatgaggatttagcgcactcttctatcaggtttggaattggccgcttcactacagaggaggaagtggactacacagtggagaaatgcattcagcatgtgaagcgtcttcgagaaatgagccctctctgggagatggttcaggatggcattgacctcaagagcatcaagtggacccaacactagaagaatagggccctgactttgtgctggtctggcccctcctgcctcaccaacccgtgcacaaccagacaccttgttacacctagtggatgctctagattggtatagaccagttgacttcagcatcagtccacctctatgacagaaacacaagaaaactgtctttccctagcttcagttccttgggtgtggagcactccccatttcttctcgggtcttaaagtgtgtggacattttcatcccgaagccatagagacatttgctgtcatattgctgctgggcacatctgtgctcttggtgaggagagcaagaggaaccagaagaagtctctttggtcagggaccatgatgctctacatggacatttgagtcttcgtcttctgctgctgctcggctggaccagcttctttaacagcaagcataatccacttcaatgtaatattttctgtagctccaaaggctatctcttcatattgactgcagacagactgaatggacagtttcttagagggcttgtctcctttctacccttgtcctctttcctttcctttgacctaatggagctagaaatatgtctgtgactccaccagttattctaataatttgttttctcgaaaattgttaatttcaagactggagaaataaactcaccttctattt

SEQ ID NO: 11274 - protein, 299 aa, Homo sapiens
MLLRAAWRRAAVAVTAAPGPKPAAPTRGLRLRVGDRAPQSAVPADTAAAPEVGPVLRPLYMDVQATTPLDPRVLDAMLPYLINYYGNPHSRTHAYGWESEAAMERARQQVASLIGADPREIIFTSGATESNNIAIKGVARFYRSRKKHLITTQTEHKCVLDSCRSLEAEGFQVTYLPVQKSGIIDLKELEAAIQPDTSLVSVMTVNNEIGVKQPIAEIGRICSSRKVYFHTDAAQAVGKIPLDVNDMKIDLMSISGHKIYGPKGVGAIYIRRRPRVRVEALQSGGGQERGMRSGTVPHP

SEQ ID NO: 11275 - DNA, 1916 bp, Homo sapiens
  CDS (179)..(1522)
tgagcgaagctcctgcacctcatcctccacccaccagagagatgggaagttctgtgactgctgctactgtgagttcttcggccacaatgcgccacccgctgccccgacgagtcggaactataccgagatccgggagaagctccgctcgaggctgaccaggcggaaagaggagctgcccatgaaggggggcaccctgggcgggatccctggggagcccgccgtggaccaccgagatgtggatgagctgctggaattcatcaacagcacggagcccaaagtccccaacagcgccagggccgccaagcgggcccggcacaagctgaaaaagaaggaaaaggagaaggcccagttggcagcagaagctctaaagcaggcaaatcgtgtttctggaagccgggagccaaggcctgccagggagaggctcttggagtggcccgaccgggaactggatcgggtcaacagcttcctgagcagccgtctgcaggagatcaaaaacactgtcaaagactccatccgtgccagcttcagtgtgtgtgagctcagcatggacagcaatggcttctctaaggagggggctgctgagcctgagcctcagagtctacccccctcaaacctcagtggctcctcagagcagcagcctgacatcaaccttgacctgtcccctttgactttgggctcccctcagaaccacacgttacaagctccaggcgagccagccccaccatgggcagaaatgagaggcccccacccaccatggacagaggtgagggggccccctcccggtatcgtccccgagaacgggctcgtgaggagactcaacaccgtgcccaacctatcccgggtgatctgggtcaagacacccaagccgggctaccccagctccgaggagccaagctcaaaggaagttcccagttgcaagcaggagctgcctgagcctgtgtcctcaggtgggaagccacagaagggcaagaggcagggcagtcaggccaagaagagcgaggcaagcccagccccccggcccccagccagcctagaggttcccagtgccaagggccaggtcgctggccccaagcagccaggcagggtcctagagcttcccaaagtaggcagctgtgctgaggctggagaggggagccgggggagccggccaggaccaggttgggctggcagtcccaaaactgagaaggagaagggcagctcctggcgaaactggccaggcgaggccaaggcacggcctcaggagcaggagtctgtgcagcccccaggcccagcaaggccacagagcttgccccagggcaagggccgcagccgccggagccgcaacaagcaggagaagccagcctcctccttggacgatgtgttcctgcccaaggacatggacggggtggagatggatgagactgaccgagaggtggagtactttaagaggttctgtttggattctgcaaagcagactcgtcagaaagttgctgtgaactggaccaacttcagcctcaagaaaaccactcctagcacagctcagtgaggccctgcccaggctgagctgcttcagggcatcctgaggccctgactgccagctgaaggcgtataatttttccctccgtgtgccccacctacccgtccaagaccctctgtgctccccaccatcctggtccaaccaaaagctgaacggatgccacactgtgctggggccccttgacctcagcagagccgcttcctggtgctacgcagcctccacactcagagcccgtggactgggctggcctaagggccagggctgatggtactgctggcccaacactgctctctttgtgtttggtttttttgtttttgtttttattttgtttttttccaattctttacttttgatactgtgaagatctttcgtgccgaaagataaagcaacatttggacac

SEQ ID NO: 11276 - protein, 448 aa, Homo sapiens
MKGGTLGGIPGEPAVDHRDVDELLEFINSTEPKVPNSARAAKRARHKLKKKEKEKAQLAAEALKQANRVSGSREPRPARERLLEWPDRELDRVNSFLSSRLQEIKNTVKDSIRASFSVCELSMDSNGFSKEGAAEPEPQSLPPSNLSGSSEQQPDINLDLSPLTLGSPQNHTLQAPGEPAPPWAEMRGPHPPWTEVRGPPPGIVPENGLVRRLNTVPNLSRVIWVKTPKPGYPSSEEPSSKEVPSCKQELPEPVSSGGKPQKGKRQGSQAKKSEASPAPRPPASLEVPSAKGQVAGPKQPGRVLELPKVGSCAEAGEGSRGSRPGPGWAGSPKTEKEKGSSWRNWPGEAKARPQEQESVQPPGPARPQSLPQGKGRSRRSRNKQEKPASSLDDVFLPKDMDGVEMDETDREVEYFKRFCLDSAKQTRQKVAVNWTNFSLKKTTPSTAQ

SEQ ID NO: 11277 - DNA, 2094 bp, Homo sapiens
  CDS (163)..(2079)
cctactaaaaaaaatgcagagaagtattccggcattttggaaggtcctgtggaccgacccgtactcagcaactattcggacacaccatcaggactagtgaacggtcggaaaaatgaaagtgaaccctggcagccttccttgaattcagaagctgtttatcccatgaactgtgttccggatgttatcactgccagcaaagctggagtcagttcagccctccctccagcagatgtctctgcgagtataggaagctctcctggggtagccagcaacctgacagaacctagttattcaagtagtacctgtggaagccacactgtacccagtcttcatgcagggctcccatctcaggaatatgccccaggatacaacggatcatatttgcattctacttatagtagccagccagcacctgcacttccttcacctcatccgtctcctttgcatagctctgggctactacagcccccaccaccacctcctccgccaccagccttggtcccaggctacaatgggacttctaacctctccagttacagctatccgtctgctagctatcctcctcagactgctgtggggtctgggtacagccctgggggggcaccgcctccgccttcagcgtacctgccttcaggaattcctgctcccacccccctaccccccaccactgttcctggctacacctaccagggccatggtttgacacctattgcaccgtcggctctgacaaacagttcagcaagttctctcaaaaggaaagctttctacatggcagggcaaggagatatggactccagttatggaaattacagctatggccaacagagatctacacagagtcctatgtacagaatgcccgacaacagcatttcaaacacaaatcgggggaatggctttgacagaagtgctgaaacatcatccttagcatttaagccaacgaagcagctaatgtcctctgaacagcaaaggaaattcagcagccagtccagtagggctctgacccctccttcctacagtactgctaaaaattcattgggatcaagatccagtgaatcctttgggaagtacacatcgccagtaatgagtgagcatggggacgagcacaggcagctcctctctcacccaatgcaaggccctggactccgtgcagctacctcatccaaccactctgtggacgagcaactgaagaatactgacacgcacctcatcgacctggtaaccaatgagattatcacccaaggacctccagtggactggaatgacattgctggtctcgacctggtgaaggctgtcattaaagaggaggttttatggccagtgttgaggtcagacgcgttcagtggactgacggccttacctcggagcatccttttatttggacctcgggggacaggcaaaacattattgggcagatgcatcgctagtcagctgggggccacatttttcaaaattgccggttctggactagtcgccaagtggttaggagaagcagagaaaattatccatgcctcttttcttgtggccaggtgtcgccagccctcggtgatttttgttagtgacattgacatgcttctctcctctcaagtgaatgaggaacatagtccagtcagtcggatgagaaccgaatttctgatgcaactggacactgtactaacttcggctgaggaccaaatcgtagtaatttgtgccaccagtaaaccagaagaaatagatgaatcccttcggaggtacttcatgaaacgacttttaatcccacttcctgacagcacagcgaggcaccagataatagtacaactgctctcacagcacaattactgtctcaatgacaaggagtttgcactgctcgtccagcgcacagaaggcttttctggactagatgtggctcatttgtgtcaggaagcagtggtgggccccctccatgccatgccagccacagacctttcagccattatgcccagccagttgaggcccgttacatatcaagactttgaaaatgctttctgcaagattcagcctagcatatctcaaaaggagcttgatatgtatgttgaatggaacaaaatgtttggttgcagtcagtgataacttctttag

SEQ ID NO: 11278 - protein, 639 aa, Homo sapiens
MNCVPDVITASKAGVSSALPPADVSASIGSSPGVASNLTEPSYSSSTCGSHTVPSLHAGLPSQEYAPGYNGSYLHSTYSSQPAPALPSPHPSPLHSSGLLQPPPPPPPPPALVPGYNGTSNLSSYSYPSASYPPQTAVGSGYSPGGAPPPPSAYLPSGIPAPTPLPPTTVPGYTYQGHGLTPIAPSALTNSSASSLKRKAFYMAGQGDMDSSYGNYSYGQQRSTQSPMYRMPDNSISNTNRGNGFDRSAETSSLAFKPTKQLMSSEQQRKFSSQSSRALTPPSYSTAKNSLGSRSSESFGKYTSPVMSEHGDEHRQLLSHPMQGPGLRAATSSNHSVDEQLKNTDTHLIDLVTNEIITQGPPVDWNDIAGLDLVKAVIKEEVLWPVLRSDAFSGLTALPRSILLFGPRGTGKTLLGRCIASQLGATFFKIAGSGLVAKWLGEAEKIIHASFLVARCRQPSVIFVSDIDMLLSSQVNEEHSPVSRMRTEFLMQLDTVLTSAEDQIVVICATSKPEEIDESLRRYFMKRLLIPLPDSTARHQIIVQLLSQHNYCLNDKEFALLVQRTEGFSGLDVAHLCQEAVVGPLHAMPATDLSAIMPSQLRPVTYQDFENAFCKIQPSISQKELDMYVEWNKMFGCSQ

SEQ ID NO: 11279 - DNA, 2253 bp, Homo sapiens
  CDS (107)..(1087)
gtgccccggatgtgcccagctggctcctggccccacccctcgggcctttgggctggaccagccacctctgcctgagacctccggtcgccgcaagaagctggagaggatgtacagcgttgaccgtgtgtctgacgacatccctattcgtacctggttccccaaggaaaatcttttcagcttccagacagcaaccacaactatgcaagcggtgttcaggggctacgcggagaggaagcgccggaaacgggagaatgattccgcgtctgtaatccagaggaacttccgcaaacacctgcgcatggtcggcagccggagggtgaaggcccagacgttcgctgagcggcgcgagcggagcttcagccggtcctggagcgaccccacccccatgaaagccgacacttcccacgactcccgagacagcagtgacctgcagagctcccactgcacgctggacgaggccttcgaggacctggactgggacactgagaagggcctggaggctgtggcctgcgacaccgaaggcttcgtgccaccaaaggtcatgctcatttcctccaaggtgcccaaggctgagtacatccccactatcatccgccgggatgacccctccatcatccccatcctctacgaccatgagcacgcaaccttcgaggacatccttgaggagatagagaggaagctgaacgtctaccacaagggagccaagatctggaaaatgctgattttctgccagggaggtcctggacacctctatctcctcaagaacaaggtggccacctttgccaaagtggagaaggaagaggacatgattcacttctggaagcggctgagccgcctgatgagcaaagtgaacccagagccgaacgtcatccacatcatgggctgctacattctggggaaccccaatggagagaagctgttccagaacctcaggaccctcatgactccttatagggtcaccttcgagtcacccctggagctctcagcccaagggaagcagatgatcgagacgtactttgacttccggttgtatcgcctgtggaagagccgccagcactcgaagctgctggactttgacgacgtcctgtgaggggcagaggcctccgcccagtcaccatcaggccactccctctgcaccgggacctggggctgggccgcctcgtgctccccgggactgtgtagctccggtctcgcctggagccacttcagggcacctcagacgttgctcaggttccccctgtgggttccggtcctcgctgcacccgtggccgcagaggctgcagtccctgggggccgggaggatcccgccctgtggcccgtggatgctcagcggccaggcactgacctgccatgcctcgcctggaggctcagctgtgggcatccctccatggggttcatagaaataagtgcaatttctacacccccgaaacaattcaaagggaagcagcatttcttgttaactagttaagcactatgctgctagttacagtgtaggcaccccggcccagcagcccagcagcccacatgtgttcaggaccctccctgcccaccccctccctgccgtatcgatcaccagcaccagggtggcccgtgtgcgtggggccagcgtcgccgggctgcccagcctggctctgtctacactggccgagtctctgggtctgtctacactggccgagtctccgactgtctgtgctttcacttacactcctcttgccaccccccatccctgcttacttagacctcagccggcgccggacccggtaggggcagtctgggcagcaggaaggaagggcgcagcgtcccctccttcagaggaggctctgggtggggcctgctcctcatccccccaagcccacccagcactctcattgctgctgttgagttcagcttttaccagcctcagtgtggaggctccatcccagcacacaggcctggggcttggcaggggcccagctggggctgggccctgggttttgagaaactcgctggcaccacagtgggcccctggacccggccgcgcagctggtggactgtaggggctcctgactgggcacaggagctcccagcttttgtccacggccagcaggatgggctgtcgtgtatatagctggggcgagggggcaggccccccttgtgcagagccaggggtctgagggcacctggctgtgttcccagctgagggagggctggggcgggggccgggcttggaacgatgtacgataccctcatagtgaccattaaacctgatcctcc

SEQ ID NO: 11280 - protein, 327 aa, Homo sapiens
MYSVDRVSDDIPIRTWFPKENLFSFQTATTTMQAVFRGYAERKRRKRENDSASVIQRNFRKHLRMVGSRRVKAQTFAERRERSFSRSWSDPTPMKADTSHDSRDSSDLQSSHCTLDEAFEDLDWDTEKGLEAVACDTEGFVPPKVMLISSKVPKAEYIPTIIRRDDPSIIPILYDHEHATFEDILEEIERKLNVYHKGAKIWKMLIFCQGGPGHLYLLKNKVATFAKVEKEEDMIHFWKRLSRLMSKVNPEPNVIHIMGCYILGNPNGEKLFQNLRTLMTPYRVTFESPLELSAQGKQMIETYFDFRLYRLWKSRQHSKLLDFDDVL

SEQ ID NO: 11281 - DNA, 1747 bp, Homo sapiens
  CDS (31)..(1746)
aaaaaaaaaaaaaaaaaaaacataacaagtatgaaaacaggtgagcttgagaaagaaacagcccctttgaggaaagatgcagatagttcaatatcagtcttagagatccatagtcaaaaagcacaaatagaggaacccgatcctccagaaatggaaacttctcttgattcttctgagatggcaaaagatctctcttcaaaaacagctttatcttccaccgagtcgtgtaccatgaaaggtgaagagaagtctcccaaaactaagaaggataagcgcccaccaatcctagaatgtcttgaaaagttagagaagtccaaaaagacttttcttgataaggacgcacaaagattgagtccaataccagaagaagttccaaagagtactctagagtcagaaaagcctggctctcctgaggcagctgaaacttctccaccatctaatatcattgaccactgtgagaaactagcctcagaaaaagaagtggtagaatgccagagtacaagtactgttggtggccagtctgtgaaaaaagtagacctagaaaccctaaaagaggattctgagttcacaaaggtagaaatggataatctggacaatgcccagacctctggcatagaggagccttctgagacaaagggttctatgcaaaaaagcaaattcaaatataagttggttcctgaagaagaaaccactgcctcagaaaatacagagataacctctgaaaggcagaaagagggcatcaaattaacaatcaggatatcaagtcggaaaaagaagcccgattctccccccaaagttctagaaccagaaaacaagcaagagaagacagaaaaggaagaggagaaaacaaatgtgggtcgtactttaagaagatctccaagaatatctagacccactgcaaaagtggctgagatcagagatcagaaagctgataaaaaaagaggggaaggagaagatgaggtggaagaagagtcaacagctttgcaaaaaactgacaaaaaggaaattttgaaaaaatcagagaaagatacaaattctaaagtaagcaaggtaaaacccaaaggcaaagttcgatggactggttctcggacacgtggcagatggaaatattccagcaatgatgaaagtgaagggtctggcagtgaaaaatcatctgcagcttcagaagaggaggaagaaaaggaaagtgaagaagccatcctagcagatgatgatgaaccatgcaaaaaatgtggccttccaaaccatcctgagctaattcttctgtgtgactcttgcgatagtggataccatactgcctgccttcgccctcctctgatgatcatcccagatggagaatggttctgcccaccttgccaacataaactgctctgtgaaaaattagaggaacagttgcaggatttggatgttgccttaaagaagaaagagcgtgccgaacgaagaaaagaacgcttggtgtatgttggtatcagtattgaaaacatcattcctccacaagagccagacttttctgaagatcaagaagaaaagaaaaaagattcaaaaaaatccaaagcaaacttgcttgaaaggaggtcaacaagaacaaggaaatgtataagctacagatttgatgagtttgatgaagcaattgatgaagctattgaagatgacatcaaagaagccgatggaggaggagttggccgaggaaaagatatctccaccatcacaggtcatcgtgggaaagacgtctctactattttggatg

SEQ ID NO: 11282 - protein, 572 aa, Homo sapiens
MKTGELEKETAPLRKDADSSISVLEIHSQKAQIEEPDPPEMETSLDSSEMAKDLSSKTALSSTESCTMKGEEKSPKTKKDKRPPILECLEKLEKSKKTFLDKDAQRLSPIPEEVPKSTLESEKPGSPEAAETSPPSNIIDHCEKLASEKEVVECQSTSTVGGQSVKKVDLETLKEDSEFTKVEMDNLDNAQTSGIEEPSETKGSMQKSKFKYKLVPEEETTASENTEITSERQKEGIKLTIRISSRKKKPDSPPKVLEPENKQEKTEKEEEKTNVGRTLRRSPRISRPTAKVAEIRDQKADKKRGEGEDEVEEESTALQKTDKKEILKKSEKDTNSKVSKVKPKGKVRWTGSRTRGRWKYSSNDESEGSGSEKSSAASEEEEEKESEEAILADDDEPCKKCGLPNHPELILLCDSCDSGYHTACLRPPLMIIPDGEWFCPPCQHKLLCEKLEEQLQDLDVALKKKERAERRKERLVYVGISIENIIPPQEPDFSEDQEEKKKDSKKSKANLLERRSTRTRKCISYRFDEFDEAIDEAIEDDIKEADGGGVGRGKDISTITGHRGKDVSTILD

SEQ ID NO: 11283 - DNA, 2450 bp, Homo sapiens
  CDS (175)..(2196)
gagcttgtccagacgaagcctcgcagggatgggttggagcctgggccgtgcttcgctcaggcagcgtttgaggcagacccagcagggtcctcctggggccttcctgcctttgaactgcggtggcgggcgggcgcacggtctcctgtacgccctagactaggggccgccatctccatggccacggccgtgagccggccctgcgccggcaggtcgcgggacatactgtggcgcgttttgggctggaggatagttgcaagtattgtttggtcagtgctatttctacccatctgcaccacagtatttataattttcagcaggattgatttgtttcatcctatacagtggctgtctgattctttcagtgacctgtatagttcctatgtaatcttttacttcctgctgctgtcagtggtaataataataataagtattttcaatgtggagttctatgcagttgtgccttctattccttgctccagactagctctgatagggaagatcattcatcctcagcaactcatgcactcatttattcatgctgcaatgggaatggtgatggcctggtgtgctgcagtgataacccagggccagtacagctttcttgtggttccctgcactggtactaacagctttggtagccctgctgcgcaaacctgcttaaatgaatatcatctttttttcctactgactggagcatttatgggctatagctatagcctcctgtattttgttaacaacatgaactatcttccatttcccatcatacagcaatacaagttcttgcgttttaggagatctctgctcttattagttaaacacagttgtgtggaatcactgttcctggttagaaatttctgcattttatattattttcttggctatattcccaaagcttggattagcactgctatgaaccttcacatagatgagcaggttcataggccacttgacacagtgagtggcctcttaaatctctcgttactctaccatgtctggctgtgtggtgtctttctcctgacgacttggtatgtctcatggatactcttcaaaatctatgccacagaggctcatgtgtttcctgttcaaccaccatttgcagaagggtcagatgagtgccttccaaaagtgttaaatagcaatcctccccccatcataaagtatttagccttgcaggacctgatgttgctttctcaatattctccttcacgaagacaagaagttttcagcctcagccaaccaggtggacatccccacaattggacagccatttcaagggagtgtttgaatcttttaaatggtatgactcagaaactgattctctatcaagaagctgctgctacgaatgggagagtgtcttcatcttacccagtggaacctaagaaattaaattctccagaagaaactgcttttcagacaccaaaatctagccagatgcctcggccttcagtgccaccattagttaaaacatcactgttttcttcaaaattatctacacctgatgttgtgagcccatttgggaccccatttggctctagtgtaatgaatcggatggctggaatttttgatgtaaacacctgctatgggtcaccgcaaagtcctcagctaataagaagggggccaagattgtggacatcagcttctgatcagcaaatgactgaattttctaatccttctccatctacctctattagtgctgagggtaagacaatgagacaacccagtgtgatttattcatggattcagaataaacgtgaacagattaagaatttcttgtcaaaacgggtgctgataatgtattttttcagtaagcacccagaggcctccattcaggctgttttttcagatgcccaaatgcatatttgggcattagaaggtctgtcgcacttagtagcagcatcatttacagaggatagatttggagttgtccagacgacactaccagctatccttaatactttgttgacactgcaagaggcagtcgacaagtactttaagcttcctcatgcttccagtaaaccaccccggatttcaggaagccttgtggacacttcatataaaacattaagatttgcattcagagcatcactgaaaactgccatctatcgaataactactacatttggtgaacatctgaatgctgtgcaagcatctgcagaacatcagaaaagacttcaacagttcttggagttcaaagaatagttaagtaatataaactgtgttcattacactgctgatacaactacagatgggacagtaaatgttcagcattcttggatcagaagaaaacggactaattagatgcttcctttgtcgtggtggttgctttgaaaactatactttaatgggagaaatcatggaaagaaattctcaacagaataactgaaaactgccttttctgtaccgattgctttttgtgtgtgtggtataataaaatctttattcaattttag

SEQ ID NO: 11284 - protein, 674 aa, Homo sapiens
MATAVSRPCAGRSRDILWRVLGWRIVASIVWSVLFLPICTTVFIIFSRIDLFHPIQWLSDSFSDLYSSYVIFYFLLLSVVIIIISIFNVEFYAVVPSIPCSRLALIGKIIHPQQLMHSFIHAAMGMVMAWCAAVITQGQYSFLVVPCTGTNSFGSPAAQTCLNEYHLFFLLTGAFMGYSYSLLYFVNNMNYLPFPIIQQYKFLRFRRSLLLLVKHSCVESLFLVRNFCILYYFLGYIPKAWISTAMNLHIDEQVHRPLDTVSGLLNLSLLYHVWLCGVFLLTTWYVSWILFKIYATEAHVFPVQPPFAEGSDECLPKVLNSNPPPIIKYLALQDLMLLSQYSPSRRQEVFSLSQPGGHPHNWTAISRECLNLLNGMTQKLILYQEAAATNGRVSSSYPVEPKKLNSPEETAFQTPKSSQMPRPSVPPLVKTSLFSSKLSTPDVVSPFGTPFGSSVMNRMAGIFDVNTCYGSPQSPQLIRRGPRLWTSASDQQMTEFSNPSPSTSISAEGKTMRQPSVIYSWIQNKREQIKNFLSKRVLIMYFFSKHPEASIQAVFSDAQMHIWALEGLSHLVAASFTEDRFGVVQTTLPAILNTLLTLQEAVDKYFKLPHASSKPPRISGSLVDTSYKTLRFAFRASLKTAIYRITTTFGEHLNAVQASAEHQKRLQQFLEFKE

SEQ ID NO: 11285 - DNA, 2357 bp, Homo sapiens
  CDS (386)..(1780)
atccgggcccttccagaagcaacccaggagccccgagacctgcagggatgtgtgcaccctgacccctgacgcatagccctgcacctgcagccagctggcctcgggcttgaaaacatggcgggtgcgctccaattcacggtggtttccaagcgcattctggaggagaaaacacatgagtgtgtggtcagggttctctgccgacagacctaccgtggggaagaaagagaagttctgaagatggatcatggccgtgactgcatgtcaaggagaatctccatgatgacacggaggcctacgtcgagatagagtaaatatggtccaattaaaaggtgacccgacaatcaacccctgaaaaaggcggtcataaaacccccaggagacgaagatgatggcacgtcgtgaccccaaacctggggcaaagagactggtgagagcccagaccctccagaagcagcggagggccccagttgggccaagggctcccccgcccgatgaagaagatcccaggctcaagtgcaaaaactgtgaggcctttggccacacggccagaagtaccaggtgccccatgaagtgctggaaggcagccctggttccaccgaactttggggaaaaggaagggaaggaaaacctgaaaccatggaagccccaggttgaagcgaaccctgggcccttgaacaaggataagggagagaaggaagagagaccaaggccacaagacccgcagaggaaggctctcctccacatattttccgggaaacctccagagaagccgctgccaaatcaaaaaggatccacggaatcttctgattatctgagggttgcaagcgggccaatgccggtccacacaaccagtaagaggccgcgtgtggaccctgtcctctctgatcgctcagctaccgaaatgtctgacaggggctccgtcttagcttcactgtctcccctcagaaaagccagtctgagctcctcctcaagtcttggaccaaaggaaagacagacaggggctgcggccgacatccctcagactgcagtcaggcaccagggccccgagcctctcctcgtggtgaagccgacacacagcagccctgcgggtggctgtcgagaagttccccaggctgcctccaaaacccacggcctgctccaggccgtcagcccccaggcacaagacaaacgtcctgcggtgacctcacagccctgcccaccagccgccacacacagcttgggcctaggctccaatctcagcttcgggccaggagccaagagatctgccccggctccgattcaggcttgcctgaacttccccaagaaaccgagactgggtcccttccagatccccgaaagcgccatccagggaggtgagctgggggccccggagaatctccaacctccgccagccgcaaccgaacttggaccacgtaccgtgtcaccccagataggcacgaggacacccgcccaggtgcttagcggcgaccggcagcctccgcacagcagaccttgcctgcctactgcccaggcctgcaccatgtcccatcacccagcggccagccatgatggggcccagcctctcagagtgctctttcggagactggaaaacggacgctggagctccagcctgctgacggccccctcatttcactctcctgagaagccgggagccttcctcgctcagagccctcatgtctcagagaagtctgagggtccctgtgttcgtgtcccaccaagcgtcctctatgaggaccttcaggttccctcctcctcagaggacagcgattctgacctggagtgagactgcaggtggcaggggctccttggcctccagctcccgtgacttggaggggactgtgggactgaggagcacagagcagagagcagactctgtgcggtgactccgaagctccccggctgtggcccttctgtggatgtgggagcccaggccaggcagggagcagatgcagggactctgccacgttgaattctggtgagggacattgtagttcgcatggttctctggaaacgcgccaggaaaagcttccgtgccagtgattcgttgcctcagaaactgcatgacgcgcaggagtcagacttccgctgggacgtcaataggaaacgggggaattactgtgtatttgctctctagacgactgaataagggaaaagttagggaaccctgagaggtgcagcccttccgctgtgccccgccctgagagcagtgtttccgacgctgggaagcgcgctgtgcaaagcgctctcggggtctttcctcagcctcgaaaagtgggctctggaatccctttgtaaataggtgtgttgaatttgttttgaagtgaataaaattctcaaaaagatgaaaaaaaaaaaag

SEQ ID NO: 11286 - protein, 465 aa, Homo sapiens
MMARRDPKPGAKRLVRAQTLQKQRRAPVGPRAPPPDEEDPRLKCKNCEAFGHTARSTRCPMKCWKAALVPPNFGEKEGKENLKPWKPQVEANPGPLNKDKGEKEERPRPQDPQRKALLHIFSGKPPEKPLPNQKGSTESSDYLRVASGPMPVHTTSKRPRVDPVLSDRSATEMSDRGSVLASLSPLRKASLSSSSSLGPKERQTGAAADIPQTAVRHQGPEPLLVVKPTHSSPAGGCREVPQAASKTHGLLQAVSPQAQDKRPAVTSQPCPPAATHSLGLGSNLSFGPGAKRSAPAPIQACLNFPKKPRLGPFQIPESAIQGGELGAPENLQPPPAATELGPRTVSPQIGTRTPAQVLSGDRQPPHSRPCLPTAQACTMSHHPAASHDGAQPLRVLFRRLENGRWSSSLLTAPSFHSPEKPGAFLAQSPHVSEKSEGPCVRVPPSVLYEDLQVPSSSEDSDSDLE

SEQ ID NO: 11287 - DNA, 2100 bp, Homo sapiens
  CDS (72)..(1340)
gtcaccaggacaacgggcgtcgccggcgccgtgtgacttcgggctgtgggctcgctcgcggctcttcggccatggttttctcaaacaatgatgaaggccttattaacaaaaagttacccaaagaacttctgttaagaatattttccttcttggatatagtaactttgtgccgatgtgcacagatttccaaggcttggaacatcttagccctggatggaagcaactggcaaagaatagatctttttaactttcaaacagatgtagagggtcgagtggtggaaaatatctcgaagcgatgcggtggattcctgaggaagctcagcttgcgaggctgcattggtgttggggattcctccttgaagacctttgcacagaactgccgaaacattgaacatttgaacctcaatggatgcacaaaaatcactgacagcacgtgttatagccttagcagattctgttccaagctgaaacatctggatctgacctcctgtgtgtctattacaaacagctccttgaaggggatcagtgagggctgccgaaacctggagtacctgaacctctcttggtgtgatcagatcacgaaggatggcatcgaggcactggtgcgaggttgtcgaggcctgaaagccctgcccctgaggggctgcacacagttagaagatgaagctctgaaacacattcagaattactgccatgagcttgtgagcctcaacttgcagtcctgctcacgtatcacggatgaaggtgtggtgcagatatgcaggggctgtcaccggctacaggctctctgcctttcgggttgcagcaacctcacagatgcctctcttacagccctgggtttgaactgtccgcgactgcaaattttggaggctgcccgatgctcccatttgactgacgcaggttttacacttttagctcggaattgccacgaattggagaagatggatcttgaagaatgcatcctgataaccgacagcacactcatccagctctccattcactgtcctaaactgcaagccctgagcctgtcccactgtgaactcatcacagatgatgggatcctgcacctgagcaacagtacctgtggccatgagaggctgcgggtactggagttggacaactgcctcctcatcactgatgtggccctggaacacctagagaactgccgaggcctggagcgcctcgagctgtacgactgccagcaggttacccgtgcaggcatcaagcggatgcgggctcagctccctcatgtcaaagtccacgcctactttgctcccgtcaccccaccgacagcagtggcaggaagtggacagcgactgtgcaggtgctgtgtcattctctgacagcagctgcctgggcccaaggggtgatgaggcatcctttcctctagaagacctgagtcttcctgaccgactccaccatcacccaatctgttgattctccattgggaaaggcatttacaggtaaaagacttctgtatggattgcagttactctggtgatagttttcacctttattctgctgtgaaacaatcaaatcaaagccttgtgtcagttaacacatgacaagtggtctcaatgcagctaggaccatgccagaaacctggatctcttaagagattggtacctacctaggtacgaaagttctacccttggcatactcagcattcctcaaaaagaccatcagtgttagcacaaactgagcagaaaaaataagctgttgattttctacctgatacttaagccagtggcctactttaattcacaattccattttgattagcaggacttttccactttgaagataaatagcaactttatcaaagtgactgtactgcaaattaattcataatgcctgatagttttatatatagagacttatgtggaaggcatgttaataggtttccatgagacaccaaagaaaagaggactctatactgggtggagcagggtcttcacctttttgtttctgtcaacttgtcatatacacctccagggaccaaaaacaaaagcagctcggagtctgtgttgcctgattggaaagtagaagctctggtgtatgctacagcacataacacatttttactaaaggaaaaaaaac

SEQ ID NO: 11288 - protein, 423 aa, Homo sapiens
MVFSNNDEGLINKKLPKELLLRIFSFLDIVTLCRCAQISKAWNILALDGSNWQRIDLFNFQTDVEGRVVENISKRCGGFLRKLSLRGCIGVGDSSLKTFAQNCRNIEHLNLNGCTKITDSTCYSLSRFCSKLKHLDLTSCVSITNSSLKGISEGCRNLEYLNLSWCDQITKDGIEALVRGCRGLKALPLRGCTQLEDEALKHIQNYCHELVSLNLQSCSRITDEGVVQICRGCHRLQALCLSGCSNLTDASLTALGLNCPRLQILEAARCSHLTDAGFTLLARNCHELEKMDLEECILITDSTLIQLSIHCPKLQALSLSHCELITDDGILHLSNSTCGHERLRVLELDNCLLITDVALEHLENCRGLERLELYDCQQVTRAGIKRMRAQLPHVKVHAYFAPVTPPTAVAGSGQRLCRCCVIL

SEQ ID NO: 11289 - DNA, 2034 bp, Homo sapiens
  CDS (510)..(1784)
agcagaatagccaggcaggacagagaaactccaccagcagtattgagcccaggcttctgtgggagagagtggagaagctggtgcccagacctggcagtggcagctcctcagggtccagcaactcaggatcccagcccgggtctcaccctgggtctcagagtggctccggggaacgcttcagagtgagatcatcatccaagtctgaaggctctccatctcagcgcctggaaaatgcagtgaaaaaacctgaagataaaaaggaagttttcagacccctcaagcctgctgatctgaccgcactggccaaagagcttcgagcagtggaagatgtacggccacctcacaaagtaacggactactcctcatccagtgaggagtcggggacgacggatgaggaggacgacgatgtggagcaggaaggggctgacgagtccacctcaggaccagaggacaccagagcagcgtcatctctgaatttgagcaatggtgaaacggaatctgtgaaaaccatgattgtccatgatgatgtagaaagtgagccggccatgaccccatccaaggagggcactctaatcgtccgccagactcagtccgctagtagcacactccagaaacacaaatcttcctcctcctttacaccttttatagaccccagattactacagatttctccatctagcggaacaacagtgacatctgtggtgggattttcctgtgatgggatgagaccagaagccataaggcaagatcctacccggaaaggctcagtggtcaatgtgaatcctaccaacactaggccacagagtgacaccccggagattcgtaaatacaagaagaggtttaactctgagattctgtgtgctgccttatggggagtgaatttgctagtgggtacagagagtggcctgatgctgctggacagaagtggccaagggaaggtctatcctcttatcaaccgaagacgatttcaacaaatggacgtacttgagggcttgaatgtcttggtgacaatatctggcaaaaaggataagttacgtgtctactatttgtcctggttaagaaataaaatacttcacaatgatccagaggttgagaagaagcagggatggacaaccgtaggggatttggaaggatgtgtacattataaagttgtaaaatatgaaagaatcaaatttctggtgattgctttgaagagttctgtggaagtctatgcgtgggcaccaaagccatatcacaaatttatggcctttaagtcatttggagaattggtacataagccattactggtggatctcactgttgaggaaggccagaggttgaaagtgatctatggatcctgtgctggattccatgctgttgatgtggattcaggatcagtctatgacatttatctaccaacacatatccagtgtagcatcaaaccccatgcaatcatcatcctccccaatacagatggaatggagcttctggtgtgctatgaagatgagggggtttatgtaaacacatatggaaggatcaccaaggatgtagttctacagtggggagagatgcctacatcagtagcatatattcgatccaatcagacaatgggctggggagagaaggccatagagatccgatctgtggaaactggtcacttggatggtgtgttcatgcacaaaagggctcaaagactaaaattcttgtgtgaacgcaatgacaaggtgttctttgcctctgttcggtctggtggcagcagtcaggtttatttcatgaccttaggcaggacttctcttctgagctggtagaagcagtgtgatccagggattactggcctccagagtcttcaagatcctgagaacttggaattccttgtaactggagctcggagctgcaccgagggcaaccaggacagctgtgtgtgcagacctcatgtgttgggttctctcccctccttcctgttcctcttatataccagtttatccccattcttttttttttttcttactccaaaataaatcaaggctgcaatgcagctggtgctgttcagattct

SEQ ID NO: 11290 - protein, 425 aa, Homo sapiens
MIVHDDVESEPAMTPSKEGTLIVRQTQSASSTLQKHKSSSSFTPFIDPRLLQISPSSGTTVTSVVGFSCDGMRPEAIRQDPTRKGSVVNVNPTNTRPQSDTPEIRKYKKRFNSEILCAALWGVNLLVGTESGLMLLDRSGQGKVYPLINRRRFQQMDVLEGLNVLVTISGKKDKLRVYYLSWLRNKILHNDPEVEKKQGWTTVGDLEGCVHYKVVKYERIKFLVIALKSSVEVYAWAPKPYHKFMAFKSFGELVHKPLLVDLTVEEGQRLKVIYGSCAGFHAVDVDSGSVYDIYLPTHIQCSIKPHAIIILPNTDGMELLVCYEDEGVYVNTYGRITKDVVLQWGEMPTSVAYIRSNQTMGWGEKAIEIRSVETGHLDGVFMHKRAQRLKFLCERNDKVFFASVRSGGSSQVYFMTLGRTSLLSW

SEQ ID NO: 11291 - DNA, 1652 bp, Homo sapiens
  CDS (103)..(1380)
gaagataatgtttgcttgcccagcaatggcaaattatatacaaaggtaatcaactgggtgcagcgtagcatctgggagaatggagacagtctggaagagctgatggaagaggttcaaaccttgtactactcagctgatcacaagctgcttgatgggaacctactagatggacaggctgaggtgtttggcagtgatgatgaccacattcagtttgtgcagaaaaagccaccacgtgagaatggccataagcagataagtagcagttcaactggatgtctctcttctccaaatgctacagtacaaagccctaagcatgagtggaaaatcgttgcttcagaaaagacttcaaataacacttacttgtgcctggctgtgctggatggtatattctgtgtcatttttcttcatgggagaaacagcccacagagctcaccaacaagtactccaaaactaagtaagagtttaagctttgagatgcaacaagatgagctaatcgaaaagcccatgtctcctatgcagtacgcacgatctggtctgggaacagcagagatgaatggcaaactcatagctgcaggtggctataacagagaggaatgtcttcgaacagtcgaatgctataatccacatacagatcactggtcctttcttgctcccatgagaacaccaagagcccgatttcaaatggctgtactcatgggccagctctatgtggtaggtggatcaaatggccactcagatgacctgagttgtggagagatgtatgattcaaacatagatgactggattcctgttccagaattgagaactaaccgttgtaatgcaggagtgtgtgctctgaatggaaagttatacatcgttggtggctctgatccatatggtcaaaaaggactgaaaaattgtgatgtatttgatcctgtaacaaagttgtggacaagctgtgcccctcttaacattcggagacaccagtctgcagtctgtgagcttggtggttatttgtacataatcggaggtgcagaatcttggaattgtccgaacacagtagaacgatacaatcctgaaaataatacctggactttaattgcacccatgaatgtggctaggcgaggagctggagtggctgttcttaatggaaaactgtttgtatgtggtggctttgatggttctcatgccatcagttgtgtggaaatgtatgatccaactagaaatgaatggaagatgatgggaaatatgacttcaccaaggagcaatgctgggattgcaactgtagggaacaccatttatgcagtgggaggattcgatggcaatgaatttctgaatacggtggaagtctataaccttgagtcaaatgaatggagcccctatacaaagattttccagttttaacaaatttaagaccctctcaaactaacaggcttagtgatgtaattatggttagcagaggtacacttgtgaataaagagggtgggtgggtatagatgttgctaacagcaacacaaagcttttgcatattgcatactattaaacatgctgtacatactttttgggtttatttggaaaggaatgcaaagatgaaggtctgttttgtgtacttttaagactttggttattttactttttggaaaagaataaaccaagaattgattgggcacatc

SEQ ID NO: 11292 - protein, 426 aa, Homo sapiens
MEEVQTLYYSADHKLLDGNLLDGQAEVFGSDDDHIQFVQKKPPRENGHKQISSSSTGCLSSPNATVQSPKHEWKIVASEKTSNNTYLCLAVLDGIFCVIFLHGRNSPQSSPTSTPKLSKSLSFEMQQDELIEKPMSPMQYARSGLGTAEMNGKLIAAGGYNREECLRTVECYNPHTDHWSFLAPMRTPRARFQMAVLMGQLYVVGGSNGHSDDLSCGEMYDSNIDDWIPVPELRTNRCNAGVCALNGKLYIVGGSDPYGQKGLKNCDVFDPVTKLWTSCAPLNIRRHQSAVCELGGYLYIIGGAESWNCPNTVERYNPENNTWTLIAPMNVARRGAGVAVLNGKLFVCGGFDGSHAISCVEMYDPTRNEWKMMGNMTSPRSNAGIATVGNTIYAVGGFDGNEFLNTVEVYNLESNEWSPYTKIFQF

SEQ ID NO: 11293 - DNA, 1506 bp, Homo sapiens
  CDS (188)..(1165)
agtcacctcttctcaaccctttacctgggcagatcatttgaaagcacaggaagaagctcaaggtcttgtccagcattgtagggcaacagaagttactttgcctaaaagtatacagagccttatctattggctccaccctgctttgtcttggctaccactgttccctcgtattggagctgatagaaaaatggctggaaagacaagtccttggtcaaatgatgcaaccctgcagcatgttttaatgagtgactggtctgtgagctttacttctctatataatttgctgaagacaaaactttgcccctatttctacgtttgtacctatcagtttactgtcctgttccgagcagcaggattagctggaagtgacttaatcacagctctcatatctccaacaactcgaggtttaagagaagctatgagaaatgaaggtattgaattttctctgcctttaataaaagaaagtggccataagaaggagacagcatctggaacaagcttgggatatggggaggagcaagccatcagtgatgaggatgaagaggaaagtttttcctggctggaagagatgggtgtgcaagataaaattaaaaagccagacatactttctatcaagctgcgtaaagagaaacatgaagtacaaatggatcacagacctgaatctgttgtgttggtaaaaggaatcaacacctttacattgctcaattttttgattaactctaagagtttagttgctacctcaggtccacaggcaggacttcctccaaccctcttgtcccctgttgctttccgaggtgccacaatgcaaatgcttaaggcacggagtgtgaatgtgaagacacaagctctttctggatacagagaccaatttagtttggagattacaggtcctatcatgcctcattctctgcattcactgaccatgctgctcaaatcttcacagagtggatctttctctgcagtactgtatccacacgagccaactgctgtatttaacatctgcctgcaaatggacaaagtacttgatatggaggttgttcataaggagcttactaactgtggtttgcaccctaacactctggagcaacttagtcaaataccgttacttgggaaatcatctttacggaatgtggtgctgagagactacatttataattggagatcctgaacaccaaaatctccatcaaagcagacacaggatgtttgcctgcaggggggagaaatacccagttttaaattatttccaccaacttctgcaacaaataatgaattcaaggtgggattagggtaagaggaaattcaaaaacgtgctctcacctgacagatctttcattgcagcagagaagttcccagacctcttgtgctctttctcctactgcaacaagacctttaaaaaaaaattgttcactaaataaatttcaaagcaccactttaaaacaaagatccctctgtaggagtctgaacctcaaaatgtatgccttcaaataaaatcagcagattcctagt

SEQ ID NO: 11294 - protein, 326 aa, Homo sapiens
MAGKTSPWSNDATLQHVLMSDWSVSFTSLYNLLKTKLCPYFYVCTYQFTVLFRAAGLAGSDLITALISPTTRGLREAMRNEGIEFSLPLIKESGHKKETASGTSLGYGEEQAISDEDEEESFSWLEEMGVQDKIKKPDILSIKLRKEKHEVQMDHRPESVVLVKGINTFTLLNFLINSKSLVATSGPQAGLPPTLLSPVAFRGATMQMLKARSVNVKTQALSGYRDQFSLEITGPIMPHSLHSLTMLLKSSQSGSFSAVLYPHEPTAVFNICLQMDKVLDMEVVHKELTNCGLHPNTLEQLSQIPLLGKSSLRNVVLRDYIYNWRS

SEQ ID NO: 11295 - DNA, 858 bp, Homo sapiens
  CDS (37)..(591)
gagaccgtgaggctctggcctgcagctcgcgccgccatggacgctgccgaggtcgaattcctcgccgagaaggagctggttaccattatccccaacttcagtctggacaagatctacctcatcgggggggacctggggccttttaaccctggtttacccgtggaagtgcccctgtggctggcgattaacctgaaacaaagacagaaatgtcgcctgctccctccagagtggatggatgtagaaaagttggagaagatgagggatcatgaacgaaaggaagaaacttttaccccaatgcccagcccttactacatggaacttacgaagctcctgttaaatcatgcttcagacaacatcccgaaggcagacgaaatccggaccctggtcaaggatatgtgggacactcgtatagccaaactccgagtgtctgctgacagctttgtgagacagcaggaggcacatgccaagctggataacttgaccttgatggagatcaacaccagcgggactttcctcacacaagcgctcaaccacatgtacaaactccgcacgaacctccagcctctggagagtactcagtctcaggacttctagagaaaggcctggtgcaggcggcttgctgggggatgtgagcgctcaggacgtgatgaggtactcgtggttctggagctctagaaacacttctgatgcatgaaaaatgtgtgatggtgcaaggaatggattcaggatgttgttggagaaacaagtttgtgattagtccttaaaacttagctccctgggacattcttcaattccacatctgtttctagaaaccagccctttttccccccacttttgagaaataaaaaagccttaggt

SEQ ID NO: 11296 - protein, 185 aa, Homo sapiens
MDAAEVEFLAEKELVTIIPNFSLDKIYLIGGDLGPFNPGLPVEVPLWLAINLKQRQKCRLLPPEWMDVEKLEKMRDHERKEETFTPMPSPYYMELTKLLLNHASDNIPKADEIRTLVKDMWDTRIAKLRVSADSFVRQQEAHAKLDNLTLMEINTSGTFLTQALNHMYKLRTNLQPLESTQSQDF

SEQ ID NO: 11297 - DNA, 1564 bp, Homo sapiens
  CDS (14)..(613)
tctctacccgggaatgtctcggcgaaagcagcggaaaccccaacagttaatctcggactgcgaaggtcccagcgcgtctgagaacggtgatgctagcgaggaggatcacccccaagtctgtgccaagtgctgcgcacaattcactgacccaactgaattcctcgcccaccagaacgcatgttctactgaccctcctgtaatggtgataattgggggccaggagaaccccaacaactcttcggcctcctctgaaccccggcctgagggtcacaataatcctcaggtcatggacacagagcatagcaaccccccagattctgggtcctccgtgcccacggatcccacctggggcccagagaggagaggagaggagtcttcagggcatttcctggtcgctgccacagaaccagtatgtggcattcctgtcaaatggcctgcccatgaagccctggaattccagctccacctccactaccactccaagcctggccccaccagtgctgtttggcctaggaactgtggctgggaaggtgcctccaacaatgggatccagggaagccaaggagaagacagcccccctcctatttcagcctcctgcacccaaggcagtgcctgagaagcccatcatagacaagaagtagcaaactgtacattccttcttcctccccctgctccagaaggtgccggtactgaagatgctccagtaattggtgacccaaccctaggaagtagggagaaatgaaggaagggcataggaaaattttcccagtaaatcccctgatggtcacattaaggtaaaggttttggctggtcagtgtgccaagacctctccagcttctcattcatgatgacctctcaaagttgggaaacaagctgatttcttgccaagaggtctcccaggagatatttgggaaatgtgaagttcgtatctttaaggagcatttttggtcagcgtggttgatgaactaatgatgagagagttaaggaatgttgctagaacatagggcttgctggtacctatgtgactaagaaagggacatgatgtaagggaaaaggcctcaaattcttgtgaatgtggacattctcgttaatattcttttgggctaatagtgacatagtgtgcagaggtgtaccagggatcatgggggatttcctagcactagtatgcttctagttttagataactccctcctttattccctggccccttgtattttccttatcttcctctttcaagacccctacccattttgcctatccgtaggctggggcttgtgtctttgtcattgtctggttcttaagagtcccagactttgggagaccagctccaggtggcgtcctccctgcctctccgtcttgtaatgagttgtagtatttactcttaacataggatcatttggaacaggagttctgaggaggagagagtgagggttttgctattgactgacttgaacgatggcttctcctcaagctgtaggctccagagcttcctaacctagtaaaatgtgtagaacagacgggagatattagtgtctttccctctatcattaaaggtgttttaacc

SEQ ID NO: 11298 - protein, 200 aa, Homo sapiens
MSRRKQRKPQQLISDCEGPSASENGDASEEDHPQVCAKCCAQFTDPTEFLAHQNACSTDPPVMVIIGGQENPNNSSASSEPRPEGHNNPQVMDTEHSNPPDSGSSVPTDPTWGPERRGEESSGHFLVAATEPVCGIPVKWPAHEALEFQLHLHYHSKPGPTSAVWPRNCGWEGASNNGIQGSQGEDSPPPISASCTQGSA

SEQ ID NO: 11299 - DNA, 2495 bp, Homo sapiens
  CDS (112)..(1137)
gtagtgacggggattgttgtgttgcagaaatccggcaatcgacctgaggacttgcgagccgctcagctcccgggacgtttggagctgctgctaaataatttctgctcagccatgtcgccggctccagatgcagccccggctcctgcgtcgatctccctgtttgacctcagcgcggatgctccggtctttcagggcctgagcctggtgagccacgcgcctggggaggctctggcccgggctccgcgtacttcctgttcaggctcaggggagagagaaagcccagaaagaaagctactccagggtcctatggatatttcagagaagttattttgttcaacttgtgaccagaccttccagaaccaccaagaacagagggaacattataagcttgactggcatcggtttaacctaaagcaacgtctcaaggacaagcctctcctgtctgccctggactttgaaaagcagagctccacaggagatctttccagcatctcgggatcagaagactcagactcagccagtgaggaggacttgcagacactggatcgggagagggctacatttgagaagttgagccgacccccaggcttttaccctcatcgagttcttttccagaatgcccagggccagtttctttatgcctaccgctgtgtcctaggccctcatcaggatcccccagaagaggcagaactgctgctacagaacctgcaaagtagaggtcccagagactgcgtggtgctcatggctgcagctgggcactttgctggtgctatatttcaaggaagagaagtggtgacacacaaaacttttcaccgctatacggttcgggccaagcggggcacagcccaggggcttcgggatgcccgaggtgggccatcacactctgctggagccaacctgaggcgctacaatgaagccacactatataaggatgttcgtgacctgctggcagggccaagctgggctaaggcgctggaggaggctggtacaatactgttgcgtgctccccgctctggccggtctttgttctttggaggcaagggagcacccctgcaaagggggatccccgactttgggatatccccctcgccacccgcagacccaccttccaagagctacagcgtgtgctccataagctgaccactttgcatgtctatgaagaagaccctcgggaagcagtcagactgcactcacctcagacacactggaaaacagtaagagaggagagaaagaagcctactgaggaagaaataagaaagatctgcagggatgaaaaggaagcgctggggcagaatgaggaatctcccaaacagggttcagggtcggagggagaagatggctttcaggtagagttggagctagtggagttgactgtggggactctggatctttgtgagtctgaagtattgcccaagcggaggaggagaaaaaggaataagaaggagaaaagccgagaccaggaggctggggcacatcggactcttctccagcaaactcaagaagaggagccttccacacagtcatcccaggcagttgctgcccccttgggccctttgctggatgaggccaaagcccctggtcagccagagctctggaatgcactgcttgctgcttgccgagctggagatgttggagtgctaaagctgcagctagctcccagccctgcagaccctagagttctgtctctgctcagtgcccccttgggctccggtggctttactctcctgcatgcagcagctgcagctggaagaggctcagtggttcgtctgctgctggaagcaggtgctgaccccactgtgcaggactctcgggcccggccaccttatactgttgcggctgacaaatcaacacgtaatgagttccgaaggttcatggagaagaatccagatgcctacgattacaacaaggctcaggtgccaggaccattgacaccagaaatggaggcacggcaggctacacggaaaagggagcagaaggcagcccggcggcaacgggaggaacagcagcagaggcagcaggagcaggaggagcgtgaacgagaagagcagcggcgatttgccgccctcagtgaccgagagaagagagctctggctgcagagcgccgactcgctgcccagttgggagcccctacctctccaatccctgactctgcaatcgtcaatactcgacgctgctggagttgtggggcatccctccaaggcctgactccctttcactacctcgacttctctttctgctccacacgttgcctccaggatcatcgccgtcaggcagggaggccctcttcctgatctcttacagctctacctggggccaactcagggacctgagagggcacattcacagcagccctaggttttttcttccccgtgaaaccagagatgatttggaagatgggggtgaaggacactcgggaactagggcaaagacagggctagaggtatgtggagctggtactgtctctggaattttaatcacaataaagtttggcaagg

SEQ ID NO: 11300 - protein, 342 aa, Homo sapiens
MSPAPDAAPAPASISLFDLSADAPVFQGLSLVSHAPGEALARAPRTSCSGSGERESPERKLLQGPMDISEKLFCSTCDQTFQNHQEQREHYKLDWHRFNLKQRLKDKPLLSALDFEKQSSTGDLSSISGSEDSDSASEEDLQTLDRERATFEKLSRPPGFYPHRVLFQNAQGQFLYAYRCVLGPHQDPPEEAELLLQNLQSRGPRDCVVLMAAAGHFAGAIFQGREVVTHKTFHRYTVRAKRGTAQGLRDARGGPSHSAGANLRRYNEATLYKDVRDLLAGPSWAKALEEAGTILLRAPRSGRSLFFGGKGAPLQRGIPDFGISPSPPADPPSKSYSVCSIS

SEQ ID NO: 11301 - DNA, 2021 bp, Homo sapiens
  CDS (903)..(1697)
gcatacatgacaaaatgtggccacagcttttgctacaagtgtattcatcagagtttggaggacaataatagatgtcccaagtgtaactatgttgtggacaatattaaccatctgtatcctaatttcttggtgaatgaactcattcttaaacagaagcaaagatttgaggaaaagaggttcaaattggaccactcagtgagtagcaccaatggccacaggtggcagatatttcaagattggttgggaactgaccaagataaccttgatttggccaatgtcaatcttatgttggagttactagtgcagaagaagaaacaactggaagcagaatcacatgcagcccaactacagattcttatggaattcctcaaggttgcaagaagaaataagagagaggaaatgagtggcttatactctcctgtcagtgaggatagcacagtgcctcaatttgaagctccttctccatcacacagtagtattattgattccacagaatacagccaacctccaggtttcagtggcagttctcagacaaagaaacagccttggtataatagcacgttagcatcaagacgaaaacgacttactgctcattttgaagacttggagcagtgttacttttctacaaggatgtctcgtatctcagatgacagtcgaactgcaagccagttggatgaatttcaggaatgcttgtccaagtttactcgatataattcagtacgacctttagccacattgtcatatgctagtgatctctataatggttccagtatagtctctagtattgaatttgaccgggattgtgactattttgcgattgctggagttacaagaagattaaagtctatgaatatgacactgtcatccaggatgcagtggatattcattaccctgagaatgaaatgacctgcaattcgaaaatcagctgtatcagttggagtagttaccataagaacctgttagctagcagtgattatgaaggcactgttattttatgggatggattcacaggacagaggtcaaaggtctatcaggagcatgagaagaggtgttggagtgttgactttaatttgatggatcctaaactcttggcttcaggttctgatgatgcaaaagtgaagctgtggtctaccaatctagacaactcagtggcaagcattgaggcaaaggctaatgtgtgctgtgttaaattcagcccctcttccagataccatttggctttcggctgtgcagatcactgtgtccactactatgatcttcgtaacactaaacagccaatcatggtattcaaaggacaccgtaaagcagtctcttatgcaaagtttgtgagtggtgaggaaattgtctctgcctcaacagacagtcagctaaaactgtggaatgtagggaaaccatactgcctacgttccttcaagggtcatatcaatgaaaaaaactttgtaggcctggcttccaatggagattatatagcttgtggaagtgaaaataactctctctacctgtactataaaggactttctaagactttgctaacttttaagtttgatacagtcaaaagtgttctcgacaaagaccgaaaagaagatgatacaaatgaatttgttagtgctgtgtgctggagggcactaccagatggggagtccaatgtgctgattgctgctaacagtcagggtacaattaaggtgctagaattggtatgaagggttaactcaagtcaaattgtacttgatcctgctgaaatacatctgcagctgacaatgagagaagaaacagaaaatgtcatgtgatgtctctccccaaagtcatcatgggttttggatttgttttgaatatttttttctttttttcttttccctcctttatgacctttgggacattgggaatacccagccaactctccaccatcaatgtaactccatggacattgctgctcttggtggtgttatctaatttttgtgatagggaaacaaattcttttgaataaaaataaataacaaaacaataaaagtttattgagccac

SEQ ID NO: 11302 - protein, 265 aa, Homo sapiens
MTCNSKISCISWSSYHKNLLASSDYEGTVILWDGFTGQRSKVYQEHEKRCWSVDFNLMDPKLLASGSDDAKVKLWSTNLDNSVASIEAKANVCCVKFSPSSRYHLAFGCADHCVHYYDLRNTKQPIMVFKGHRKAVSYAKFVSGEEIVSASTDSQLKLWNVGKPYCLRSFKGHINEKNFVGLASNGDYIACGSENNSLYLYYKGLSKTLLTFKFDTVKSVLDKDRKEDDTNEFVSAVCWRALPDGESNVLIAANSQGTIKVLELV

SEQ ID NO: 11303 - DNA, 1985 bp, Homo sapiens
ggcctactggctattctgtaaatgttcaatgaactagagaatgattcttgggtagttaatattgtcaatgttgatgaactcttttccttcgctgaaagcagctactttgttggaggtttcaattctgcgtggcaatttgcagcatttctagtggtactgctccacattttacagctttatgaagaaggtgtttactttttttgaaattaccttgagacatttcaaactgtgcagaagatatatgcacaaaagcaaatgtcttgcagtttgctatagccacttatcatcatctggctcttgaatagctttaattcagctgttgaatctcacttgaatttgagcaaaaccttcatctttatatgtatctggacaaattacttcaattgcttgacagtaatgaccaatcaatttatttaaaatagtatcatttagtaggacagtgtttttctctggtttgagcaacgaattcaaccagtcctctgggttgatcatcatcatcatcatcatttggttatcagttcctgagttatttttaccagggagttttatacctttagacagctattttgaattatctcaggaatgtcatatatctctgcctctttagagtcagtcactggcactttgtctgtttggtgacatcatgtttccctgactgttcttcatctttgtagttatacattgatatatgtgcattgaatatgtaggtatttataaacagtctttgcaatctggctttgtctgtgattgtccttgtatagtaggtctgtccagaaattgtaagcatactgtcttttttggtctttaagcccgtgaacgctacagcccgtgtagtgccaaatggtgccctaagcccaggttccctgcagtccactctgtgatttgtttgttgactgctgtgagccccacccccattctttgtttctaatttacacctagcaggctaaccctgctggcacctgcagtgcttccagggggaaaggaccatagtgtgcccctgtgaagagtctcagaatggtgcggaaggtgaatgcccacctcccactctcttttcccactgtagaaactgattccagagaaattctccaagtgcggtgctatgtgggcttgcgggagaggtgttatgatcaaacagaaccattctctttacctctgatcatggtttttcttggctctgtggtccagtgagttgtcacagcttcactcccaatttctgggatattcagggcaataatcttgccactgggtatttgctagttgaaattatgtggtagggagagaagccagtaagtttcactcctccgtttggctgatgtcactctcgaattctgtactttcatacggattgtaatagggagggtctaaaaggaagcttcagttttggatttttagagcttcttctaagtacaattgttgaatcaagaggtaaaaatggtatgttataactggaaatacgctgagattaaaaaggagataaattagccccattgggacagtgctattgggaatgtgaattgataccactttcctggagtctagtttagtatttattttatatgtaatgcctgaaaagatgtgtgtctcctttgactcaatacttataggaatttacacaaaggttttaatcaaagattatagaactgttatactggaaaaacacgaaatattctaattatgaattaattggggattggttaaataaactatggtttgatatgctctaaaaataatgttacagaaaaaagtgtactgatatggcaaaatgtatgacttatagttaaaaaagcaggttagatgttgatagatacagtatgatagaaaaagatcaggaaggtatatgctgacatttaaatctggatatttatgagtgttttttttatttcaatctttgtacatgcatgtattttctagaaattgtattactatctttgtaataaagtaaattatttttaagggacaaaaaaaaaaaaaaaaaggccacatgt

SEQ ID NO: 11304 - DNA, 1673 bp, Homo sapiens
  CDS (9)..(1334)
aaacagacatggccggcgaaggagatcagcaggacgctgcgcacaacatgggcaaccacctgccgctcctgcctgcagagagtgaggaagaagatgaaatggaagttgaagaccaggatagtaaagaagccaaaaaaccaaacatcataaattttgacaccagtctgccgacatcacatacatacctaggtgctgatatggaagaatttcatggcaggactttgcacgatgacgacagctgtcaggtgattccagttcttccacaagtgatgatgatcctgattcccggacagacattacctcttcagctttttcaccctcaagaagtcagtatggtgcggaatttaattcagaaagatagaacctttgctgttcttgcatacagcaatgtacaggaaagggaagcacagtttggaacaacagcagagatatatgcctatcgagaagaacaggattttggaattgagatagtgaaagtgaaagcaattggaagacaaaggttcaaagtccttgagctaagaacacagtcagatggaatccagcaagctaaagtgcaaattcttcccgaatgtgtgttgccttcaaccatgtctgcagttcaattagaatccctcaataagtgccagatatttccttcaaaacctgtctcaagagaagaccaatgttcatataaatggtggcagaaataccagaagagaaagtttcattgtgcaaatctaacttcgtggcctcgctggctgtattccttatatgatgctgagaccttaatggacagaatcaagaaacagctacgtgaatgggatgaaaatctaaaagatgattctcttccttcaaatccaatagatttttcttacagagtagctgcttgtcttcctattgatgatgtattgagaattcagctccttaaaattggcagtgctatccagcgacttcgctgtgaattagacattatgaataaatgtacttccctttgctgtaaacaatgtcaagaaacagaaataacaaccaaaaatgaaatattcagtttatccttatgtgggccgatggcagcttatgtgaatcctcatggatatgtgcatgagacacttactgtgtataaggcttgcaacttgaatctgataggccggccttctacagaacacagctggtttcctgggtatgcctggactgttgcccagtgtaagatctgtgcaagccatattggatggaagtttacggccaccaaaaaagacatgtcacctcaaaaattttggggcttaacgcgatctgctctgttgcccacgatcccagacactgaagatgaaataagtccagacaaagtaatactttgcttgtaaacagatgtgatagagataaagttagttatctaacaaattggttatattctaagatctgctttggaaattattgcctctgatacatacctaagtaaacataacattaatacctaagtaaacataacattacttggagggttgcagtttctaagtgaaactgtatttgaaacttttaagtatactttaggaaacaagcatgaacggcagtctagaataccagaaacatctacttgggtagcttggtgccattatcctgtggaatctgatatgtctggtagcatgtcattgatgggacatgaagacatctttggaaatgatgagattatttcctgtgtt

SEQ ID NO: 11305 - protein, 442 aa, Homo sapiens [sequence omitted]

SEQ ID NO: 11306 - DNA, 1973 bp, Homo sapiens
  CDS (156)..(764)
agccgccgcctcgccgcttcccctcgtcggagcggccgctcgtccgcccggcttgaggcccgcggggagcgcggcgcaattcgtcggcccgcgggggggcggcctcccggcatcttcgcggcgaccaaggactaccaggaaggggagcggctgggatggcgcgtccgcggccccgcgagtacaaagcgggcgacctggtcttcgccaagatgaagggctacccgcactggccggcccggattgatgaactcccagagggcgctgtgaagcctccagcaaacaagtatcctatcttcttttttggcacccatgaaactgcatttctaggtcccaaagacctttttccatataaggagtacaaagacaagtttggaaagtcaaacaaacggaaaggatttaacgaaggattgtgggaaatagaaaataacccaggagtaaagtttactggctaccaggcaattcagcaacagagctcttcagaaactgagggagaaggtggaaatactgcagatgcaagcagtgaggaagaaggtgatagagtagaagaagatggaaaaggcaaaagaaagaatgaaaaagcaggctcaaaacggaaaaagtcatatacttcaaagaaatcctctaaacagtcccggaaatctccaggagatgaagatgacaaagactgcaaagaagaggaaaacaaaagcagctctgagggtggagatgcgggcaacgacacaagaaacacaacttcagacttgcagaaaaccagtgaagggacctaactaccataatgaatgctgcatattaagagaaaccacaagaaggttatatgtttggttgtctaatattcttggatttgatatgaaccaacacatagtccttgttgtcattgacagaaccccagtttgtatgtacattattcatattcctctctgttgtgtttcggggggaaaagacattttagccttttttaaaagttactgatttaatttcatgttatttggttgcatgaagttgcccttaaccactaaggattatcaagatttttgcgcagacttatacatgtctaggatccttttatcaaggcagttatgatcatcgttttcctgccttgaccccaccatcatcaaacactcagttaaatataaattaacattttttagatgaccactcaacataatgcttaagaatggaatttcctctctgtgacagaacccaggaattaattcctaaatacataacgttggtatattgaagacgaaattaaaattgtccttcagttttgaggccatgtgtaaagtttaaccatattgtaaaatatctattccgtattagaaatagctagttgacagcttatacttctcaaaattcatattgttatgtacacaaactaagtttctatatgtgaagttagtgagtctttttgtgttactccaaaataaaggcaatgatttatttttttcccagtgccaatacaattttgagctaagcactcaaggtggatactttacattttaaagctggaatcagcaacagccctatgggaaaccagacaaagcattgacttttaaatgtagacttttaaaataaactgttttcttttggaactacaattagaatagttaatattcatccttaaaccattattatgtgtacattattgttgctattgtgataatagagaattttatttatttttatgccagcttatattgtgagaacacatttagtcagtttgggttttatcaatcctgttaatgcttgtccttggaacatctttcgcgtattcacggtttgtagttgaaaagtttactgtaaaaaaatcaaaaacaaaaaaatgtattgtttttacagaataaatttattgggatgtgtactgggagtaagatttgaggttgtaagcaaactaagttagtgtaatttggcttcatatatgtaacgtgaggtattaatgtaattcatatattaaagcaaaaattgttcgcagc

SEQ ID NO: 11307 - protein, 203 aa, Homo sapiens
MARPRPREYKAGDLVFAKMKGYPHWPARIDELPEGAVKPPANKYPIFFFGTHETAFLGPKDLFPYKEYKDKFGKSNKRKGFNEGLWEIENNPGVKFTGYQAIQQQSSSETEGEGGNTADASSEEEGDRVEEDGKGKRKNEKAGSKRKKSYTSKKSSKQSRKSPGDEDDKDCKEEENKSSSEGGDAGNDTRNTTSDLQKTSEGT

SEQ ID NO: 11308 - DNA, 1893 bp, Homo sapiens
  CDS (104)..(1582)
gaagcgcgccgcgcacctcatggttccggggacagttagggcggcggatggagggtttggaatcacttgctaggagtcttgtctctctgccacccaggacatcatggcagctcacctggtaaagcgatgcacgtgcctcctgagagaagctgctcgtcaggcccctgccatggctccagttggccgactgagacttgcctgggtagcccataagactctgacttcctcagccacctcacccatttcccacctcccaggttccttgatggagccggtggagaaggaacgagcatctactccctacatagagaagcaggtggaccacctcatcaagaaggccacaaggccagaggagctcctggagctacttggtggcagtcacgacttggacagcaatcaagcagcaatggtacttatccggctctctcacttgctgtctgagaagccagaagataaaggcttgctcatacaggatgcccactttcatcaacttctctgtctgctcaacagtcagattgcctcggtctggcatggtaccctctcgaagctgctgggaagcctgtatgctctgggcatccccaaggcctccaaggagctgcagtcggtggagcaggaggtccgctggcgcatgcggaagctcaagtacaagcacctggccttcctggcagagtcctgtgccaccctctcacaggagcagcactcgcaggagctgctggctgagctgctcacacacctggaaaggcgttggacagaaattgaagattcccacacattagtgaccgtcatgatgaaggtgggacacctctcggagccactaatgaaccgcctggaagacaagcacgtcctgaacagagcgcaggacatcaccctgccccacctgtgcagcgtacttctggcttttgcgcgtctgaacttccatccagaccaagaggatcagttcttcagcctggtacatgagaagctggggtcagagctgccaggcctggagccagccctgcaggtggacctggtgtgggccctgtgtgtgctgcagcaggcacgggaagcagagctgcaagccgtcctccaccctgaatttcacatccaatttctagggggcaagtctcagaaggatcagaacaccttccagaagctgctccacatcaacgccactgccctgctggagtaccccgagtactcgggtccccttctgcctgcctcggctgtggcccctgggccctcagcccttgacaggaaggtgacccccctgcaaaaggagctgcaggagacgctgaaggggctgctggggagcgccgacaagggcagcctcgaggtggccacgcagtatggctgggtgctggatgctgaggtgctgctggacagtgacggcgagtttctgcccgtaagggactttgtggcacctcaccttgcccagccaactgggagccagtcaccacctccagggtctaagaggctagcgttcttgcggtgggagttccccaacttcaacagccgaagcaaggacttgctgggtcgctttgttctggcccggcgacacatagtggctgcaggcttcctgatagtggacgtcccattctatgagtgactggaactcaagtctgaatggcagaaaggcgcctacctcaaggacaagatgcgcaaagcggtggccgaggagctggccaagtgacttgtgccagcagcatggactgcgtgcctctccgccggaggtctagctgtgggcggccaagaagggtcacccttgaggacaaacctctgtgcaggaccttggccagagtggggagggtggccagccactctgagggacagaacgtcctcttgtgtataataaacctttaattttggtgttggacccctggggccttcccaggcttggtcaccctctgcactgtc

SEQ ID NO: 11309 - protein, 493 aa, Homo sapiens
MAAHLVKRCTCLLREAARQAPAMAPVGRLRLAWVAHKTLTSSATSPISHLPGSLMEPVEKERASTPYIEKQVDHLIKKATRPEELLELLGGSHDLDSNQAAMVLIRLSHLLSEKPEDKGLLIQDAHFHQLLCLLNSQIASVWHGTLSKLLGSLYALGIPKASKELQSVEQEVRWRMRKLKYKHLAFLAESCATLSQEQHSQELLAELLTHLERRWTEIEDSHTLVTVMMKVGHLSEPLMNRLEDKHVLNRAQDITLPHLCSVLLAFARLNFHPDQEDQFFSLVHEKLGSELPGLEPALQVDLVWALCVLQQAREAELQAVLHPEFHIQFLGGKSQKDQNTFQKLLHINATALLEYPEYSGPLLPASAVAPGPSALDRKVTPLQKELQETLKGLLGSADKGSLEVATQYGWVLDAEVLLDSDGEFLPVRDFVAPHLAQPTGSQSPPPGSKRLAFLRWEFPNFNSRSKDLLGRFVLARRHIVAAGFLIVDVPFYE

SEQ ID NO: 11310 - DNA, 1790 bp, Homo sapiens
  CDS (23)..(811)
aaagtgggctccaggcgtcgcgatggaggagagcgggtacgagtcggtgctctgtgtcaagcctgacgtccacgtctaccgcatccctccgcgggctaccaaccgtggctacagggctgcggagtggcagctggaccagccatcatggagtggccggctgaggatcactgcaaagggacagatggcctacatcaagctggaggacaggacgtcaggggagctctttgctcaggccccggtggatcagtttcctggcacagctgtggagagtgtgacggattccagcaggtacttcgtgatccgcatcgaagatggaaatgggcgacgggcgtttattggaattggcttcggggaccgaggtgatgcctttgacttcaatgttgcattgcaggaccatttcaagtgggtgaaacagcagtgtgaatttgcaaaacaagcccagaacccagaccaaggccctaaactggacctgggcttcaaggagggccagaccatcaagctcaacatcgcaaacatgaagaagaaggaaggagcagctgggaatccccgagtccggcctgccagcacaggagggctgagcctgcttccccctcccccaggggggaaaacctccaccctgatccctccccctggggagcagttggctgtggggggatccctcgtccagccagcagttgctcccagttcaggaggtgctcctgtaccctggccacagcccaatcctgccactgctgacatctggggagactttaccaaatctacaggatcaacttccagccagacccagccaggcacaggctgggtccagttctgacctgagcacggtttttcctcatgtgacttctgggaaggcgctccctcatctgggccaaaggaaggaggacgaagccctcctcagctggcctgtgtttggggcatgaatctctcctctcctccttgtctggctctgttgacaaaccgggcatgtttggcagtaaattggcaccgtgtcacatgatcacagttcagcgggaggctttccgtacccacactggctgtagccacttcagtccatctgccctccagaggaggggtttcttcctgatttttagcaggtttagaggctgcagcttgagctacaatcaggagggaaattggaaggattagcagcttttaaaaatgtttaaatattttgctttgctaatgtgctgatccgcactaactcatctttgcaaaaggaactgctccctcggcgtgccccagctggggcctctgaagggattcctcactgtgggcagctgccctgagcttcaggcagcagtgttcatctctggccagttgtctggtttccatgtattctaggccaggtaggcaacacagagccaaggcgggtgctggaagccagacggaacagtgttggggcaggaaggtggatgctgttgtcatggagctgtgggagttggcactctgtctgctggtggccctctcggctcacatgttcacagtgcagctcctggcagacttgggttttctctttggtggtttctaaagtgccttatctgcaaacaacttcttttctccttcaggaactgtgaatggctagaagaaggagctcagtaaactagaagtccagggttgcttggtttactggtttataagaaatctgaaagcacctctgacattccttttattaactcacctctcagttgaaagatttcttctttgaaaggtcaagaccgtgaactgaaaaaagtgttggcctttttgcgggaccagatttttaagataaaataaatatttttacttctgtc

SEQ ID NO: 11311 - protein, 263 aa, Homo sapiens
MEESGYESVLCVKPDVHVYRIPPRATNRGYRAAEWQLDQPSWSGRLRITAKGQMAYIKLEDRTSGELFAQAPVDQFPGTAVESVTDSSRYFVIRIEDGNGRRAFIGIGFGDRGDAFDFNVALQDHFKWVKQQCEFAKQAQNPDQGPKLDLGFKEGQTIKLNIANMKKKEGAAGNPRVRPASTGGLSLLPPPPGGKTSTLIPPPGEQLAVGGSLVQPAVAPSSGGAPVPWPQPNPATADIWGDFTKSTGSTSSQTQPGTGWVQF

SEQ ID NO: 11312 - DNA, 1109 bp, Homo sapiens
  CDS (83)..(631)
aaaatagggtcactgggccgcttggcggtgtcgttgcggtaccaggtccgcgtgaggggttcgggggttctgggcaggcacaatggcgtctcgagcaggcccgcgagcggccggcaccgacggcagcgactttcagcaccgggagcgcgtcgccatgcactaccagatgagtgtgaccctcaagtacgaaatcaagaagctgatctacgtacatctggtcatatggctgctgctggttgctaagatgagcgtggaacacctggggctcttgtcacatgatcaggtggccatgccctatcagtgggaatacccgtatttgctgagcattttgccctctctcttgggccttctctcctttccccgcaacaacattagctacctggtgctctccatgatcagcatgggactcttttccatcgctccactcatttatggcagcatggagatgttccctgctgcacagcagctctaccgccatggcaaggcctaccgtttcctctttggtttttctgccgtttccatcatgcacctggtgttggtgttggcagtgcaagtgcatgcctggcagttgtactacagcaagaagctcctagactcttggttcaccagcacacaggagaagaagcataaatgaagcctctttggggtgaagcctggacatcccatcgaatgaaaggacactagtacagcggttccaaaatcccttctggtgattttagcagctgtgatgttggtacctggtgcagaccaggccaaagttctggaaagctccttttgccatctgctgaggtggcaaaactataatttattcctggttggctagaactgggtgaccaacagctatgaaacaaatttcagctgtttgaagttgaactttgaggtttttctttaagaatgagcttcgtccttgcctctactcggtcattctccccatttccatccattaccccttagccattgagactaaaggaaatagggaataaatcaaattacttcatctctaggtcacgggtcaggaaacatttgggcagctgctcccttggcaggctgtggtcccctctgcaaagcattttaattaaaaacctcaataaagatggccctgcccacac

SEQ ID NO: 11313 - protein, 183 aa, Homo sapiens [sequence omitted]

SEQ ID NO: 11314 - DNA, 1667 bp, Homo sapiens
  CDS (146)..(1480)
gtctctcgttttcggacggctgcagcatcgcggtggggatcgaaagcgggggcttctgggacgcagctctggagacgcggcctcggaccagccatttcggtgtagaagtggcagcacggcagattcatctgaaaactacattaagatgaagacctttgaaggtttctgtgctttgcatctcgctgcaagtcaaggacattggaaaatcgtacagattcttttagaagctggggcagatcctaatgcaactactttagaagaaacgacaccattgttttcagctgttgaaaatggacagatagatgtgttaaggctgttgcttcaacacggagcaaatgttaatggatcccattctatgtgtggatggaactccttgcaccaggcttcttttcaggaaaatgctgagatcataaaattgcttcttagaaaaggagcaaacaaggaatgccaggatgactttggaatcacacccttatttgtggctgctcagtatggcaagctagaaagcttgagcatacttatttcatcgggtgcaaatgtcaattgtcaagccttggacaaagctacacccttgttcattgctgctcaagagggacacacaaaatgtgtggagcttttgctctccagtggggcagatcctgatctttactgtaatgaggacagttggcagttacctattcatgcagctgcacaaatgggccatacaaaaatcttggacttgttaataccacttactaaccgggcctgtgacactgggctaaacaaagtaagccctgtttactcagcagtgtttgggggacatgaagattgcctagaaatattactccggaatggctacagcccagacgcccaggcgtgccttgtttttggattcagttctcctgtgtgcatggctttccaaaaggactgtgagttctttggaattgtgaacattcttttgaaatatggagcccagataaatgaacttcatttggcatactgcctgaagtacgagaagttttcgatatttcgctactttttgaggaaaggttgctcattgggaccatggaaccatatatatgaatttgtaaatcatgcaattaaagcacaagcaaaatataaggagtggttgccacatcttctggttgctggatttgacccactgattctactgtgcaattcttggattgactcagtcagcattgacacccttatcttcactttggagtttactaattggaagacacttgcaccagctgttgaaaggatgctctctgctcgtgcctcaaacgcttggattctacagcaacatattgccactgttccatccctgacccatctttgtcgtttggaaattcggtccagtctaaaatcagaacgtctacggtctgacagttatattagtcagctgccacttcccagaagcctacataattatttgctctatgaagacgttctgaggatgtatgaagttccagaactggcagctattcaagatggataaatcagtgaaactacttaacacagctaatttttttctctgaaaaatcatcgagacaaaagagccacagagtacaagtttttatgattttatagtcaaaagatgattattgattgtcagataggttaggttttggggggccagtagttcagtgagaatgtttatgtttacaactagccttcccagt

SEQ ID NO: 11315 - protein, 445 aa, Homo sapiens [sequence omitted]

SEQ ID NO: 11316 - DNA, 1944 bp, Homo sapiens
  CDS (76)..(1572)
gctgtcagctttctccgtggtctgagtttgtggctgcatttttatctctggtggctctgctacggcggcgcagaaatgaggcagaagcggaaaggagatctcggccctgctgagctgatgatgctgactataggagatgttattaaacaactgattgaagcccacgagcaggggaaagacatcgatctaaataaggtgaaaaccaagacagctgccaaatatggcctttctgcccagccccgcctggtggatatcattgctgccgtccctcctcagtatcgcaaggtcttgatgcccaagttaaaggcgaaacccatcagaactgctagtgggattgctgtcgtggctgtgatgtgcaaaccccacagatgtccacacatcagttttacaggaaatatatgtgtatactgccctggtggacctgattctgattttgagtattccacccagtcttacactggctatgagccaacctccatgagagctatccgtgccagatatgaccctttcctacagacaagacaccgaatagaacagttaaaacaacttggtcatagtgtggataaagtggagtttattgtgatgggtggaacgtttatggcccttccagaagaatacagagattattttattcgaaatttacatgatgccttatcaggacatacttccaacaatatttacgaggcagtcaagtattctgagagaagcctcacaaagtgtattggaattactattgaaaccagaccagattactgcatgaagcgacatttaagtgacatgttgacctatggctgcacaaggctggagattggggtgcagagtgtttatgaagatgtggctagagacaccaacaggggccacactgtgaaggcagtgtgtgagtcatttcacctggccaaagattccggttttaaagtggtggcccatatgatgcctgacctgccaaacgtgggactagaaagagacattgaacagttcacagagttttttgagaaccctgcttttcgtcccgatgggctgaaactctatcctaccctggtgattcgtgggaccgggctttatgagctttggaaatcaggaagatataagagttactctcctagtgacctggttgaattggtggctcggatcctagccctcgtgcctccatggactcgagtgtaccgagtacagagggatattccaatgcctttagttagctcaggagtagagcatggtaacctgagagagctggcacttgcaagaatgaaagacctcggaatacagtgtcgagatgtgagaaccagagaagttggaatccaagaaattcatcacaaagtacggccataccaggttgaattggtaaggagagattatgttgcaaatggtggctgggaaacattcttgtcatacgaagacccagatcaagacattttgattggcctcctacgattacgcaagtgttcagaaagaatagctagagaagaacatgggtctgggaaaatcgctgtgatatcaggggtcggcaccaggaattattatagaaagatcggctacagattacaaggcccgtacatggtgaagatgctgaaataatggccacaccagtccactcttctgcagtatcctccctggcagaacacggagaatcaggatttcttaaatactcaacagagaggctgagcagagcaaatggggggcttcaccctcatcccgcagctgcagagactggaaactgccttcaaggccacggctggtcatctgctgaccacaccccagatccgccctctcctgcgtgcaccccaaaaaatcacttgcgtttttgaggcttaaatcatctatccagtttctacattttgcatgaggcctgcaggtggcctattttgactcagacggtgaaaaaagcaaattaactcatttggacaccataactcatgcaataaaactgattgtcattcgaggagc

SEQ ID NO: 11317 - protein, 499 aa, Homo sapiens
MRQKRKGDLGPAELMMLTIGDVIKQLIEAHEQGKDIDLNKVKTKTAAKYGLSAQPRLVDIIAAVPPQYRKVLMPKLKAKPIRTASGIAVVAVMCKPHRCPHISFTGNICVYCPGGPDSDFEYSTQSYTGYEPTSMRAIRARYDPFLQTRHRIEQLKQLGHSVDKVEFIVMGGTFMALPEEYRDYFIRNLHDALSGHTSNNIYEAVKYSERSLTKCIGITIETRPDYCMKRHLSDMLTYGCTRLEIGVQSVYEDVARDTNRGHTVKAVCESFHLAKDSGFKVVAHMMPDLPNVGLERDIEQFTEFFENPAFRPDGLKLYPTLVIRGTGLYELWKSGRYKSYSPSDLVELVARILALVPPWTRVYRVQRDIPMPLVSSGVEHGNLRELALARMKDLGIQCRDVRTREVGIQEIHHKVRPYQVELVRRDYVANGGWETFLSYEDPDQDILIGLLRLRKCSERIAREEHGSGKIAVISGVGTRNYYRKIGYRLQGPYMVKMLK

SEQ ID NO: 11318 - DNA, 1837 bp, Homo sapiens
gcagacacgtgatgcgggggagggcggggcgtggcaggagcaagcgtctgccgcggtggccgggtgccggtaagggtttccagcgcccccggcctaggttttggaggcgcgggaatgcgttcgttgctcagtgtcggacttccccctattcccatcggccgaggctgtcactttacgctcataaccgtttttctttactgcactcgtgtcgggaggaaagggacttgcgtggcacccccagacctccccgtctccgcttccacgtttggtacatcctgcctgaggcaggaagccgcagctgagggacggcctgtcgtacggtgcggatggtggtggcctgcgaggctcatttctagcaaggaacaaggctttcccgctttgattttataaatattatgtttacaaagctgtaatatatagaaattgataagacgtgtccctgtccctggaaacgcaggcaccgcgtgtttggaaagacattcatctgggctgtttgacagactccccagttggtgccatgctctgtgcttagggaactgtgagacccctggaggggtgggtaccgggaccgcactcagcctggggtttggaggcggcctcctataggaagcgacctgggacctaagatttttagactgactgtgggttcactggaataaaaaggaagagacaaagagcattgcaggcatcgggactgtcacatttgacaagatcaaagctgcaggaaaatggacagtgaggttcagagagatggaaggatcttggatttgattgatgatgcttggcgagaagacaagctgccttatgaggatgtcgcaataccactgaatgagcttcctgaacctgaacaagacaatggtggcaccacagaatctgtcaaagaacaagaaatgaagtggacagacttagccctacagtacctccatgagaatgttccccccattggaaactgacgcttggctcctttcttgtggatggattttctcaaagtacacagataaagcatggtttgtttcagtctccaaattcaaacctttgagtaataaatcagcactcaaaaatgtacacccatttagtttgtggtagcaaagtgcaatgcgaaattgaatgagaaactgagatttctcagtaatggtgaatattccgctctttaaacctaaaactcttcattgagtagcttatatttgaacatgattggttaaacatttgcctctacctctgattttgctttgctgtcaaagtttaacaccttccaactacttatgtgtgtcctgtaacacaggtgattgaacgtatgagagggaaaggcaaagaaaaaggaagccagacactaggagaattattaacttctcatacttccccacattgagaagcattcggagtgtatttagcctgtagatgttgttatatgcaaatatcccattccctggttactggcattcctaagattcttcatggtattttcaaactttggataaatttacagattagaaagatatctgacagttaatctctgttctccttacaaattccttttgtgctgctggaaaggatctttggctaggtggatgactagttttattcaaagccttttctcaaagccctttcagttacaaccaccccactatggaatcagtatttagttatacatttgtataagaacctgtattttgaaaaacacattcatgtatatttattcctggaattatttgcctgttaaacagtgtctttcatgttctctccccagattgtaaactctgtaagaagctgcttgtatctgtatcccttgttgaaactctgaaaacactgaataactaaaatctcttctcatcctttt

SEQ ID NO: 11319 - DNA, 1836 bp, Homo sapiens
  CDS (73)..(621)
gaggctcggccgcctgagccgcggacggtttgctgagcccgttagtgcgcccggccgagacacgccgccgccatgtcccgctacctgcgtccccccaacacgtctctgttcgtcaggaacgtggccgacgacaccaggtctgaagacttgcggcgtgaatttggtcgttatggtcctatagttgatgtgtatgttccacttgatttctacactcgccgtccaagaggatttgcttatgttcaatttgaggatgttcgtgatgctgaagacgctttacataatttggacagaaagtggatttgtggacggcagattgaaatacagtttgcccagggggatcgaaagacaccaaatcagatgaaagccaaggaagggaggaatgtgtacagttcttcacgctatgatgattatgacagatacagacgttctagaagccgaagttatgaaaggaggagatcaagaagtcggtcttttgattacaactatagaagatcgtatagtcctagaaacagtagaccgactggaagaccacggcgtagcagaagccattccgacaatgatagaccaaactgcagctggaatacccagtacagttctgcttactacacttcaagaaagatctgaaagcggaaaaagaaccaaagaagggcagttcaagcgaccaaagggtgggtggaaggtgctgcagtatgaatactgtacgaatattttgactctggtctgaaaagataaaagaatgttatcgaaaactacatggaataattgaagtcccttcaagtttgtaagtaagcattttaggacaaataaaaggaaattcaactttgtacttgtggaaactaatccctaaatatgaataggtttatattgattcatgggtaacaggtccataataaattattggaaactaggatgtctgaatatcaaggaagacagccatagtctcttacagtgcctctgttggtctgtctcaaactgaattgggtgggaaaaggtatggtccaatataaaagttccatttttgccattattggcaaatcttgcctttgtttattttggtgccagtgttttctgcttaatcatttgctttgttggcatctgtgtatttacttgtacaccacatgcagtttacatctgtcttaactactccttcccaggtaaattccaattatatttgacatccagctaagagggcccatctcttctcacctctttcctagtcagtatattcagcaaatatttattgagcccttactgtgggcaaatcattgtactggataattgagaaaaatagataattcccttattcagtaaatgtctactgagcacaatctagtgaatcattacagtatggcctcattgttttgtttgaggtgtgttattcataacaatattttacaccattcgtatcaatgtaattatagaacacaatatacgatcaaggataagtaattgtgtggttatctgccatttaaaagtatccagtatttgatcacattattataaataatgaaaaaatgatttaatctgtaataaactggtttattgtgcagtgactgtaatatactagagttataataaattgtttactctgcctcaccaaacacatgctaggatataacccccaaaataagtatttaactttgcattaggtataaaggagactgggtgctataattagattattttgaggcagacagagagctgttatcctaactgatttagtatgttctgtaattgagaaaatgttcaccaaattatactttttagtgatttacatgtacattttataggggacatgttctgtgtatagcgaataaataacttttatagtatcac

SEQ ID NO: 11320 - protein, 183 aa, Homo sapiens
MSRYLRPPNTSLFVRNVADDTRSEDLRREFGRYGPIVDVYVPLDFYTRRPRGFAYVQFEDVRDAEDALHNLDRKWICGRQIEIQFAQGDRKTPNQMKAKEGRNVYSSSRYDDYDRYRRSRSRSYERRRSRSRSFDYNYRRSYSPRNSRPTGRPRRSRSHSDNDRPNCSWNTQYSSAYYTSRKI

SEQ ID NO: 11321 - DNA, 1249 bp, Homo sapiens
  CDS (188)..(976)
ttcctagccaggcctggcggtaaccttgggggcctcactgcagccgccgctgctgttggagtgggctttgcgagtctgaacgttggcggggctaggctcgttaactgccgagagcctccgggtttgcggtggaggacgctgaggcccgtggggggcaggcacccgggcgccgggcctcccagccgacatgtctctagtggcggaagccttcgtctcccagattgcagctgcagaaccttggcctgaaaatgctacattatatcagcaattgaaaggggagcaaattttactttctgacaatgcagcttctcttgcagtgcaggcctttttgcaaatgtgtaacttgcctatcaaagtagtttgtagggcaaatgcagaatatatgtctccatctggtaaagtaccttttattcatgtgggaaatcaagtagtatcaggacttggtccaatagtccaatttgttaaagccaagggccattctcttagtgatgggctggaggaagtccaaaaagcagaaatgaaagcttacatggaattagtcaacaatatgctgttgactgcagagctgtatcttcagtggtgtgatgaagctacagtaggggagatcactcatgctaggtatggatctccttacccttggcctctgaatcatattttggcctatcaaaaacagtgggaagtcaaacgtaagatgaaagctattggatggggaaagaagactctggaccaggtcttagaggatgtagaccagtgctgtcaagctctctctcaaagactgggaacacaaccgtatttcttcaataagcagcctactgaacttggcgcactggtatttggccatctatacaccattcttaccacacaattgacaaatgatgaactttctgagaaggtgaaaaactatagcaacctccttgctttctgtaggagaattgaacagcactattttgaggatcgtggtaaaggcaggctgtcatagagttatgtgttagtctcaggagtcttaacttttgaaatatgttttacttgaatgttacattagatattggtgtcagaattttaaaaccaaattactgctttttgaaacctcaaattatataatgtatcttatgtatgtgctttatattgttatttgtgtatacattaaaataattctgaattatttgatctgatatgttgtattctgtatcttgaaatttttgtttccttgaaacatgcatgcatttaaaaataaagcttaaacaactgt

SEQ ID NO: 11322 - protein, 263 aa, Homo sapiens [sequence omitted]

SEQ ID NO: 11323 - DNA, 1685 bp, Homo sapiens
  CDS (132)..(737)
acttcagttctcggagagaagaggcgggagtggacctggtcagccctaccccactgaccccaccggacccaggcgcggcctccgccacagccacagcccctgcccctgctgcggcgcggcgaggcgaggcgatggccaaggtgtcggtgctgaacgtggcggccctggagaacccgagccctttccacagccccttccggttcgagatcagcttcgagtgcagtgaagccctggcggacgacctggagtggaagatcatttatgttggctcggctgagagtgaggaatttgatcagatcctagactcggtgctggtgggccctgtgccagcagggagacacatgtttgtctttcaggccgacgcccccaacccatccctcatcccagagactgatgccgtgggtgtgactgtggtcctcatcacctgcacctaccatggacaggagttcatccgagtgggctactacgtcaacaacgagtacctcaaccctgagctgcgtgagaacccgcccatgaagccagatttctcccagctccagcggaacatcttggcctcgaacccccgggtgacccgcttccatatcaactgggacaacaacatggacaggctggaggccatagagacccaggacccctccctgggctgcggcctcccactcaactgcactcctatcaagggcttggggctccctggctgcatccctggcctcctccctgagaactccatggactgcatctaactgcaggaacccagagtgtcccagcacgccgggaggggcaaccaggcctcccagcgagtcctgcagggcccatctagaggactttgggggccatcagctgcaatccaggtctgtcaaactcagcccctaggaaagaacaggccttgggtctcccctagtcctggccagaaggatgatctcgcttttcctctacaggcctataagaagcaggtacttcagttctaaattctgacttgtgttcttttcgtcttcataaattctaactaaggccactgtgccactgtgcacccttgagtaccattgatccaaagctttcccacagacctccctggcccacctagaggctttcttggtcagtgcctgtcaaggctccagtcctgctgagccaaaggctttgtcattcctttctcttcctgtacatctgagcagacccactccagctttctggtgtcacaggcgggaatgttagttagtaggtagacttagatcccatttctgtcctgctcccaggaagattcttaggtcctcttcaatccagcagcccctcccagaggtgtgatcagcaggatgctgaggaaccatgttgcctttcctgtcaatcacagccaccttcctgttatctcctaaatggatctggcttttcctggaggctgccatggttggaagatggtatcagagggcctgcctgggcagtctgtctccgggccagggtcagggaccctctgcctctggcagccttaacctgtcctctgctaggaccagggtgatttcaagccagggaagcaactgggaccctgaaaactgtccctccccagcccgctccccctctctgtgccctggtccccttgctgccatgtggatgctgttgtgattgctgtttgtatattatcaaaatgtttttatattaaaaatgtttggtctgaaaattaaaagcacttcatttag

SEQ ID NO: 11324 - protein, 202 aa, Homo sapiens [sequence omitted]

SEQ ID NO: 11325 - DNA, 1431 bp, Homo sapiens
  CDS (122)..(718)
aagtgaccctagagaaacgagttgtggctgaggaccccggcggcagacgcaggttcgggaccatgagctggattccttttaagattgggcagcccaagaaacagattgtgcccaaaacaccatgtcaaaatctgccgtgaagatatccttggacttactctccaatcccctctgtgagcaagaccaggaccttctgaacatggtgacggccctggacacggccatgaagcggatggatgccttcaatcaggaaaaggtgaaccagatccagaagactgtgatcgagcccttaaaaaagttcggcagtgtcttcccgagcctcatcatggctgtgaagaggcgggaacaggccttgcaggactacaggaggctgcaggccaaggtggagaagtatgaggaaaaggagaagacggggccagtgctggccaagctccaccaggcacgagaggagctgcggcctgtgcgggaggactttgaagccaagaacaggcagctgctggaggagatgccgcgcttctacggcagccgcctcgactacttccagcccagctttgagtccctcatccgagctcaggttgtgtactactcggaaatgcacaagatctttggagacctgtcccatcagcttgaccagccaggccactccgatgagcagcgggagcgggagaacgaggccaaactcagtgagctccgggccctctccattgtggccgatgactgaatccccgtcactcttggaggactcctgtgacgtggtcagcctcattcatccttgcccttctcagggctagctgctcctctcacaggctggggacagaggtggccctggttcacttgccggccctttgcaatgaatgactcttcctgagcctggcaccaggagccctaggcaggccgccgtctccccactcacagccccagcaggtaagcagtgtagacaaacccttggggcttttttatttggagaaccgtccagcatgcatcctggcccacggcctgagcaagctgcagcccttctgaggccatgggcttcgttggctaagttgggggtcttagccttgcatgcgttgtgggcatcaaatctacctccaaaagacccatcctggggagccctctggcccctcgttgccttttcacttcaaaacctcttttttctgggagaggccctgaaccctgtgcgggagagctggtcctccagccctggcaggccctcagccagcttcccagcaagacaaagggcacccttgtggctttgggacctaagtggttggggttcccgaggtcactgaggactggtacctcgggaacgcaagctgtcagtggaactgtcccacaagaattcacaggtctcaaagcaggaacagtgggtttgtgtctcacctgagtatctggaattttattttttcaagtaaaattttcaatgaaacgtcc

SEQ ID NO: 11326 - protein, 199 aa, Homo sapiens [sequence omitted]

SEQ ID NO: 11327 - DNA, 1861 bp, Homo sapiens
  CDS (46)..(363)
acagaaaacactagcatccccacccgcggactctgtaactttttaatgtctgatgaagagtatgatgacagaactgcacgggtgctgattggacatatctcaaagaagatgaacaaacagactttccctgagcactgtagtttgtgtaaagagatcttgccattcacagatcgcaaacaggcagtctgttccaatggccacatttggctccggtgcttcttaacctaccagtcctgccagagtttgatatatagaaggtgtttgctccatgacagcattgcccggcatccagctccagaagatcccgactggattaagaggttactgcaaagcccctgccctttctgtgattctcctgtcttctaaataatcagtgacgggaagatggaagggcatgatgaactctgccatagaaaacttcctccagcctgaagagaaggatgcactggaggaagccggaccctcacgagtggagagaagtccttggtgattgtaaagagggcccctggagctcatttctgaatcgcactctccatttccagagactaaaggatgtcctttgaaatggctggactcagagagttggagtcgttttgagatgagcattagccccagctttgtaaccaatgaggaacacttacttatttttaagtatcttgacagaagcaatttgaacacagtgtcccgtcatttctagaaacagaatggtctcttctagagagcttggataaggaccttgctgggttgagttaggttttaatccttgctttggtttggaactgccttcgggctccagaacttaaattgcttggtccgtggcatctgatgtaccaacagagattaaaagtgtaaagcaacacatgggctgatgttttgttctcagaaaatagctgctggtctgcatccctccattcttgttttttatgcatatggaaaacattttcctaaaactctatattcttaagttgaagccaagactaaaatttaatgtgtcaaatgatctggtgactattataatgaataattgtgacttatttttcattctctcctgggtcatcaggtttcctgacccaactccttaatccgtataaagatgtcaaatactgtagttcacccacgccacagccctgcttcagacttaactgtggtagcctagatgagctatttgtacacagaggaaaaaaagatattttcctcttttagtaataagactttcagtatttttaatgttgacatttccagatgtttcatttagtatccaggggtctgtctggagacttccagagagggacagctcagaagtgagacccttgagctctggtgctgtaagcttgtgcaattaagttgaacagagcctgggaatttctttcctctgcacagtcccttgatatttggaatccaggttctgcccccaacccctacccacccagtggtctgttaagatgtctcagatggggctgggcttggtggctcatgcctgtactctcaacactttgggaagcaaaggcaggcagatcacaaggtcaggagttcagcctaaccaacatggtgaaaccgtgtctctactaaaaatacaaaaattagccaggcgtggtggtgcacacctgtaatcccagcactttgggaggccgaggcagacgggtcacttgaggccaggagttcgagaccagcctgggcaatatggcgagactccgtctctactacaaatacaaaagttagcctggcatggtggcgcatgcctgtaatctcagttactcaggaggctgaggcaggagcatcacttcaacccaggaggcagaagctgcagtcagccgaggtggcaccactgcacttcagcctgggcaagactggagactgcctc

SEQ ID NO: 11328 - protein, 106 aa, Homo sapiens
MSDEEYDDRTARVLIGHISKKMNKQTFPEHCSLCKEILPFTDRKQAVCSNGHIWLRCFLTYQSCQSLIYRRCLLHDSIARHPAPEDPDWIKRLLQSPCPFCDSPVF

SEQ ID NO: 11329 - DNA, 2392 bp, Homo sapiens
  CDS (128)..(1330)
tgctgtccagggtgacaattctcaggtgctgcagctccttggaaggaacgcagtggctggcctgaaccaggtgaataaccaagggctgaccccgctgcacctggcctgccagctggggaagcaggagatggtccgcgtgctgctgctgtgcaatgctcggtgcaacatcatgggccccaacggctaccccatccactcggccatgaagttctctcagaaggggtgtgcggagatgatcatcagcatggacagcagccagatccacagcaaagacccccgttacggagccagccccctccactgggccaagaacgcagagatggcccgcatgctgctgaaacggggctgcaacgtgaacagcaccagctccgcggggaacacggccctgcacgtggcggtgatgcgcaaccgcttcgactgtgccatagtgctgctgacccacggggccaacgcggatgcccgcggagagcacggcaacaccccgctgcacctggccatgtcgaaagacaacgtggagatgatcaaggccctcatcgtgttcggagcagaagtggacaccccgaatgactttggggagactcctacattcctagcctccaaaatcggcagacttgtcaccaggaaggcgatcttgactctgccgagaaccgtgggggccgaatactgcttcccacccatccacggggtccccgcggagcagggctctgcagcgccacatcatcccttctccctggaaagagctcagcccccaccgatcagcctaaacaacctagaactacaggatctcatgcacatctcacgggcccggaagccagcgttcatcctgggctccatgagggacgagaagcggacccacgaccacctgctgtgcctggatggaggaggagtgaaaggcctcatcatcatccagctcctcatcgccatcgagaaggcctcgggtgtggccaccaaggacctgtttgactgggtggcgggcaccagcactggaggcatcctggccctggccattctgcacagtaagtccatggcctacatgcgcggcatgtactttcgcatgaaggatgaggtgttccggggctccaggccctacgagtcggggcccctggaggagttcctgaagcgggagtttggggagcacaccaagatgacggacgtcaggaaacccaaggtgatgctgacagggacactgtctgaccggcagccggctgaactccacctcttccggaactacgatgctccagaaactgtccgggagcctcgtttcaaccagaacgttaacctcaggcctgcagggctgcctctgcccctttccctgactgtcaaggacaactgactcccccatcagctcctacttacttccgacccaatgggcgcttcctggacggtgggctgctggccaacaaccccacgctggatgccatgaccgagatccatgagtacaatcaggacctgatccgcaagggtcaggccaacaaggtgaagaaactctccatcgttgtctccctggggacagggaggtccccacaagtgcctgtgacctgtgtggatgtcttccgtcccagcaacccctgggagctggccaagactgtttttggggccaaggaactgggcaagatggtggtggactgttgcacggatccagacgggcgggctgtggaccgggcacgggcctggtgcgagatggtcggcatccagtacttcagattgaacccccagctggggacggacatcatgctggatgaggtcagtgacacagtgctggtcaacgccctctgggagaccgaggtctacatctatgagcaccgcgaggagttccagaagctcatccagctgctgctctcaccctgagggtccccagcctctcaccggccccagctgacctcgtccattcagcccctgccaggccaagcccagccactgccctcccgggcagatctgggcccaggcacctctgagtccatagaccaggcctgggagaatgccaagctgcctgcccgaggctggtcctgaaggcctgtctcccactaaccccgccttccagcactttctgtcattccaggctgggaaagtctagagccccctttggcccctttccctgactgtcaaggacaactgactcccaggcttcctggtgggtgcagcccactccctctgccctctgctccgttccctgggggctgggactaaagaaatgggtgtcccccaccccatcagctgggaaagcccaggccgcaggagtgggatgcccgttggactttgcccctcacactggcccagcccctcacactgccccaccccgagaaccctcagctctcaaaggtcactcctgggagtttcttcttcccaatggaagtggcttaagagccaaaactgaaataaatcatttggattc

SEQ ID NO: 11330 - protein, 401 aa, Homo sapiens
MVRVLLLCNARCNIMGPNGYPIHSAMKFSQKGCAEMIISMDSSQIHSKDPRYGASPLHWAKNAEMARMLLKRGCNVNSTSSAGNTALHVAVMRNRFDCAIVLLTHGANADARGEHGNTPLHLAMSKDNVEMIKALIVFGAEVDTPNDFGETPTFLASKIGRLVTRKAILTLPRTVGAEYCFPPIHGVPAEQGSAAPHHPFSLERAQPPPISLNNLELQDLMHISRARKPAFILGSMRDEKRTHDHLLCLDGGGVKGLIIIQLLIAIEKASGVATKDLFDWVAGTSTGGILALAILHSKSMAYMRGMYFRMKDEVFRGSRPYESGPLEEFLKREFGEHTKMTDVRKPKVMLTGTLSDRQPAELHLFRNYDAPETVREPRFNQNVNLRPAGLPLPLSLTVKDN

SEQ ID NO: 11331 - DNA, 1734 bp, Homo sapiens
  CDS (53)..(754)
attgcacactgcactttctgagttatgcttctctataaattatgtaccaaacatggtggtatgggaacatacctttaccccacgagaatatttgacttctcatctggaaatacgctttaccaagtcaattgttgggatgactatgtataatcaagccacacaggaaattgcaaaaccttcagaacttctaacaagtgtaagagcatacatgaccgtactccagtcaatagaaaactatgtgcagattgatattacaagagtatttaataatgtgcttcttcaacaaacacaacatttagacagtcatggagagccaaccattacaagtctatacacaaattggtatttggaaactttgttacgacaagtcagcaatggccatatagcatattttcctgcaatgaaagcgtttgtgaacttacctacagaaaatgaattaacattcaatgcagaggaatattctgacatatcagaaatgaggtcattatcagaactactaggcccatatggtatgaagtttctaagtgaaagccttatgtggcatatttcatcacaagttgctgaacttaagaaacttgtggtggagaatgttgatgtgttaacacaaatgaggaccagctttgacaaaccagaccagatggctgcactgtttaaaagattatcatctgttgacagtgtcttgaagaggatggcctactggagaatttctggcgcttgcatcctccagtctactgaaaattggccaggagacagataaaactacaacaagaaatagagaatctgtttatttactgctagatatgattgtacaagaatctccattccttacaatggatcttttggaatcttgttttccttatgtcttgctgagaaatgcataccatgctgtctacaaacaaagtgttacatcttctgcataaaattacctacttaatcaagataagcacgcatttttgttgccttggttttacctgtagactgtggaactattttaccttaagacctgaaaaagttttgtggattataaatttctttcatacggttgtattttctgatcattggtttcttaatatggttgtactacagtatacttggttgatttaggttgcacattcactgaattcactgagattattcctataattttaaagtatcatttatttgaaaaacatacattatcaacatgtttttgatatttgataatgaaaaaaatctttgcttgtttatttctgaaaaagaactgtatttagtgattattttagatagtgatattatagcattcatctgtgtgtaaattatttcatatagggaagagttctgatctgtacctatggttcttattgaaaacaacattggatgtgcatttctgtgatgttatgaatacatttctactttattttgaaacatttgccaaactaaatactgtaacactgtataacatttaaaaatgttaaagaactgcttagtattagaagcagatcatttcccaaaattctaagagcagcagcatatgttgttgcttgtataaagcctagcgataatttttagactaacttccatggtgccctgttggcattagcactaccattgtaccctgctgtataataaacaatcttagacatttatcaactgttgatacaaatgttagtccctaaccactttttatatatgttttaaatttttgaaattcaagtgtaccttccataacataaaataaacactagactgtatcac

SEQ ID NO: 11332 - protein, 234 aa, Homo sapiens [sequence omitted]

SEQ ID NO: 11333 - DNA, 1912 bp, Homo sapiens
  CDS (39)..(482)
ctattttagtacaagtgaaacagcctcgaaaaaaggtcatggcttgcaaaaccgcttttaataaaaccgggttccaagaagtgtttgatcctcctcattatgaactgttttcactaagggacaaagagatttctgcagacctggcagacttgtcggaagaattggacaactaccagaagatgcggcgctcctccaccgcctcccgctgcatccacgaccaccactgtgggtcgcaggcctccagcgtcaaacaaagcaggaccaacctcagttccatggaacttcctttccgaaatgactttgcacaaccacagccaatgaaaacatttaatagcaccttcaagaaaagtagttacactttcaaacagggacatgagtgccctgagcaggccctggaagaccgagtaatggaggagattccctgtgaaatttatgtcagggggcgagaagattctgcacaagcatccatatccattgacttctaatcttctgctaatggtgatgtgaattcttagggtgtgtacgtacgcagcctccagggcaccatactgtttccagcagccaacccttttctcccatcacaactacgaagaccttgatttaccgttaacctattgtatggtgatgtttttattctctcaggcagtctatatatgttaaaccaatcaaggaacttactctattcagtggaaacaataatcatctctattgcttggtgtcatttataggaagcactgccagttaaagagcattagaagaggtggttggatggagccaggctcaggctgcctcttcgttttagcaacaagaagactgctcttgactgataacagctctgtcaatattttgatgccacaataaacttgatttttctttacattccttttatttttcctttctctaaatttaatttgttttataagcctatcgttttaccatttcattttcttacataagtacaagtggttaatgtaccacatacttcagtataggcatttgttcttgagtgtgtcaaaatacagctagttactgtgccaattaagacccagttgtatttcacccatctgtttcttcttggctaatctctgtacttctgccttttaattactgggcccttattccttattttctgtgagaaataatagatgatatgatttattacctttcaattatatttttctcagttatactagaaaatttcataatcctgggatatatgtaccattgtcagctatgactaaaaatttgaaaaagataaaaatttctagcaagcctttgaagtttaccaagtatagtcacattcagtgacagcccattcattccagtaaagaatcatttcattcactttgggagaggcctataattacatttatttgcaatgtttctcttcgctagattgttacatagctcccattctgttggttttgcttacagcatatggtaaccaaggttagatgccagttaaaattccttagaaattggatgagccttgagattgcttcttaactgggacatgacatttttctagctcttatcaagaataacaacttccacttttttttaaactgcacttttgactttttttatggtataaaaacaataatttataaacataaaagctcattgtgttttttagacttttgatattatttgatactgtacaaactttattaaatcaagatgaaagacctacaggacagattcctttcagtgttcacatcagtggctttgtatgcaaatatgctgtgttggacctggacgctataacttattgtaaagaccttggaaatgtggacataagctctttctttccttttgttactgtatttagtttgtgataaatttttcactgtgtgatatttatgctctaaatcactacacaaatcccatattaaaatatacattgtacctg

SEQ ID NO: 11334 - protein, 148 aa, Homo sapiens
MACKTAFNKTGFQEVFDPPHYELFSLRDKEISADLADLSEELDNYQKMRRSSTASRCIHDHHCGSQASSVKQSRTNLSSMELPFRNDFAQPQPMKTFNSTFKKSSYTFKQGHECPEQALEDRVMEEIPCEIYVRGREDSAQASISIDF

SEQ ID NO: 11335 - DNA, 3087 bp, Homo sapiens
  CDS (76)..(1647)
tcagagattcgggcgcccattgttactgttggtgttaataacgatccagctgatgtaagaaagaaagaactcaagatggctgaaataaaagttaagcttatcgaagccaaagaagctttggaaaattgcattaccttacaggattttaatcgggcaccagaattaaaagaagaaataaaagcattagaagatgccagaataaaccttttgaaagagacagagcaacttgaaattaaagaagtccacatagagaagaatgatgctgaaacattgcagaaatgtcttattttgtgctatgaactgttgaagcagatgtccatttcaacaggcttaagtgcaaccatgaatggaatcatcgaatctttgattcttcctggaataataagtattcatcctgttgtaagaaacctggctgttttatgcttgggatgctgtggactacagaatcaggattttgcaaggaaacacttcgtattactattgcaggttttgcaaattgatgatgtcacaataaaaataagtgctttaaaggcaatctttgaccaactgatgacgttcgggattgaaccatttaaaactaaaaaaatcaaaacacttcattgtgaaggtacagaaataaacagtgatgatgagcaagaatcaaaagaagttgaagagactgctacagctaagaatgttctgaaactcctttctgatttcttagatagtgaggtatctgaacttaggactggagctgcagaaggactagccaagctgatgttctctgggcttttggtcagcagcaggattctttctcgtcttattttgttatggtacaatcctgtgactgaagaggatgttcaacttcgacattgcctaggcgtgttcttccccgtgtttgcttatgcaagcaggactaatcaggaatgctttgaagaagcttttcttccaaccctgcaaacactggccaatgcccctgcatcttctcctttagctgaaattgatatcacaaatgttgctgagttacttgtagatttgacaagaccaagtggattaaatcctcaggccaagacttcccaagattatcaggccttaacagtacatgacaatttggctatgaaaatttgcgatgagatcttaacaagtccgtgctcgccagaaattcgagtctatacaaaagccttgagttctttagaactcagtagccatcttgcaaaagatcttctggttctattgaatgagattctggagcaagtaaaagataggacatgtctgagagctttggagaaaatcaagattcagttagaaaaaggaaataaagaatttggtgaccaagctgaagcagcacaggatgccaccttgactacaactactttccaaaatgaagatgaaaagaataaagaagtatatatgactccactcaggggtgtaaaagcaacccaagcatcaaagtctactcagctaaagactaacagaggacagagaaaagtgacagtttcagctaggacgaacaggaggtgtcagactgctgaagccgactctgaaagtgatcatgaagttccagaaccagaatcagaaatgaagatgagactaccaagacgagccaaaaccgcagcactagaaaaaagtaaacttaaccttgcccaatttctcaatgaagatctaagttaggaaagacgatggaggtggaatcctttaagattatgtccagttatttgctttaataaagaagaagttacccttgtcaaaatcagaacaaacctgatgtctttctgaagattttctgctgtgcgcttccacgttactttggcctgtattaaagcagtagagcagcatcagttattatagtccagaaaaagtgcgcatcagtcagtcacacagatttatcacaatctgaggtgggcctaggaatctcatttttaaatagtctctccaagtgattcttatgaactctttatgtttaaaatcatgtcattatggaaaacttacaagtgtaactagctagtagcttgcatttgagaagcttatgacttagatgggcagaatcaacaaagatgaaaccgcctgaggacacatttaacaagtaacatttctagggaaaatgaaggaagtaccacaaactggctagaaaggagcttatcaatcaccagtgaggaagaccagtataacgttcaacaacagttattttgacaaaaacttattttgtgattcctacagtgaaaacatttttggtgatatctgcctgggaaatctctcttcctaaagtatttgtatatgggagtccttgtttgtgaatgtttcctggattagggaggtgtcaacataaatgtattattaaccatgaagctgctcgctatatttttggcataacaaaataatatttatttactgtggataataattctagtgggaatataatgtgacaggaacttctctttatatacgctaccaatttatgagcactattcactgtcaatttcatttcttgtcttttgaaattgacacttggcctgacttacgaaacttgtactatatgaaattggtcctcttttctgcaatacccaacgaaacaccttttctctttattattcagaaatgtcctaacatggatctgtttgttttaataattgtgctttttttaggcttatcatctactagaggccatttacttaaggtgaaattttaagatggagctaaagtaagatcactggtttttagaaccaaattgctatacatatgtgcctcatagaacttataaaaggagtcaaagtttcaaagcaagatagttattaagcaaaaggaaaagtggtaatgatagaaagtcagttaaaaatagatgattgttcttcattctgtttgttggctctgtgttctcctgtgcttcagattccttatgtgttgttgttttaaagacaatttgcagggggttgggagaaggactgaaaaggtacattaagtgtgctgtaaggaaaagtcttagaaacataataagctaaaatcccattcacacatggccaggctatccaaaaagaaaggagccatgttctcatgtggtttaccataccaaagcttgctttctctggcatgggaaaaataaatttaagcacc

SEQ ID NO: 11336 - protein, 524 aa, Homo sapiens [sequence omitted]

SEQ ID NO: 11337 - DNA, 1482 bp, Homo sapiens
  CDS (74)..(1039)
ctctctgacgaaggactggaaggtggcggtggtgaaggtgcaggccgttggggcggctcagaggcaggtgactatgaaaggcttatatttccaacagagttccacagatgaagaaataacatttgtatttcaagaaaaggaagatcttcctgttacagaggataactttgtgaaacttcaagttaaagcttgtgctctgagccagataaatacaaagcttctggcagaaatgaagatgaaaaaggatttatttcctgttgggagagaaattgctggaattgtattagatgttggaagcaaggtaccattctttcaaccagatgatgaagtagttggaactttgcccctggactctgaagaccctggactttgtgaagttgttagagtacatgagcattacttggttcataaaccagaaaaggtcacatggacggaagcagcaggaagcattcgggatggagtgcgtgcctatacagctctgcattatctttctcatctctctcctggaaaatcagtgctgataatggatggagcaagtgcatttggtacaatagctattcagttagcacatcatagaggagccaaagtgatttcaacagcatgcagccttgaagataagcagtgccttgaaagattcagacctcccatagcccgagtgattgatgtatctaatgggaaagttcatgttgctgaaagctgtttggaagaaacaggtggcctgggagtagatattgtcctagatgctggagtgagattatatagtaaagatgatgaaccagctgtaaaactacaactactaccacataaacatgatatcatcacacttcttggtgttggaggccactgggtaacaacagaagaaaaccttcagttggatcctccagatagccactgccttttcctcaagggagcaacgttagctttcctgaatgatgaagtttggaatttgtcaaatgtacaacagggagaatatctttctacgtatcttaaaggatgtgatggagaagttatcaactggtgttttcagacctcagtgggatgaacccattccactgtatgaggcaaaagtttccatggaagctgttcagaaaaatcaaggaagaaaaaagcaagttgttcaattttaattttcttctttctcagacctcagtcggatgaacatattccagtatttgaagccagaattttctttggaaattgttgagaaaaaccaaggaagataaaacaagttgcatttttaagcacgtttctctgctaagacaagatgctcagttgacacatttgaaaagtgtttgaaaaattcttgtgcaaatgatcaagataattctataattaacatcttaagggaatttttctaaaaaccttttcattgtttctatatattttgcccctgctataaaattccttccatgaagaaaactgctgctttcagcaaaagtcacactactcttgataaaagctgttgcaggcctttgctaagct

SEQ ID NO: 11338 - protein, 322 aa, Homo sapiens [sequence omitted]

SEQ ID NO: 11339 - DNA, 1780 bp, Homo sapiens
  CDS (17)..(787)
acaagcggccacaaggatggcaggcttcgcggagctcgggctgtcatcgtggctcgtggaacaatgtcggcagctgggtttgaagaagcccacgcccgtgcagctcggctgcatccccgccatcctggagggtcgagactgcttgggctgtgctaagacaggcagtgggaagacagcagcgtttgtccttcccatcttgcagaagctgtctgaggatccctatggcatcttctgcctcgtcctgacacccaccagggagctggcctaccagatcgcagagcggttccgggtcctggggaagcctctagggctgaaagactgcatcatcgtcggtggcatggacatggtggcccaggcgctggagctctctcggaaaccacacgtggtcatcgccacgccggggcgcctggcagatcacctgcgcagctccaacacttttagtataaagaagatccgcttcctggtgatggatgaggcagaccggctgctggaacagggctgcactgacttcaccgtggacctggaggccatcctggcggctgtgccggcccgcaggcagacactgctgttcagcgccacgctgaccgacacactccgggagctgcagggtctggccaccaaccagcccttcttctgggaagcacaggccccggtgagcaccgtggagcagctggaccagcgctacctgctggtgcctgagaaggtcaaggacgcctacctggtccacctgatccagcgcttccaggatgagcacgaggactggtccattatcatcttcaccaacacgtgaagacctgccagattctgtgcatgatgctgcgcaaattcagcttccccaccgtggctctgcactccatgatgaagcagaaagaacgctttgccgccctagccaagttcaagtccagcatctaccggatcctgatcgcaacagacgtggcctcccggggcctggacatccctacggtacaggtggtcatcaaccacaacacccccgggctccccaagatctacatccaccgagtcggccggacggcccgtgcagggcggcagggtcaggccatcacgctggtgacacagtacgacatccacctggtgcacgccatcgaggagcagatcaagaagaagctggaggagttctccgtggaagaggccgaggtgctacagatcctcacacaggtcaacgtggtgcgaagagagtgtgagatcaaactggaggcggcccactttgacgaaaagaaggagatcaacaaacggaagcagctgatcctggaggggaaggaccctgacctggaggccaagcgcaaggctgagctggccaagatcaagcagaagaaccggcgcttcaaggagaaggtggaggagacgctgaagcgacagaaggctggcagggctggccacaaggggcgtccacccaggacaccgtctgggtcccactcaggcccagtcccctcccagggcctggtctgagccccacacggccatctgcccagtccttgactcgtccatggagctgagggtcggaggaaccttccttgggggcagcagcccttcccgggggcctacccagtgccccacagcagaacccgtgggcgctcgtgttgtgcgggccctgctcctctgccccgaaaccactggctggtcccttccctgagccctggccaagattcaggctgcaggggaagaaagaacatgaccgggaggttgtgaccccaacccaaggtcaccccccaggggtgccgcatacaggaggtgcttaataaacgggtcttttgacttcctc

SEQ ID NO: 11340 - protein, 257 aa, Homo sapiens
MAGFAELGLSSWLVEQCRQLGLKKPTPVQLGCIPAILEGRDCLGCAKTGSGKTAAFVLPILQKLSEDPYGIFCLVLTPTRELAYQIAERFRVLGKPLGLKDCIIVGGMDMVAQALELSRKPHVVIATPGRLADHLRSSNTFSIKKIRFLVMDEADRLLEQGCTDFTVDLEAILAAVPARRQTLLFSATLTDTLRELQGLATNQPFFWEAQAPVSTVEQLDQRYLLVPEKVKDAYLVHLIQRFQDEHEDWSIIIFTNT

SEQ ID NO: 11341 - DNA, 1831 bp, Homo sapiens
  CDS (53)..(1390)
agttgccgctgtcgtccgcagagccagttcctagcgcagagccgcgcccgccatgagggagatcgtgcacatccaggcgggccagtgcgggaaccagatcggcaccaagttttgggaagtgatcagcgatgagcacggcatcgacccggccggaggctacgtgggagactcggcgctgcagctggagagaatcaacgtctactacaatgagtcatcgtctcagaaatatgtgcccagggccgccctggtggacttagagccaggcaccatggacagcgtgcggtctgggccttttgggcagcttttccggcctgacaacttcatctttggccagacgggtgcagggaacaactgggcgaaagggcactacacggagggcgcggagctggtggacgcagtgctggacgtggtgcggaaggagtgcgagcactgcgactgcctgcagggcttccagctcacgcactcgctgggcggcggcacgggctcaggcatgggcacgctgctcatcagcaagatccgtgaggagttcccggaccgcatcatgaacaccttcagcgtcatgccctcgcccaaggtgtcggacacggtggtggagccctacaatgccacactgtcggtgcaccagctggtggagaatacagacgagacctactgcatcgacaacgaggcgctctatgacatctgcttccgcactctgaagctgacaacgcccacctacggggacctcaaccacctggtgtccgccaccatgagtggggtcaccacctcgctgcgcttcccgggccagctcaatgctgacctgcgcaagctggcggtgaacatggtgcccttcccgcgcctgcacttcttcatgcctggcttcgcgccgctcaccagccgcggcagccagcagtaccgggccctgaccgtgcccgagctcacccagcagatgttcgacgccaggaacatgatggccgcctgcgatccgcgccatggccgctacctgaccgtggccaccgtgttccgcgggcccatgtccatgaaggaggtggacgagcagatgctggccatccagagtaagaacagcagctacttcgtggagtggattcccaacaacgtgaaggtggccgtgtgcgacatcccgccccgcggcctgaagatggcctccaccttcatcggcaacagcacggccatccaggagctgttcaagcgcatctccgagcagttctcagccatgttccggcgcaaggccttcctgcactggttcacgggtgagggcatggatgaaatggagttcaccgaggcggagagcaacatgaacgacctggtatccgagtaccagcagtaccaggatgccaccgccaatgacggggaggaagcttttgaggatgaggaagaggagatcgatggatagtcggaatagagccgccccaactcagatcctacaacacgcaagttccttcttgaaccctggtgcctcctaccctatggccctgaatggtgcactggtttaattgtgttggtgtcggcccctcacaaatgcagccaagtcatgtaattagtcatctggaacaaagactaaaaacagcagagaattgcgggttctacccagtcagaagatcacaccatggagactttctactagaggacttgaaagagaactgaggggccacaaaataaacttcaccttccattaagtgttcaagcatgtctgcaaattaggagggagttagaaacagtctttttcatcctttgtgatgaagcctgaaattgtgccgtgttgccttatatgaatatgcagtatgggactttgaaataatgattcataataaaatactaaacgtgtgtcttc

SEQ ID NO: 11342 - protein, 446 aa, Homo sapiens
MREIVHIQAGQCGNQIGTKFWEVISDEHGIDPAGGYVGDSALQLERINVYYNESSSQKYVPRAALVDLEPGTMDSVRSGPFGQLFRPDNFIFGQTGAGNNWAKGHYTEGAELVDAVLDVVRKECEHCDCLQGFQLTHSLGGGTGSGMGTLLISKIREEFPDRIMNTFSVMPSPKVSDTVVEPYNATLSVHQLVENTDETYCIDNEALYDICFRTLKLTTPTYGDLNHLVSATMSGVTTSLRFPGQLNADLRKLAVNMVPFPRLHFFMPGFAPLTSRGSQQYRALTVPELTQQMFDARNMMAACDPRHGRYLTVATVFRGPMSMKEVDEQMLAIQSKNSSYFVEWIPNNVKVAVCDIPPRGLKMASTFIGNSTAIQELFKRISEQFSAMFRRKAFLHWFTGEGMDEMEFTEAESNMNDLVSEYQQYQDATANDGEEAFEDEEEEIDG

SEQ ID NO: 11343 - DNA, 1938 bp, Homo sapiens
  CDS (657)..(1070)
aggggaaatgttctaagcagagcccgtcaggagcccacgggacacattttggagatgacagatttgaagatctggaagaggcaaatccattctcttttagagagtttctgaagaccaagaacctcggcctctcgaaagaggatccggccagcagaatttatgcaaaggaagcctcgaggcattccctgggacttgaccacaactccccaccctcccaaaccggcgggtatggcctggagtatcagcagccatttttcgaggatccgacaggggctggtgacctcctggatgaggaggaggatgaggacaccggatggagtggggcctacctgccgtccgccatcgagcagactcaccccgagagggtccctgccggcacgtcgccctgcagcacatacctttcctttttctccaccccgtcggagctggcagggcctgagtctctgccctcgtgggcgttgagtgacactgattctcgcgtgtctccggcctctccggcagggagtcctagcgcagactttgcggttcatggagagtctctgggagacaggcacctgcggacgctgcagataagttacgacgcactgaaagatgaaaattctaagctgagaagaaagctgaatgaggttcagagcttctctgaagctcaaacagaaatggtgaggacgcttgagcggaagttagaagcaaaaatgatcaaggaggaaagcgactaccacgacctggagtcggtggttcagcaggtggagcagaacctggagctgatgaccaaacgggctgtaaaggcagaaaaccacgtcgtgaaactaaaacaggaaatcagtttgctccaggcgcaggtctccaacttccagcgagagaatgaagccctgcggtgcggccagggcgccagcctgaccgtggtgaagcagaacgccgacgtggccctgcagaacctccgggtggtcatgaacagtgcacaggcttccatcaagcaactggtttccggagctgagacactgaatcttgttgccgaaatccttaaatctatagacagaatttctgaagttaaagacgaggaggaagactcttgaggacccctgggtgttctcagcatgaagctccgtgtataccctgaggtcaccaccgctcgatctaaatgtgcagttgtgtccttaaatatgcagtcttcacccagagtaaagtgttgatcgcaagagtccagtgtcgtgccctcagccagttcttggccaccacaatgggagcagccctggccgagttgtctctgtggtttctatgcagcccttcttggcgaaattcctgcgatcttatagattctaatgagctcttggaagacattgtcataaaagccagtgattttaagaaaaagggtggttctggaatcagtgttttccagtcccatcccagaacatcagttgtaagataagtacaattggttgtccttgatttcataagtagaacaaacactaaatgtgcctctgagatggccaccccgggcagggacctgtgccttccgccgatgctcagggctccctctggctcccgggtcactcttgtggccccagtgggtggtccctgcagtcatggcctgagtgcgcaggggccaccgcgtggctgctgctgtcctcctccgggacccacggggaccaaggtcacacgttccgtgctgtgaagctgtccagatgtgcctctttggctgggggttctggtggacgtttcaagtggcattttgtacaatgcaggttagaattcaggaatttcaagtatgtgcccgggtctgtcaggtcccagttgcctttctgacggcccccctcagagggacggcgacgagcactaaatgcttttttgactattttcctatagattttttttaaaacttttttttcctcctgttccaattgatagctttcttatttaataaattctgtagttcaccgc

SEQ ID NO: 11344 - protein, 138 aa, Homo sapiens
MVRTLERKLEAKMIKEESDYHDLESVVQQVEQNLELMTKRAVKAENHVVKLKQEISLLQAQVSNFQRENEALRCGQGASLTVVKQNADVALQNLRVVMNSAQASIKQLVSGAETLNLVAEILKSIDRISEVKDEEEDS

SEQ ID NO: 11345 - DNA, 2728 bp, Homo sapiens
  CDS (733)..(2241)
gatgcctacatcattgtgtctttcgtgaatgccaccctagtgttgtccattggagaaactgtagaagaagtgactgactctgggttcctggggaccaccccgaccttgtcctgctccttattaggagatgatgccttggtgcaggtctatccagatggcatccggcacatacgagcagacaagagagtcaatgagtggaagacccctggaaagaaaacaattgtgaagtgtgcagtgaaccagcgacaagtggtgattgccctgacaggaggagagctggtctatttcgagatggatccttcaggacagctgaatgagtacacagaacggaaggagatgtcagcagatgtggtgtgcatgagtctggccaatgtaccccctggagagcagcggtctcgcttcctggctgtggggcttgtggacaacactgtcagaatcatctccctggatccctcagactgtttgcaacctctaagcatgcaggctctcccagcccagcctgagtccttgtgtatcgtggaaatgggtgggactgagaagcaggatgagctgggtgagaggggctcgattggcttcctatacctgaatattgggctacagaacggtgtgctgctgaggactgtcttggaccctgtcactggggatttgtctgatactcgcactcggtacctggggtcccgtcctgtgaagctcttccgagtccgaatgcaaggccagtaggcagtattggccatgtcaagccgctcatggttgagctattcttaccaatctcgcttccatctcaccccactgtcttacgagacactggaatttgcatcgggttttgcctcggaacagtgtcccgagggcattgtggccatctccaccaacaccctacggattttggcattagagaagctcggtgctgtcttcaatcaagtagccttcccactgcagtacacacccaggaaatttgtcatccaccctgagagtaacaaccttattatcattgaaacggaccacaatgcctacactgaggccacgaaagctcagagaaagcagcagatggcagaggaaatggtggaagcagcaggggaggatgagcgggagctggccgcagagatggcagcagcattcctcaatgaaaacctccctgaatccatctttggagctcccaaggctggcaatgggcagtgggcctctgtgatccgagtgatgaatcccattcaagggaacacactggaccttgtccagctggaacagaatgaggcagcttttagtgtggctgtgtgcaggttttccaacactggtgaagactggtatgtgctggtgggtgtggccaaggacctgatactaaacccccgatctgtggcagggggcttcgtctatacttacaagcttgtgaacaatggggaaaaactggagtttttgcacaagactcctgtggaagaggtccctgctgctattgccccattccaggggagggtgttgattggtgtggggaagctgttgcgtgtctatgacctgggaaagaagaagttactccgaaaatgtgagaataagcatattgccaattatatctctgggatccagactatcggacatagggtaattgtatctgatgtccaagaaagtttcatctgggttcgctacaagcgtaatgaaaaccagcttatcatctttgctgatgatacctacccccgatgggtcactacagccagcctcctggactatgacactgtggctggggcagacaagtttggcaacatatgtgtggtgaggctcccacctaacaccaatgatgaagtagatgaggatcctacaggaaacaaagccctgtgggaccgtggcttgctcaatggggcctcccagaaggcagaggtgatcatgaactaccatgtcggggagacggtgctgtccttgcagaagaccacgctgatccctggaggctcagaatcacttgtctataccaccttgtctggaggaattggcatccttgtgccattcacgtcccatgaggaccatgacttcttccagcatgtggaaatgcacctgcggtctgaacatccccctctctgtgggcgggaccacctcagctttcgctcctactacttccctgtgaagaatgtgattgatggagacctctgtgagcagttcaattccatggaacccaacaaacaaaagaacgtctctgaagaactggaccgaaccccacccgaagtgtccaagaaactcgaggatatccggacccgctacgccttctgagccctcctttcccggtggggcttgccagagactgtgtgttttgtttcccccaccaccatcactgccacctggcttctgccatgtggcaggagggtgactggataattaagactgcattatgaaagtcaacagctctttcccctcagctcttctcctggaatgactggcttcccctcaaattggcactgagatttgctacacttctccccacctggtacatgatacatgaccccaggttccagtgtagaacctgagtcccccattccccaaagccatccctgcattgatatgtcttgactctcctgtctacttttgcacacacccttgatttttaattggttttcttgtaaatacagttttgtacaatgttatctctgtgggaggaaggaggcaggctgtggtgggactgggtagggtatagtatcactcctgagttccactgctctagaatctaaccagaaatagaaacctagtttttaaggtg

SEQ ID NO: 11346 - protein, 503 aa, Homo sapiens
MSSRSWLSYSYQSRFHLTPLSYETLEFASGFASEQCPEGIVAISTNTLRILALEKLGAVFNQVAFPLQYTPRKFVIHPESNNLIIIETDHNAYTEATKAQRKQQMAEEMVEAAGEDERELAAEMAAAFLNENLPESIFGAPKAGNGQWASVIRVMNPIQGNTLDLVQLEQNEAAFSVAVCRFSNTGEDWYVLVGVAKDLILNPRSVAGGFVYTYKLVNNGEKLEFLHKTPVEEVPAAIAPFQGRVLIGVGKLLRVYDLGKKKLLRKCENKHIANYISGIQTIGHRVIVSDVQESFIWVRYKRNENQLIIFADDTYPRWVTTASLLDYDTVAGADKFGNICVVRLPPNTNDEVDEDPTGNKALWDRGLLNGASQKAEVIMNYHVGETVLSLQKTTLIPGGSESLVYTTLSGGIGILVPFTSHEDHDFFQHVEMHLRSEHPPLCGRDHLSFRSYYFPVKNVIDGDLCEQFNSMEPNKQKNVSEELDRTPPEVSKKLEDIRTRYAF

SEQ ID NO: 11347 - DNA, 1567 bp, Homo sapiens
  CDS (382)..(1053)
cccaggctgcaacggaggcagagccaacgcctcgcgggcttccacgtacgcactccaacgcgtgttcccggagaagaacgcatccgggtcacgggagccggtgtctcaggctccgccccttcaccccccgaaatgctaatccccacttccgaccctctcaggccttttccgcttctcttttacctccccaggtccgcccgtctgcgcccctcacaggaagccggagggtcgctctgatcccgaatctcccacaggcgtgaacctgctctgctgtgtatctttgcggggtggcctgcgctgaggcctgccgcgcgcggtgagtccgcgcagacctgaccctgcgtctcgcagctcggttgaggccgccgccgccttctcgggatgccgcggccggggtccgcgcagcgctgggcggccgtcgcgggccgttgggggtgcaggctgctcgcactgctgctactggtgcctggacccggcggcgcctctgagatcaccttcgagcttcctgacaacgccaagcagtgcttctacgaggacatcgctcagggcaccaagtgcaccctggagttccaggtgattactggtggtcactatgatgtagattgtcgattagaagatcctgatggtaaagtgttatacaaagagatgaagaaacagtatgatagttttaccttcacagcctccaaaaatgggacatacaaattttgcttcagcaatgaattttctactttcacacataaaactgtatattttgattttcaagttggagaagacccacctttgtttcctagtgagaaccgagtcagtgctcttacccagatggaatctgcctgtgtttcaattcacgaagctctgaagtctgtcatcgattatcagactcatttccgtttaagagaagctcaaggccgaagccgagcagaggatctaaatacaagagtggcctattggtcagtaggagaagccctcattcttctggtggttagcatagggcaggtatttcttttgaaaagctttttcccagataaaagaaccaccacaactcgtgttggatcataactacgttttgagaattgatgcaccattgccactgtaatattgctgtcctctaattaattttaggtactgaagaacttaatattggcaacatttttaaatccttactcatacacttgttgggagggatgtacaatgcatattcccaaactgtgggaaggacacctttttttatttgtaaaggtggaaaaactttggaactcattttgggctattcatgttaaatattcaacaccaatgatctactctgttcgcagttgtttatatctactcttcgcacactaaactttggtattttgattccttttaaccatttaagactacttttcttataggtagttgatattttaaaaactttagatttaatgtctacatgtgttagggaggaagaaaattgccttttaattgttaataagaaaaccaaatgtgatgaactgtagcccaagccctattctgcactgttcagttttatggaggaaaaataaatctaccataggaatgttagttaatattg

SEQ ID NO: 11348 - protein, 224 aa, Homo sapiens [sequence omitted]

SEQ ID NO: 11349 - DNA, 1929 bp, Homo sapiens
  CDS (290)..(787)
atcacggggagtctagggaaagggggaaagtcttccagcctgtgaactttaaccagattcctacttgtgcaagaagcagaagcacaatttgaagttaatagaagctttctcatggagaactttattccgtccctgagctcttctagcaagttgttttggagttgactacgcagtgacgacggagattacccagtcaactatttttgaacgctgaaagggaaaatcacctttaaattgaaaagataattttcagaagagatttgactgtattttgtgctcctcagcattcatgcaaaggtgttcgcggagtacagaaacggagtatgatgactggacttctctgttctctttcaggtttattaatgccagaagaagaatagtacagcccatgattgaccagtcaaatcgagcagtgagccaaggagcagcatatagtccagagggtcagcccatggggagctttgtgttggatggtcagcaacacatggggatccggcctgcaggtttgcagagcatgccaggggactacgtttctcagggtggtcctatgggaatgagtatggcacagccaagttacactcctccccagatgaccccacaccctactcaattaagacatggacccccaatgcattcatatttgccaagccatccccaccacccagccatgatgatgcacggaggaccccctacccaccctggaatgactatgtcagcacagagccccacaatgttaaattctgtagatcccaatgttggcggacaggttatggacattcatgcccaatagtataagggaactcaagggaaaaggaaacacacgcaaaaactattttaagactttctgaactttgaccagatgttgacacttaatatgaaattccagacagctgtgattattttttacttttgtcatttttcatcaagcaacagaggaccaatgcaagaagaacacaaatgtgaaatcatgggctgactgagacaattctgtccatgtaaagatcctctggaaaaagactccgagagttataactactgtagtataaatataggaactaagttaaacttgtacatttctgttgatcacgccgttatgttgcctcaaatagttttagaagagaaaaaaaaatatatccttgttttccacactatgtgtgttgttcccaaaagaatgactgttttggttcatcagtgaattcaccatccaggagagactgtggtatatattttaaacctgttgggccaatgagaaaagaaccacactggagatcatgatgaacttttggctgaacctcatcactcgaactccagcttcaagaatgtgttttcatgcccggcctttgttcctccataaatgtgtcctttagtttcaaacagatctttatagttcgtgcttcataagccaattcttattattatttttgggggactcttcttcaaagagcttgccaatgaagatttaaagacagagcaggagcttcttccaggagttctgagccttggttgtggacaaaacaatcttaagttgggcagctttcctcaacacaaaaaaagttattaatggtcattgaaccataactaggactttatcagaaactcaaagcttgggggataaaaaggagcaagagaatactgtaacaaacttcgtacagagttcggtctattaattgtttcatgttagatattctatgtgtttacctcaattgaaaaaaaaaagaatgtttttgctagtatcagatctgctgtggaattggtattgtatgtccatgaattcttcttttctcagcacgtgttcctcactagaagaaaatgctgttacctttaagctttgtcaaatttacattaaaatacttgtatgaggactgtgacgttatgttaaaaaaaaaaggtgttaagtcacaaaaagcggtaataaatatttcatttttg

SEQ ID NO: 11350 - protein, 166 aa, Homo sapiens
MQRCSRSTETEYDDWTSLFSFRFINARRRIVQPMIDQSNRAVSQGAAYSPEGQPMGSFVLDGQQHMGIRPAGLQSMPGDYVSQGGPMGMSMAQPSYTPPQMTPHPTQLRHGPPMHSYLPSHPHHPAMMMHGGPPTHPGMTMSAQSPTMLNSVDPNVGGQVMDIHAQ

SEQ ID NO: 11351 - DNA, 1627 bp, Homo sapiens
gtgtcctgctcgctccatgttgccgcctctcccggtacctgctgctgctcccggggcttcgggaaatgcgagagtctgagccggggaggaggaacccgagcagcggcggcggcggccgcggcggcgggagccccccaagaggaggaccgggatccatgtgtctttcctggtgactaggatgtcgtcggaggagaacaagtgcgtggagcagccgcagccaccaccccccgaggagcctggagccccggccccgagccccccagccgcagacaaaagacctcggggccggcctcgcaaggcgcttcccctttccagagagccagaaagaaactatttggagttttcctggtcttactggatgtcactctcgtccttgccgacctaattttcactgacagcaaactttatattccttcggagtatcgttctatttctctagctattgccttattttttctcatggatgttcttcttcgagtatttgtagaaggctcatccacaccgctcagcacgaaggccttgttctcaggggcctgcttctcaatgaggcggatctgcttgaggttggcatggggcccaatgccaaccgggatcacgatgaccttcttcttcttcaggccctggacgtagcggacaaagttccgggacatccgttggggctcctggctggccatcaggagcagggcgatgcggaaggcttcagggcggtcgatcttgctgatgatttggaacagtgtgtatttcaaggcctcgctggtggaggccacctggctgcccgcatacttcacccggctggcaacgcgccgcagctctgacggtcgcttccggtccttgagcccgatgtaggcgtgggagccgtcgtggtactccaccacagccacgcggacccacttctaggagatgcgcagccgctccatcatgtccaccacaaaggccttcagcacttcaaactcagcctcggacagcctggaggagccatccagcaggaagatcaggtccagtagcctgctgcagtagaaatcgtgcaactgcggttctgagatgtcctccacatacagagtggtggggctcaccggggcatctgtgggaggcaccaccaggcctcccggctcctggcaggcttcacaggtgagggtgacaccatcacagtggctgcagaaaagagcgaagaaattaaaatggttcagaaagaacctatggacacttctgagccctacagtgtatgactacttccatattcccacagaatctcctctgttccacctgaacttgagatcccatggaccattccacacccaagtgagatgtcactgtttaacatctgtccccaaatagcatgcccccccacttcaaaacacacacatagccgacttcctttgattctagaaaccaaagctttagcccatcctaggatatgaaaaaatatactcgttgttctaggccatccacacagccactcaaagctgatttcttttcaacctacatctttagcaacatgaatacttaattataatctaagccttcttacaagtgtctccaagaacaaatgttactaaaatgtagacgctaacctgtgcttgtacatgttctgttgaagataaatgctttacagtacatattctaacag

SEQ ID NO: 11352 - DNA, 2002 bp, Homo sapiens
  CDS (214)..(1908)
aaaaaaaaaaaaaaaataaagactattactaaggctgcacctgctgcccctccagtcccagctgccaatgagattgccaccaacaagcccaaaataacttggcaggctttaaacctgccagtcattacccagatcagccaggctttacctaccactgaggtaaccaatactcaggcttcttcagtcactgctcagcctaagaaagccaacaagatgaagagagttactgccaaggcagcccaaggctcccaatccccaactggccatgagggtggcactatacagctgaagtcacccttgcaggtcctaaagctaccagtcatctcacagaatattcacgctccaattgccaatgagtcagccagttcccaagccttgataacctctatcaagcctaagaaagcttccaaggctaagaaggctgcaaataaggccatagctagtgccaccgaggtctcgctggctgcaactgccacccatacagctaccacccaaggccaaattaccaatgagacagccagtatccacaccacagcagcctccatccgaaccaagaaagcctccaaagccaggaagacaattgctaaggtcataaatactgacactgagcatatagaggctctaaatgtcactgacgcagctaccaggcagattgaggcctcagtagtggctatcaggcccaaaaaatccaagggcaagaaggctgccagcaggggcccaaattctgtctctgagatctctgaggccccacttgccactcagatagtcacaaaccaagccctggcagccaccctgcgggtcaagagagggtctagggctcggaaggctgccactaaggctcgggcaactgaaagccagactccaaatgctgaccaaggggcccaggccaagatagcctctgctcagaccaacgtaagtgcccttgagactcaggttgctgctgctgtccaggccctggcagatgactatctggctcagttgagcctggagcccacaaccaggacccggggcaaaagaaaccgaaagtccaagcatctgaatggggatgagagaagtggcagtaattacaggcggatcccatggggccggaggcctgcaccaccgcgagatgtggccattttacaagaaagggctaataagttggtgaaatacctgttggttaaggaccagacaaagatccccatcaaacgctcagacatgctgagggatgtcatccaagaatatgatgaatatttcccagaaatcattgaacgagcaagctgcactctggagaagatgtttcgagtcaatctgaaggaaattgataagcaaagtagcttgtatattctcatcagcactcaggaatcctctgcaggcatactgggaacgaccaaggacacacccaagctgggtctcctcatggtgattctgagtgtcatttttatgaatggcaacaaggccagtgaggctgtcatctgggaggtgctgcgcaagttggggctgcgccctggggtgaggcattcactctttggggaagtgaggaagctcatcacagacgagtttgtgaagcagaagtacctggagtacaagagggtccctaacagcagaccacctgaatatgagttcttctggggcttgcgctcctaccacgagactagcaagatgaaagtcctcaagtttgcatgcagggtgcagaagaaagaccccaaggactgggctgtgcagtaccgcgaggcagtggagatggaagtccaagctgcagctgtggctgtggctgaggctgaagccagggctgagatttattccccatgtttacagataccgctaataaattgcagtagtccttcccatggagccaaagtacatccttggaatctttgtccacacagcagtcaaggcagttatggccaatcagctgagggtgtcatgtgatggaaaaatctgtttgctgttcctgctttattgtttgctttctgtgtgctgtcatattttggtatcagagttacattaaatttgcaaaatg

SEQ ID NO: 11353 - protein, 565 aa, Homo sapiens [sequence omitted]

SEQ ID NO: 11354 - DNA, 1366 bp, Homo sapiens
  CDS (169)..(1323)
tagtaataccagctgtaatcccagctacttgggaggctgaggcagaagaatcgcttgaacccgggaggcggaggttgagcaactacactgcgctgcatcggactcgacgcccgctggtgacgcacacgctgcgccggaagtgtgaactgtctgcctccaggctttgtcatggcggctgctgctgcacgctggaaccatgtgtgggtcggcaccgagactgggatcttgaaaggggtaaatcttcagcgaaaacaggcggcgaacctcacggccggaggacagccgcggcgcgaggaggcagtgagcgccctgtgttggggcaccggcggcgagacccagatgctggtgggctgcgcggacaggacggtgaagcacttcagcaccgaggatggcatattccagggtcagagacactgcccgggcggggagggcatgttccgtggcctcgcccaggccgacggcaccctcatcacatgtgtggattctgggattctcagagtctggcatgacaaggacaaggacacatcctctgacccactcctggaactgagagtgggccctggggtgtgtaggatgcgccaagacccagcacacccccatgtggttgccacaggtgggaaagagaatgctttgaagatatgggacctgcagggctctgaggaacctgtgttcagggccaagaacgtgcggaatgactggctggacttgcgggttcccatctgggaccaggacatacagtttctcccaggatcacagaagcttgtcacctgcacagggtaccaccaggtccgtgtttatgatccagcatccccccagcgccggccagtcctagagaccacctatggagagtactcactaacagccatgaccctcactccgggaggcaactcagtgattgtgggaaacactcatgggcagctggcagaaattgaccttcggcaagggcgtctactgggctgtctgaaggggctggcaggcagtgtgcgtgggttgcagtgccacccttcaaagcctctactagcctcctgtggcttggacagagtcttgaggatacacgggacccagaatccacggggtctggagcataaggtttatctcaagtctcaattgaactgcctcctcttgtcaggcagggacaactgggaggatgagccccaagagcctcaagaacccaacaaggtgcccctagaagacacagagacagatgaactttgggcatccttggaggcagctgccaagcggaagctctcgggtttggagcagccccaaggagctctccaaacgagacggagaaagaagaagcggcctgggtccaccagcccctgacgcccctgtgcccactttgtaaataaactgctgaacaccc

SEQ ID NO: 11355 - protein, 385 aa, Homo sapiens
MAAAAARWNHVWVGTETGILKGVNLQRKQAANLTAGGQPRREEAVSALCWGTGGETQMLVGCADRTVKHFSTEDGIFQGQRHCPGGEGMFRGLAQADGTLITCVDSGILRVWHDKDKDTSSDPLLELRVGPGVCRMRQDPAHPHVVATGGKENALKIWDLQGSEEPVFRAKNVRNDWLDLRVPIWDQDIQFLPGSQKLVTCTGYHQVRVYDPASPQRRPVLETTYGEYSLTAMTLTPGGNSVIVGNTHGQLAEIDLRQGRLLGCLKGLAGSVRGLQCHPSKPLLASCGLDRVLRIHGTQNPRGLEHKVYLKSQLNCLLLSGRDNWEDEPQEPQEPNKVPLEDTETDELWASLEAAAKRKLSGLEQPQGALQTRRRKKKRPGSTSP

SEQ ID NO: 11356 - DNA, 1597 bp, Homo sapiens
  CDS (14)..(1210)
cggcggcgctcccatggcgcacattaccattaaccagtacctgcagcaggtgtacgaagccatcgacagcagagatggagcatcttgtgcagagttggtgtcttttaaacatcctcatgttgcaaacccacgacttcaaatggcctctccagaggagaagtgtcaacaagtcttggaacccccttatgatgaaatgtttgcagctcatttaaggtgcacttatgcagtggggaatcatgacttcatagaggcatacaagtgccagaccgtgatagtccaatcattcttgcgagcattccaggcccacaaagaagaaaactgggctctgcctgtcatgtatgcagtagcgcttgaccttcgagtgtttgccaataatgcagatcaacagttggtaaagaaaggaaaaagcaaagttggggacatgttggaaaaagcagcagagttactgatgagctgtttccgggtctgtgccagcgacacccgtgctggtatagaggactctaagaagtggggcatgctgtttctggtgaaccagctgtttaaaatctacatcaagatcaacaaactccatttatgtaaacccctaattagagcaattgacagctcaaacctgaaagacgattacagcactgcacagagagtaacatacaaatactacgttggacgcaaggctatgtttgacagcgattttaagcaagctgaggagtacctgtcatttgcctttgagcattgtcaccgttctagtcagaagaacaaaaggatgattctgatctatttgcttccagtaaaaatgctattgggtcacatgcccactgtggagctcctgaaaaagtatcacctgatgcagtttgcggaagtaaccagagctgtgagcgagggcaacctgctgctgctgcacgaggcgctggcgaagcacgaggccttcttcattcgctgcggaatcttcctcatcctggagaagctgaagatcatcacctacaggaacctctttaagaaagtgtatttgttactgaaaacacaccagctgtctctggatgcttttctggttgccttgaagttcatgcaggtggaggacgtggacattgacgaagttcagtgtattctggctaacttgatatacatgggacacgtcaaaggctacatatcgcatcagcatcagaagctggtggtcagcaagcagaacccatttcctcccctgtccacggtgtgttgaaagtacacggagccccgaggacggactcggctggttctggagtctttgtgagacttctttgaaggaggctttgcgtgaaggctgctcggctcacttttcctaagtgtggttcctgaaggctgtctttgtaactttttgtagttctttgtgtaaaaagcgtattctgaatttatacacatggcatgttcttcattatatcttccaggatacatctatttttatatattaaatttgaatgtgttatcaaaatgcttggttaacttaaggcacctttttaaaagcagaatttaatttgatttaaattttccagattttatagcttgcctgtatggatgctcctcaatttatgatggggttacatcccaataaacttattttatttgc

SEQ ID NO: 11357 - protein, 399 aa, Homo sapiens [sequence omitted]

SEQ ID NO: 11358 - DNA, 2481 bp, Homo sapiens
  CDS (181)..(2064)
agctgctgccgccgcagttgcgaatgcagcatcggcgcttagctgcctccgcggtgcagctaaggttcgtgtcgctaccccttggcccttcgctcttgctgccttaaccccgccggtggagcccgctcttctggcctgttgagcccgctccctcactgccacacagcaagttccgagaccatggattcgggcagcagcagcagcgactcggcgcccgattgctgggaccaggtggacatggaatccccggggttggccccgagcggggatggagtctcctctgcggtggccgaagcccagcgcgagcccctcagctcggctttcagccgtaagctcaacgtcaacgccaagcccttcgtgcctaacgtacacgccgcggagttcgtgccgtccttcctgcggggcccgactcagccgcccaccctcccggccggctccggcagcaacgatgaaacctgcaccggcgcgggataccctcaaggtaaaaggatgggacggggggcacctgtggaaccttcccgagaggaaccgttagcgtcgcttgaaggttccaattcagccgttaccatggaactttcagaacctgttgtagaaaatggagaggtggaaatggccctagaagaatcatgggagcacagtaaagaagtaagtgaagccgagcctgggggtggttcctcgggagattcagggcccccagaagaaagtggccaggaaatgatggaggaaaaagaggaaataagaaaatccaaatctgtgatcgtaccctcaggtgcacctaagaaagaacacgtaaatgtagtattcattggccatgtagacgctggcaagtcaaccatcggaggacagataatgtttttgactggaatggttgacaaaagaacactggagaaatatgaaagagaagctaaggaaaaaaacagagaaacctggtatttgtcctgggccttagatacaaatcaggaggaacgagacaagggtaaaacagtcgaagtgggtcgtgcctattttgaaacagaaaggaaacatttcacaattttagatgcccctggccacaagggttttgtcccaaatatgattggtggtgcttctcaagctgatttggctgtgctggtcatctctgccaggaaaggagagtttgaaactggatttgaaaaaggtggacagacaagagaacatgcgatgttggcaaaaacggcaggggtaaaacatttaatagtgcttattaataagatggatgatcccacagtaaattggagcatcgagagatatgaagaatgtaaagaaaaactggtgccctttttgaaaaaagtaggcttcagtccaaaaaaggacattcactttatgccctgctcaggactgaccggagcaaatattaaagagcagtcagatttctgcccttggtacactggattaccatttattccgtatttggataacttgccaaacttcaacagatcaattgatggaccaataagactgccaattgtggataagtacaaagatatgggcactgtggtcctgggaaagctggaatccgggtccatttttaaaggccagcagctcgtgatgatgccaaacaagcacaatgtagaagttcttggaatactttctgatgatactgaaactgattttgtagccccaggtgaaaacctcaaaatcagactgaagggaattgaagaagaagagattcttccaggattcatactttgtgatcctagtaacctctgccattctggacgcacgtttgatgttcagatagtgattattgagcacaaatccatcatctgcccaggttataatgcggtgctgcacattcatacttgtattgaggaagttgagataacagcgttaatctccttggtagacaaaaaatcaggagaaaaaagtaagacacgaccccgcttcgtgaaacaagatcaagtatgcattgctcgtttaaggacagcaggaaccatctgcctcgagacgttcaaagattttcctcagatgggtcgttttactttaagagatgagggtaagaccattgcaattggaaaagttctgaaattggtcccagagaaggactaagcaattttcttgatgcctctgcaagatactgtgaggagaattgacagcaaaagttcaccacctactcttatttactgcccattgattgacttttcttcatattttgcaaagagaaatttcacagcaaaaattcatgttttgtcagctttctcatgttgagatctgttatgtcactgatgaatttaccctcaagtttccttcctctgtaccactctgcttccttggacaatatcagtaatagctttgtaagtgatgtggacgtaattgcctacagtaatgaaaaattaatgtactttaatttttcattttcttttaggatatttagaccacccttgttccacgcaaaccagagtgtgtcagtgtttgtgtgtgtgttaaaatgataactaacatgtgaataaaatactccatttg

SEQ ID NO: 11359 - protein, 628 aa, Homo sapiens
MDSGSSSSDSAPDCWDQVDMESPGLAPSGDGVSSAVAEAQREPLSSAFSRKLNVNAKPFVPNVHAAEFVPSFLRGPTQPPTLPAGSGSNDETCTGAGYPQGKRMGRGAPVEPSREEPLASLEGSNSAVTMELSEPVVENGEVEMALEESWEHSKEVSEAEPGGGSSGDSGPPEESGQEMMEEKEEIRKSKSVIVPSGAPKKEHVNVVFIGHVDAGKSTIGGQIMFLTGMVDKRTLEKYEREAKEKNRETWYLSWALDTNQEERDKGKTVEVGRAYFETERKHFTILDAPGHKGFVPNMIGGASQADLAVLVISARKGEFETGFEKGGQTREHAMLAKTAGVKHLIVLINKMDDPTVNWSIERYEECKEKLVPFLKKVGFSPKKDIHFMPCSGLTGANIKEQSDFCPWYTGLPFIPYLDNLPNFNRSIDGPIRLPIVDKYKDMGTVVLGKLESGSIFKGQQLVMMPNKHNVEVLGILSDDTETDFVAPGENLKIRLKGIEEEEILPGFILCDPSNLCHSGRTFDVQIVIIEHKSIICPGYNAVLHIHTCIEEVEITALISLVDKKSGEKSKTRPRFVKQDQVCIARLRTAGTICLETFKDFPQMGRFTLRDEGKTIAIGKVLKLVPEKD

SEQ ID NO: 11360 - DNA, 2239 bp, Homo sapiens
  CDS (31)..(1647)
tagcgagggacgcgtaggtgtcttcataagatgccggggcagcggcgcgcgctttcccccaagatggcgtccatgcgggagagcgacacgggcctgtggctgcacaacaagctgggggccacggacgagctgtgggcgccgcccagcatcgcgtccctgctcacggccgcggtcatcgacaacatccgtctctgcttccatggcctctcgtcggcagtgaagctcaagttgctactcgggacgctgcacctcccgcgccgcacggtggacgagatgaggggcgccctaatggagatcatccagctcgccagcctcgactcggacccctgggtgctcatggtcgccgacatcttgaagtcctttccggacacaggctcgcttaacctggagctggaggagcagaatcccaacgttcaggatattttgggagaacttagagaaaaggtgggtgagtgtgaagcgtctgccatgctgccactggagtgccagtacttgaacaaaaacgccctgacgaccctcgcgggacccctcactcccccggtgaagcattttcagttaaagcggaaacccaagagcgccacgctgcgggcggagctgctgcagaagtccacggagaccgcccagcagttgaagcggagcgccggggtgcccttccacgccaagggccgggggctgctgcggaagatggacaccaccaccccactcaaaggcatcccgaagcaggcgcccttcagaagccccacggcgcccagcgtcttcagccccacagggaaccggacccccatcccgccttccaggacgctgctgcggaaggaacgaggtgtgaagctgctggacatctctgagctggatatggttggcgctggccgagaggcgaagcggagaaggaagactctcgatgcggaggtggtggagaagccggccaaggaggaaacggtggtggagaacgccaccccggactacgcagccggcctggtgtccacgcagaaacttgggtccctgaacgatgagcctgcgctgccctccacgagctaccttccctccacgcccagcgtggttcccgcctcctcctacatccccagctccgagacacccccagccccatcttcccgggaagccagccgcccaccagaggagcccagcgccccgagccccacgttgccagcgcagttcaagcagcgggcgcccatgtacaacagcggcctgagccctgccacacccacgcctgcggcgcccacctcgcctctgacacccaccacacctccggctgtcgcccctaccactcagacacccccggttgccatggtggccccgcagacccaggcccctgctcagcagcagcctaagaagaacctgtccctcacgagagagcagatgttcgctgcccaggagatgttcaagacggccaacaaagtcacgcggcccgagaaggccctcatcctgggcttcatggccggctcccgagagaacccgtgccaggagcagggggacgtgatccagatcaagctgagcgagcacacggaggacctgcccaaggcggacggccagggtagcacaaccatgctggtggacacagtgtttgagatgaactatgccacgggccagtggacgcgcttcaagaagtacaagcccatgaccaatgtgtcctagaaccacctgcctcacagctggccgtcacttgtgggggtccacgggacgatggctttgccagcttaaagtaaccggatggcggacacctggcccccgaggtcccccggccgccgccctgctgctgacccagcctgttttaagttctggatgcatttctctggggtatttggggcttatttttaaaattttaatatgggttcttttttgtgtgatttaagacactttttggactcaacgttacatttttgaatgtagtaagtaaattaaccaaaaaagttacaacttcctaattttagtgacagctctgcctgttagactcttactttttaaaatcttttctattttccctcgctggggcagtgccctcctacccccagggttgaggggaccaaggtggcacggtggtactgggggtgcggcagggacacccgaccacaccagagcgtgggagacggtgggcattgtcccctgcctgtgcctgcctgggagttttgtattcatcttttgtatagttgtggacatttaagacagtctttgggtacctattttcattgtaaaactatctgaaccattaaagtcgagcttttct

SEQ ID NO: 11361 - protein, 539 aa, Homo sapiens [sequence omitted]

SEQ ID NO: 11362 - DNA, 1687 bp, Homo sapiens
  CDS (121)..(879)
gctgcggggagcgccgcgcaggccgtgcagttcctagcgaggaggcgccgccgccattgccgctctctcggtgagcgcagccccgctctccgggccgggccttcgcgggccaccggcgccatgggccagtgcggcatcacctcctccaagaccgtgctggtctttctcaacctcatcttctggggggcagctggcattttatgctatgtgggagcctatgtcttcatcacttatgatgactatgaccacttctttgaagatgtgtacacgctcatccctgctgtagtgatcatagctgtaggagccctgcttttcatcattgggctaattggctgctgtgccacaatccgggaaagtcgctgtggacttgccacgtttgtcatcatcctgctcttggtttttgtcacagaagttgttgtagtggttttgggatatgtttacagagcaaaggtggaaaatgaggttgatcgcagcattcagaaagtgtataagacctacaatggaaccaaccctgatgctgctagccgggctattgattatgtacagagacagctgcattgttgtggaattcacaactactcagactgggaaaatacagattggttcaaagaaaccaaaaaccagagtgtccctcttagctgctgcagagagactgccagcaattgtaatggcagcctggcccacccttccgacctctatgctgaggggtgtgaggctctagttgtgaagaagctacaagaaatcatgatgcatgtgatctgggccgcactggcatttgcagctattcagctgctgggcatgctgtgtgcttgcatcgtgttgtgcggaaggagtagagatcctgcttacgagctcctcatcactggcggaacctatgcatagttgacaactcaagcctgagctttttggtcttgttctgatttggaaggtgaattgagcaggtctgctgctgttggcctctggagttcatttagttaaagcacatgtacactggtgttggacagagcagcttggcttttcatgtgcccacctacttacctactacctgcgactttctttttccttgttctagctgactcttcatgcccctaagattttaagtacgatggtgaacgttctaatttcagaaccaattgcgagtcatgtagtgtggtagaattaaaggaggacacgagcctgcttctgttacctccaagtggtaacaggactgatgccgaaatgtcaccaggtcctttcagtcttcacagtggagaactcttggccaaaggtttttggggggaggaggaggaaaccagctttctggttaaggttaacaccagatggtgcccctcattggtgtccttttaaaaaatatttactgtagtccaataagatagcagctgtacaaaatgactaaaatagattgtaggatcatatggcgtatatcttggttcatcttcaaaatcagagactgagctttgaaactagtggtttttaatcaaagttggctttataggaggagtataatgtatgcactactgttttaaaagaattagtgtgagtgtgtttttgtatgaatgagcccattcatggtaagtcttaagcttgttggaaataatgtacccatgtagactagcaaaatagtatgtagatgtgatctcagttgtaaatagaaaaatctaattcaataaactctgtatcagccccc

SEQ ID NO: 11363 - protein, 253 aa, Homo sapiens [sequence omitted]

SEQ ID NO: 11364 - DNA, 1653 bp, Homo sapiens
  CDS (142)..(1533)
acgtccggggaggggccaggtgagcggcagacccggcacgcaggtgggggccggcggggtccgtggccagagctgcagagagacaaggcggcggcggctgctgtgctgggtgcagtgaggaagaggccctcggtggtgcccatggctggccaggatcctgcgctgagcacgagtcacccgttctacgacgtggccagacatggcattctgcaggtggcaggggatgaccgctttggaagacgtgttgtcacgttcagctgctgccggatgccgccctcccacgagctggaccaccagcggctgctggagtatttgaagtacacactggaccaatacgttgagaacgattataccatcgtctatttccactacgggctgaacagccggaacaagccttccctgggctggctccagagcgcatacaaggagttcgataggaaagacggggatctcactatgtggcccaggctggtctcgaactccaagctcaagcgatcctcccacctcagcctcccaaagtactgggattacaggtacaagaagaacttgaaggccctctacgtggtgcaccccaccagcttcatcaaggtcctgtggaacatcttgaagcccctcatcagtcacaagtttgggaagaaagtcatctatttcaactacctgagtgagctccacgaacaccttaaatacgaccagctggtcatccctcccgaagttttgcggtacgatgagaagctccagagcctgcacgagggccggacgccgcctcctaccaagacaccaccgccgcggcccccgctgcccacacagcagtttggcgtcagtctgcaatacctcaaagacaaaaatcaaggcgaactcatcccccctgtgctgaggttcacagtgacgtacctgagagagaaaggcctgcgcaccgagggcctgttccggagatccgccagcgtgcagaccgtccgcgagatccagaggctctacaaccaagggaagcccgtgaactttgacgactacggggacattcacatccctgccgtgatcctgaagaccttcctgcgagagctgccccagccgcttctgaccttccaggcctacgagcagattctcgggatcacctgtgtggagagcagcctgcgtgtcactggctgccgccagatcttacggagcctcccagagcacaactacgtcgtcctccgctacctcatgggctttctgcatgcggtgtcccgggagagcatcttcaacaaaatgaacagctctaacctggcctgtgtcttcgggctgaatttgatctggccatcccagggggtctcctccctgagtgcccttgtgcccctgaacatgttcactgaactgctgatcgagtactatgaaaagatcttcagcaccccggaggcacctggggagcacggcctggcaccatgggaacaggggagcagggcagcccctttgcaggaggctgtgccacggacacaagccacgggcctcaccaagcctaccctacctccgagtcccctgatggcagccagaagacgtctctagtgttgcgaacactctgtatgtttcgagctacctcccacacctgtctgtgcacttgtatgttttgtaaacttggcatctgtaaaaataaccagccattagatgaattcagaaccttct

SEQ ID NO: 11365 - protein, 464 aa, Homo sapiens
MAGQDPALSTSHPFYDVARHGILQVAGDDRFGRRVVTFSCCRMPPSHELDHQRLLEYLKYTLDQYVENDYTIVYFHYGLNSRNKPSLGWLQSAYKEFDRKDGDLTMWPRLVSNSKLKRSSHLSLPKYWDYRYKKNLKALYVVHPTSFIKVLWNILKPLISHKFGKKVIYFNYLSELHEHLKYDQLVIPPEVLRYDEKLQSLHEGRTPPPTKTPPPRPPLPTQQFGVSLQYLKDKNQGELIPPVLRFTVTYLREKGLRTEGLFRRSASVQTVREIQRLYNQGKPVNFDDYGDIHIPAVILKTFLRELPQPLLTFQAYEQILGITCVESSLRVTGCRQILRSLPEHNYVVLRYLMGFLHAVSRESIFNKMNSSNLACVFGLNLIWPSQGVSSLSALVPLNMFTELLIEYYEKIFSTPEAPGEHGLAPWEQGSRAAPLQEAVPRTQATGLTKPTLPPSPLMAARRRL

SEQ ID NO: 11366 - DNA, 1770 bp, Homo sapiens
  CDS (35)..(1633)
aaaaaaaagcccgagtgcagccgccgggcgcaggatgggatccggctcctccagctaccggcccaaggccatctacctggacatcgatggacgcattcagaaggtaatcttcagcaagtactgcaactccagcgacatcatggacctgttctgcatcgccaccggcctgcctcggaacacgaccatctccctgctgaccaccgacgacgccatggtctccatcgaccccaccatgcccgcgaattcagaacgcactccgtacaaagtgagacctgtggccatcaagcaactctccgagagagaagaattaatccagagcgtgctggcgcaggttgcagagcagttctcaagagcattcaaaatcaatgaactgaaagctgaagttgcaaatcacttggctgtcctagagaaacgcgtggaattggaaggactaaaagtggtggagattgagaaatgcaagagtgacattaagaagatgagggaggagctggcggccggaagcagcaggaccaactgcccctgtaagtacagttttttggataaccacaagaagttgactcctcgacgcgatgttcccacttaccccaagtacctgctctctccagagaccatcgaggccctgcggaagccgacctttgacgtctggctttgggagcccaatgagatgctgagctgcctggagcacatgtaccacgacctcgggctggtcagggacttcagcatcaaccctgtcaccctcaggaggtggctgttctgtgtccacgacaactacagaaacaaccccttccacaacttccggcactgcttctgcgtggcccagatgatgtacagcatggtctggctctgcagtctccaggagaagttctcacaaacggatatcctgatcctaatgacagcggccatctgccacgatctggaccatcccggctacaacaacacgtaccagatcaatgcccgcacagagctggcggtccgctacaatgacatctcaccgctggagaaccaccactgcgccgtggccttccagatcctcgccgagcctgagtgcaacatcttctccaacatcccacctgatgggttcaagcagatccgacagggaatgatcacattaatcttggccactgacatggcaagacatgcagaaattatggattctttcaaagagaaaatggagaattttgactacagcaacgaggagcacatgaccctgctgaagatgattttgataaaatgctgtgatatctctaacgaggtccgtccaatggaagtcgcagagccttgggtggactgtttattagaggaatattttatgcagagcgaccgtgagaagtcagaaggccttcctgtggcaccgttcatggaccgagacaaagtgaccaaggccacagcccagattgggttcatcaagtttgtcctgatcccaatgtttgaaacagtgaccaagctcttccccatggttgaggagatcatgctgcagccactttgggaatcccgagatcgctacgaggagctgaagcggatagatgacgccatgaaagagttacagaagaagactgacagcttgacgtctggggccaccaagaagtccagagagagaagcagagatgtgaaaaacagtgaaggagactgtgcctgaggaaagcggggggcgtggctgcagttctggacgggctggccgagctgcgcgggatccttgtgcagggaagagctgccctgggcacctggcaccacaagaccatgttttctaagaaccattttgttcactgatac

SEQ ID NO: 11367 - protein, 533 aa, Homo sapiens
MGSGSSSYRPKAIYLDIDGRIQKVIFSKYCNSSDIMDLFCIATGLPRNTTISLLTTDDAMVSIDPTMPANSERTPYKVRPVAIKQLSEREELIQSVLAQVAEQFSRAFKINELKAEVANHLAVLEKRVELEGLKVVEIEKCKSDIKKMREELAAGSSRTNCPCKYSFLDNHKKLTPRRDVPTYPKYLLSPETIEALRKPTFDVWLWEPNEMLSCLEHMYHDLGLVRDFSINPVTLRRWLFCVHDNYRNNPFHNFRHCFCVAQMMYSMVWLCSLQEKFSQTDILILMTAAICHDLDHPGYNNTYQINARTELAVRYNDISPLENHHCAVAFQILAEPECNIFSNIPPDGFKQIRQGMITLILATDMARHAEIMDSFKEKMENFDYSNEEHMTLLKMILIKCCDISNEVRPMEVAEPWVDCLLEEYFMQSDREKSEGLPVAPFMDRDKVTKATAQIGFIKFVLIPMFETVTKLFPMVEEIMLQPLWESRDRYEELKRIDDAMKELQKKTDSLTSGATKKSRERSRDVKNSEGDCA

SEQ ID NO: 11368 - DNA, 1635 bp, Homo sapiens
ttgaacattcctttagtttccagcttcataatttggttcttattaaaataattctagaattttcatgttttttttaaccagctctctaaattgtgttacatgcacataaaatatgccattttaaccattttcaggtgtgtggttcagtggccttgggtacagacccagtgttacacagccaccaccaccaccatcatctccagagcctttttatcttcccaaactgaagctctgcccccattaaacactcactccccaccccgctcccccagcagggttagatcgcagaggggcctgccgggggctctgaggtgatggaaaccatctgagactgccatggcgatgatcgagaaagtctgtgaatttacggaaaattattgcattatatacataaaagaggtgtgtgtaaactgtgccataataaagcctaaaaattagaagcatgcttgtaacttagtgtatttaaataggtaattcgttcagtcctgaggttagtattattgaaaaggtttaattttgttctcatctctgccgctgtctgtagtgacctatagagaaccactgtgatcacctcctgtatgtatgcaaatctgagcaaacgtaaacatattttcttcttgttttccttccacaatcccccccactcccacccccgcccatgtgtgtctgcgttttcccgcaggtgcatgcaggcccgcgttcatctgtgcagcccttcctgctgccctgcgggccccatgcactgcagaccccgctgcctcagacctgtgcctgcgtggctggcacacctgttccctgagtcggagacggcggctgcctgttgagggcagggtgcgtccgctgcttatagagacgtgaagcccaccatggccattctgttggcgtgcgtttgtcaccagctgtgttcccgtatagaaacgtttctcgtctttggggggctttttcctcattaagctctatttcttaaagtcccatgacatactaatctagctatgccagctttctgttggtgaatacttgtgtgatatttctgttcttaaaatgtcttaaatgtgacactgtttacaacgtagagctaggttttttaaaaaaatcaaacttttttagctggcacgttaccttacacattccacgattttccatggaggatgtgagttggttcctgctttatttttttattttgctcttttcgtcagttttttcctaatgcttccttcctccctgttgtctagtgaattagtaactttctttaatctctttctttcttcctctggtttgcaaggtataagctctacttctgttatactagtggttacaaaatgtataaactatttacatttttagaaatccaaagttggcccggcgcggtggctcacgcctgtaatcctagcactttgggaagccgaggtgggcagatcacgaggtcaggagatcaagaccattctggccaacttggtgaaaccccgtctctactaaaatacaaaaaaattagccgggcatgatggtgcgcgcctgtagtcccagctactcgggaggctgaggcagcggaatcgcttgaacccaggaggcggaggttgcagtgagccgagatcgtgccacggcatccagcctggctacagagggagactctgtctc

SEQ ID NO: 11369 - DNA, 1777 bp, Homo sapiens
ggcctactggaagcagcgtcctgaggagacagcggcacgttctagctgcgtctgcggccagcccgtgccagtggagtgggctccgcgttgctcattctctccgacaggttgtcagcctctgtccccgctgcacagggtcttgccccttctccggggcctgtgccagctcccttccccccccgttgtcctgtccccacagccattctgggagctggggaacctggtctcaaggcaggccctgcagttccacagaggtggcaggtcttgccctttggccaacagatttcttgtcctgccttctagatgcctctgagctccaaacccagggcagccatggcttctcatttacaccaacaggtttcagttccaacagaaaggtcggggtaggttcgtgcagagatggggctggcaggggggctatgggaggattattttaacagatcaagaaaatgaagccaaatcaagtgaattaaattcctcacaattattttctttccctgaggtttgattggcacagcagcaaaagttgaggccaccccacttgtgtccactgtttttagaaaaaaatgaatggcttcctgccattgtggggctggactcttgggctttcttggtgggagcggagaaggggcctcccacccttgtccgagttgcctcccactggaggtcaggagtctacactgcagcctcgggcactgtggggagtgcatgcctggggcctctgggtggggaccatggacaggccctggtcactgtcctaacctttgtcaggacaaaggtagcaagaggatttcctggcgggtgggaaggaatggctggggcggccagttttgacacgccccagtgccctggagaacaaccagggtcatctgcacttgatgactgctccccgacccccagcccggacacctcattcccctcccactacagggatcaagtgacctgggaagaaccgagtttaacaccaggatgtgtttccttagatttcctttcctaggcgatttccagggagagccctgattggacaatcacatcacagatcacactgcagtttccatgttagcactgtggatgggtttttaatcaataaaaactgggggtttcttctcaccgactctccacttgcccaaactgccaaaagctggtgattctgggacaggccttcactttggagccacgggatggggtgggggagccccatgggcctgggaaggagggtgctgtggagggggctgcagggctgaccagcaggcagcctcatctggtcgggggcgggggcggcaggagcagaagcggggtctccgtccttgggactgtcctggttggccacgggccctgaggatgcacggtgcctggggctcctgtgccggtgggcggggggcatgctggcctctgagcgatcaggcgaggccagcgagggtgtgcttgcaaattcaagcaataagaggggggttcctgggggcttccagcccaggctagaagcccccatggcttctggcagctggacatcagccccaggtattggggtgattttggtcatgacagtgtgcctgtcccactgttacacgcatgaatgggggttatggggtgggggtggggactcagggctggaccgacgtcctagtggacctgatgtgaaattcctgtcaaacaaacaccacttttcaatggtttgctaggagtatttctgtattgaaagtttctaattatgctttttaaaaaaatactaaaaataaaggttcaagctgccaaaaaaaaaaaaaaaaaggccacatgt

SEQ ID NO: 11370 - DNA, 1673 bp, Homo sapiens
  CDS (107)..(865)
aaaaaaggccgtgcagttcctagcgaggaggcgccgccgccattgccgctctctcggtgagcgcagccccgctctccgggccgggccttcgcgggccaccggcgccatgggccagtgcggcatcacctcctccaagaccgtgctggtctttctcaacctcatcttctggggggcagctggcattttatgctatgtgggagcctatgtcttcatcacttatgatgactatgaccacttctttgaagatgtgtacacgctcatccctgctgtagtgatcatagctgtaggagccctgcttttcatcattgggctaattggctgctgtgccacaatccgggaaagtcgctgtggacttgccacgtttgtcatcatcctgctcttggtttttgtcacagaagttgttgtagtggttttgggatatgtttacagagcaaaggtggaaaatgaggttgatcgcagcattcagaaagtgtataagacctacaatggaaccaaccctgatgctgctagccgggctattgattatgtacagagacagctgcattgttgtggaattcacaactactcagactgggaaaatacagattggttcaaagaaaccaaaaaccagagtgtccctcttagctgctgcagagagactgccagcaattgtaatggcagcctggcccacccttccgacctctatgctgaggggtgtgaggctctagttgtgaagaagctacaagaaatcatgatgcatgtgatctgggccgcactggcatttgcagctattcagctgctgggcatgctgtgtgcttgcatcgtgttgtgcagaaggagtagagatcctgcttacgagctcctcatcactggcggaacctatgcatagttgacaactcaagcctgagctttttggtcttgttctgatttggaaggtgaattgagcaggtctgctgctgttggcctctggagttcatttagttaaggcacatgtacactggtgttggacagagcagcttggcttttcatgtgcccacctacttacctactacctgcgactttctttttccttgttctagctgactcttcatgcccctaagattttaagtacgatggtgaacgttctaatttcagaaccaattgcgagtcatgtagtgtggtagaattaaaggaggacacgagcctgcttctgttacctccaagtggtaacaggactgatgccgaaatgtcaccaggtcctttcagtcttcacagtggagaactcttggccaaaggtttttggggggaggaggaggaaaccagctttctggttaaggttaacaccagatggtgcccctcattggtgtccttttaaaaaatatttactgtagtccaataagatagcagctgtacaaaatgactaaaatagattgtaggatcatatggcgtatatcttggttcatcttcaaaatcagagactgagctttgaaactagtggtttttaatcaaagttggctttataggaggagtataatgtatgcactactgttttaaaagaattagtgtgagtgtgtttttgtatgaatgagcccattcatggtaagtcttaagcttgttggaaataatgtacccatgtagactagcaaaatagtatgtagatgtgatctcagttgtaaatagaaaaatctaattcaataaactctgtatcagccccc

SEQ ID NO: 11371 - protein, 253 aa, Homo sapiens
MGQCGITSSKTVLVFLNLIFWGAAGILCYVGAYVFITYDDYDHFFEDVYTLIPAVVIIAVGALLFIIGLIGCCATIRESRCGLATFVIILLLVFVTEVVVVVLGYVYRAKVENEVDRSIQKVYKTYNGTNPDAASRAIDYVQRQLHCCGIHNYSDWENTDWFKETKNQSVPLSCCRETASNCNGSLAHPSDLYAEGCEALVVKKLQEIMMHVIWAALAFAAIQLLGMLCACIVLCRRSRDPAYELLITGGTYA

SEQ ID NO: 11372 - DNA, 2041 bp, Homo sapiens
  CDS (211)..(1821)
aatatatgcacctttcagttcacacgtggcgccagcggaggcaggttgatgtgtttgtgcttccttctacagccaatatgaaaaggcctagtaagtggggtcgggaggcgggcgtggagggacccacgtctggaagttgctgcagccaccacgacgctcttctacggctacggctttgtctctgctgagttaaagaaagcaagtaaacgcatgacctgccataagcggtataaaatccaaaaaaaggttcgagaacatcatcgaaaattaagaaaggaggctaaaaagcggggtcacaagaagcctaggaaagacccaggagttccaaacagtgctccctttaaggaggctcttcttagggaagctgagctaaggaaacagaggcttgaagaactaaaacagcagcagaaacttgacaggcagaaggaactagaaaagaaaagaaaacttgaaactaatcctgatattaagccatcaaatgtggaacctatggaaaaggagtttgggctttgcaaaactgagaacaaagccaagtcgggcaaacagaattcaaagaagctgtactgccaagaacttaaaaaggtgattgaagcctccgatgttgtcctagaggtgttggatgccagagatcctcttggttgcagatgtcctcaggtagaagaggccattgtccagagtggacagaaaaagctggtacttatattaaataaatcagatctggtaccaaaggagaatttggagagctggctaaattatttgaagaaagaattgccaacagtggtgttcagagcctcaacaaaaccaaaggataaagggaagataaccaagcgtgtgaaggcaaagaagaatgctgctccattcagaagtgaagtctgctttgggaaagagggcctttggaaacttcttggaggttttcaggaaacttgcagcaaagccattcgggttggagtaattggtttcccaaatgtggggaaaagcagcattatcaatagcttaaaacaagaacagatgtgtaatgttggtgtatccatggggcttacaaggagcatgcaagttgtccccttggacaaacagatcacaatcatagatagtccgagcttcatcgtatctccacttaattcctcctctgcgcttgctctgcgaagtccagcaagtattgaagtagtaaaaccgatggaggctgccagtgccatcctttcccaggctgatgctcgacaggtagtactgaaatatactgtcccaggctacaggaattctctggaattttttactgtgcttgctcagagaagaggtatgcaccaaaaaggtggaatcccaaatgttgaaggtgctgccaaactgctgtggtctgagtggacaggtgcctcattagcttactattgccatccccctacatcttggactcctcctccatattttaatgagagtattgtggtagacatgaaaagcggcttcaatctggaagaactggaaaagaacaatgcacagagcataagagccatcaagggccctcatttggccaatagcatccttttccagtcttccggtctgacaaatggaataatagaagaaaaggacatacatgaagaattgccaaaacggaaagaaaggaagcaggaggagagggaggatgacaaagacagtgaccaggaaactgttgatgaagaagttgatgaaaacagctcaggcatgtttgctgcagaagagacaggggaggcactgtctgaggagactacagcaggtgaacagtctacaaggtcttttatcttggataaaatcattgaagaggatgatgcttatgacttcagtacagattatgtgtaacagaacaatggctttttatgattttttttttaacattttaagcagactgctaaactgttctctgtataagttatggtatgcatgagctgtgtaaattttgtgaatatgtattatattaaaaccaggcaacttggaatccctaaattctgtaaaaagacaattcatctcattgtgagtggaagtagttatctggaataaaaaaagaagatacctattg

SEQ ID NO: 11373 - protein, 537 aa, Homo sapiens
MTCHKRYKIQKKVREHHRKLRKEAKKRGHKKPRKDPGVPNSAPFKEALLREAELRKQRLEELKQQQKLDRQKELEKKRKLETNPDIKPSNVEPMEKEFGLCKTENKAKSGKQNSKKLYCQELKKVIEASDVVLEVLDARDPLGCRCPQVEEAIVQSGQKKLVLILNKSDLVPKENLESWLNYLKKELPTVVFRASTKPKDKGKITKRVKAKKNAAPFRSEVCFGKEGLWKLLGGFQETCSKAIRVGVIGFPNVGKSSIINSLKQEQMCNVGVSMGLTRSMQVVPLDKQITIIDSPSFIVSPLNSSSALALRSPASIEVVKPMEAASAILSQADARQVVLKYTVPGYRNSLEFFTVLAQRRGMHQKGGIPNVEGAAKLLWSEWTGASLAYYCHPPTSWTPPPYFNESIVVDMKSGFNLEELEKNNAQSIRAIKGPHLANSILFQSSGLTNGIIEEKDIHEELPKRKERKQEEREDDKDSDQETVDEEVDENSSGMFAAEETGEALSEETTAGEQSTRSFILDKIIEEDDAYDFSTDYV

SEQ ID NO: 11374 - DNA, 1732 bp, Homo sapiens
  CDS (400)..(840)
agcagggaggaagacaggcaatccctccggctgtccgaccaagagaggccggccgagcccgaggcttgggcttttgctttctggcggagggatctgcggcggtttaggaggcggcgctgatcctgggaggaagaggcagctacggcggcggcggcggtggcggctagggcggcggcgaataaaggggccgccgccgggtgatgcggtgaccgctgcggcaggcccaggagctgagtgggccccggccctcagcccgtcccgccggacccgctttcctcaactctccatcttctcctgccgaccgagatcgccgaggcggcctcaggctccctagccccttccccgtcccttccccgcccccgtccccgccccgggggccgccgccacccgcctcccaccatggctctgaagagaatccacaaggaattgaatgatctggcacgggaccctccagcacagtgttcagcaggtcctgttggagatgatatgttccattggcaagctacaataatggggccaaatgacagtccctatcagggtggagtatttttcttgacaattcatttcccaacagattaccccttcaaaccacctaaggttgcatttacaacaagaatttatcatccaaatattaacagtaatggcagcatttgtcttgatattctacgatcacagtggtctccagcactaactatttcaaaagtactcttgtccatctgttctctgttgtgtgatcccaatccagatgatcctttagtgcctgagattgctcggatctacaaaacagatagagaaaagtacaacagaatagctcgggaatggactcagaagtatgcgatgtaattaaagaaattattggataacctctacaaataaagataggggaactctgaaagagaaagtccttttgatttccatttgactgctttctatgagcccacgcctcatcttcccctgtgcacatgtttacctgatacagcagtgctgcgtgttgtacatacttggaacaacaaactagaaatactgtacttctgtaccaacattgcctcctagcagagaagtgtgtgtgtgacaagccagttctacaggcattacctaggtgtgagactaaaagcttttcttattgacttaaatttggataacagcaaggtgtgaggggggtggtgggtatggtgtgtgcttggatgggaaagaaaaggctccactcacctataggagattatttttaagtggaatccatttaaactcaaaacagttatgaaaagcaaggtgaagaacatgaagctgtgtctgtattcattttattccgaaggagctacgtcttaggtgaaagttatgaccaaccagattaaactctacccacatcctgcattttaaggtctaagtttaactggtcaacatttaaatggattggagctattagtacatcaagtgtgatgggctttgttcccaactcttttacatctccctaccccttcaacctttggcctttcagcccttctttctctcttccatattctttggtttgtatgtggtttctcagttaatacatagctaatagctcttatttttcttatgtttttaaccgcttaggtctatttggatgtaagggtgaaaattcatttgatggaaatacttgtgtatatttaaagacccaattgctcctctggagcttgtactttcaagaatgattaatctgtgtaataaactggttactacagtcattacatat

SEQ ID NO: 11375 - protein, 147 aa, Homo sapiens
MALKRIHKELNDLARDPPAQCSAGPVGDDMFHWQATIMGPNDSPYQGGVFFLTIHFPTDYPFKPPKVAFTTRIYHPNINSNGSICLDILRSQWSPALTISKVLLSICSLLCDPNPDDPLVPEIARIYKTDREKYNRIAREWTQKYAM

SEQ ID NO: 11376 - DNA, 2355 bp, Homo sapiens
  CDS (67)..(1620)
agcggaggttccgggctccgggatgaaaggagggaacgcagctggcagagagagaagttggctagcatggaatcaccagaggagcctggagcatccatggatgagaactactttgtgaactacactttcaaagatcggtcacattcaggccgtgtggctcaaggcatcatgaaactgtgtctagaggaggagctctttgctgatgtcaccatttcggtggaaggccgggagtttcagctccatcggctggtcctctcagctcagagctgcttcttccgatccatgttcacttccaacctgaaggaggcccacaaccgggtgattgtgctgcaggatgtcagcgagtctgttttccagctcctggttgattatatctaccatgggactgtgaaacttcgagctgaggagttgcaggaaatttatgaggtgtcagacatgtatcagctgacatctctctttgaggaatgctctcggtttttggcccgcacagtgcaagtgggaaactgccttcaggtgatgtggctggcagatcggcacagtgatcctgagctctatacggctgccaagcactgtgccaagacccacctggcccagctgcagaatacagaggaatttctccacttgccccaccgcttactcacagatatcacctcggatggagttccgtgttctcagaacccaacagaggcaatagaagcctggatcaactttaataaagaggaaagagaggcttttgcagagtcactcaggacaagcttgaaggaaattggggagaatgtgcacatttacctgattgggaaagagtcatctcgtacccactcgttgggtgtgtccttgcactgtgcagaagatgactccatcagtgtaagtggccaaaacagtttgtgccaccagatcactgcggcctgcaagcatggtggagacttgtatgtggtgggagggtccatcccacggcgcatgtggaagtgcaacaatgccaccgttgactgggagtggtgtgctcctttgcctcgggaccggctccagcacaccctggtgtctgtgcccgggaaagatgccatatattcactgggtggcaagacactgcaagataccctctccaacgcagtcatttattatcgcgtaggtgataatgtgtggacagagacaactcagctagaggtggctgtgtcaggggctgctggtgccaacctcaacgggatcatctacttactagggggggaggagaatgatctggacttctttaccaaaccttcccgactcatccagtgctttgacacagagacagacaaatgccatgtgaagccctatgtgctgccctttgcaggccgcatgcacgcagctgtgcataaagatctggtgttcatcgtggctgaaggggactccctggtgcgctacaatcccttgctagacagcttcacccggctttgccttcctgaggcctggagctctgccccatccctctggaagattgccagctgtaacgggagcatctatgtcttccgggaccgatataaaaagggggatgccaacacctacaagcttgaccctgccacttcagccataactgtcacaagaggtattaaggtgctgcttaccaatttgcagtttgtgttggcctaaggctgtggggaggggaggagaactgctcactccttttccctccccatacaaactcaaagtcccctgggccccaattcagagttatgttttttttggcacatactagaaaggcagtgcctcagcccttccctgaatccatggaggtgttctgtttggggctttttagactgctgctgctcagctggttgcttgaactgacagtaggccagcctgttctctgccattccctagtcatcctgtgcctcaccacagcttgcttagagcaagccttttctcagaccttaggcacagcctctcctctttacctgatcaatgttaaatgtaagcacccctgatcccaggacataaggaaagatgcccaattgtacttttgttctatagcctgtgaaatggctagttgatcatttttccacaaagaattaggtgttaagagttttccttcaggctttacttaggagaatggactaagctgaaggtgtacttcaccagcaagagtcaactctagaattcaggatgttccttctattgttttcttagccatctgtcaggaaatgtaactttggttttatttttggcttattccaaggggtaagccagaaaatagaaatgattatttctgattaatagcagaaactttttcaatctcaaatatataaggtgtctgctcttttaaaagctctaagctaagtcaagagctaggaactgttgatacaaataaaagtttttgaaggg

SEQ ID NO: 11377 - protein, 518 aa, Homo sapiens
MESPEEPGASMDENYFVNYTFKDRSHSGRVAQGIMKLCLEEELFADVTISVEGREFQLHRLVLSAQSCFFRSMFTSNLKEAHNRVIVLQDVSESVFQLLVDYIYHGTVKLRAEELQEIYEVSDMYQLTSLFEECSRFLARTVQVGNCLQVMWLADRHSDPELYTAAKHCAKTHLAQLQNTEEFLHLPHRLLTDITSDGVPCSQNPTEAIEAWINFNKEEREAFAESLRTSLKEIGENVHIYLIGKESSRTHSLGVSLHCAEDDSISVSGQNSLCHQITAACKHGGDLYVVGGSIPRRMWKCNNATVDWEWCAPLPRDRLQHTLVSVPGKDAIYSLGGKTLQDTLSNAVIYYRVGDNVWTETTQLEVAVSGAAGANLNGIIYLLGGEENDLDFFTKPSRLIQCFDTETDKCHVKPYVLPFAGRMHAAVHKDLVFIVAEGDSLVRYNPLLDSFTRLCLPEAWSSAPSLWKIASCNGSIYVFRDRYKKGDANTYKLDPATSAITVTRGIKVLLTNLQFVLA

SEQ ID NO: 11378 - DNA, 1890 bp, Homo sapiens
  CDS (24)..(1670)
ttgtgcttccttctacagccaatatgaaaaggcctaagttaaagaaagcaagtaaacgcatgacctgccataagcggtataaaatccaaaaaaaggttcgagaacatcatcgaaaattaagaaaggaggctaaaaagcggggtcacaagaagcctaggaaagacccaggagttccaaacagtgctccctttaaggaggctcttcttagggaagctgagctaaggaaacagaggcttgaagaactaaaacagcagcagaaacttgacaggcagaaggaactagaaaagaaaagaaaacttgaaactaatcctgatattaagccatcaaatgtggaacctatggaaaaggagtttgggctttgcaaaactgagaacaaagccaagtcgggcaaacagaattcaaagaagctgtactgccaagaacttaaaaaggtgattgaagcctccgatgttgtcctagaggtgttggatgccagagatcctcttggttgcagatgtcctcaggtagaagaggccattgtccagagtggacagaaaaagctggtacttatattaaataaatcagatctggtaccaaaggagaatttggagagctggctaaattatttgaagaaagaattgccaacagtggtgttcagagcctcaacaaaaccaaaggataaagggaagataaccaagcgtgtgaaggcaaagaagaatgctgctccattcagaagtgaagtctgctttgggaaagagggcctttggaaacttcttggaggttttcaggaaacttgcagcaaagccattcgggttggagtaattggtttcccaaatgtggggaaaagcagcattatcaatagcttaaaacaagaacagatgtgtaatgttggtgtatccatggggcttacaaggagcatgcaagttgtccccttggacaaacagatcacaatcatagatagtccgagcttcatcgtatctccacttaattcctcctctgcgcttgctctgcgaagtccagcaagtattgaagtagtaaaaccgatggaggctgccagtgccatcctttcccaggctgatgctcgacaggtagtactgaaatatactgtcccaggctacaggaattctctggaattttttactgtgcttgctcagagaagaggtatgcaccaaaaaggtggaatcccaaatgttgaaggtgctgccaaactgctgtggtctgagtggacaggtgcctcattagcttactattgccatccccctacatcttggactcctcctccatattttaatgagagtattgtggtagacatgaaaagcggcttcaatctggaagaactggaaaagaacaatgcacagagcataagagccatcaagggccctcatttggccaatagcatccttttccagtcttccggtctgacaaatggaatgatagaagaaaaggacatacatgaagaattgccaaaacggaaagaaaggaagcaggaggagagggaggatgacaaagacagtgaccaggaaactgttgatgaagaagttgatgaaaacagctcaggcatgtttgctgcagaagagacaggggaggcactgtctgaggagactacagcaggtgaacagtctacaaggtcttttatcttggataaaatcattgaagaggatgatgcttatgacttcagtacagattatgtgtaacagaacaatggctttttatgattttttttttaacattttaagcagactgctaaactgttctctgtataagttatggtatgcatgagctgtgtaaattttgtgaatatgtattatattaaaaccaggcaacttggaatccctaaattctgtaaaaagacaattcatctcattgtgagtggaagtagttatctggaataaaaaaagaagatacctattg

SEQ ID NO: 11379 - protein, 549 aa, Homo sapiens [sequence omitted]

SEQ ID NO: 11380 - DNA, 2593 bp, Homo sapiens
  CDS (1691)..(2524)
agcttctctcgccaggcgtcctcgtggaaggttcgtgtgctagttagatgggcgccaggggtcgccggcgggaagcatggaggggtctttgggggcctttgggaacatggagtcctattctgttccgcctggggcctcggtggcggcttgcacgccccgagatgacggccgctgccctaggcagggccggcgggcgattgcgcgtgtcctgctcctcttaggcccgggaccgcgggatgggtgtcggcgtgaccaggcctgagctccctgtctctcctcagtgacatcgtctttaaaccctgcgtggcaatccctgacgcaccgccgtgatgcccagggaagacagggcgacctggaagtccaactacttccttaagatcatcgtaagtgcagggtgggtcgcctctgctcttcatgttgccccagcgcaaatagggacagtcagctgctatgtgctgagggtctactcacaccggctactgaattaggccatttttgggaaaatactgtttagttaacaatttcctgagataggtcccttctgttgcagataaacgggctcaggcaagttaagtgggtcctaagatgacagcattcgtatccaggtctgtctggcttctaaaagagcgcgctttatactttttttttttttaacggagtctcgctctgttgtccaggctggagtgcagtggcttgatcttggcttactgcaacctccgcttcccaggttcaagcgattctcctgcttcagcctcccgagtagctgggattacaggggcgcgacaccacacccagctaatttttgtattttcaatagagacagggattcaccatgttggccaggatggtctcgatctcttgacttcatgatccaccttcctcggcctccctaagtgctaggattacaggtgtgagccaccgcgcccggccgcacattacagttttactccatttttgagaaggtctgaggtcaggaatgactcattgtaaggaagcaagctgttgcatatttaggacctgtcagccaagaaacttaagtgtccaatgacttttggatggcctttgaggtgggtctcccttgcccagaaatgctgactgtactgcgcttaagcaattaggcagcattgtagagcatagcttgtattacattttcccacacttagaaggttttcagacacaaaacccaaaggaattgtgtaacaatccggataaacacgcctagattgtttttacaaataataatgttgctatatttgcttaacgtggtgcttttaatgctgtgaatctagccctcctcttgaccaacttacttggaacattccttttttatcctgttaaccattttagtgaatcagaagcatgcctggtaattgggaaaaattaaaaactaagtaaaaaaagaaaaaactccttgattgaatgtagaaacctaattttcagcattcatacccagctagccaatcatccagtttggcagtgttacaacgtagctcccaatctccctctgacttcaaaagcttagaagaaagggagtgggatggaaacaaattgtggggttcagtttcttctggcattttttccctctctcttcctgttaaacttggctcctctggcttgttttttgtagcaactattggatgattatccgaaatgtttcattgtgggagcagacaatgtgggctccaagcagatgcagcagatccgcatgtcccttcgcgggaaggctgtggtgctgatgggcaagaacaccatgatgcgcaaggccatccgagggcacctggaaaacaacccagctctggagaaactgctgcctcatatccgggggaatgtgggctttgtgttcaccaaggaggacctcactgagatcagggacatgttgctggccaataaggtgccagctgctgcccgtgctggtgccattgccccatgtgaagtcactgtgccagcccagaacactggtctcgggcccgagaagacctcctttttccaggctttaggtatcaccactaaaatctccaggggcaccattgaaatcctgagtgatgtgcagctgatcaagactggagacaaagtgggagccagcgaagccacgctgctgaacatgctcaacatctcccccttctcctttgggctggtcatccagcaggtgttcgacaatggcagcatctacaaccctgaagtgcttgatatcacagaggaaactctgcattctcgcttcctggagggtgtccgcaatgttgccagtgtctgtctgcagattggctacccaactgttgcatcagtaccccattctatcatcaacgggtacaaacgagtcctggccttgtctgtggagacggattacaccttcccacttgctgaaaaggtcaaggccttcttggctgatccatctgcctttgtggctgctgcccctgtggctgctgccaccacagctgctcctgctgctgctgcagccccagccaaggttgaagccaaggaagagtcggaggagtcggacgaggatatgggatttggtctctttgactaatcaccaaaaagcaaccaacttagccagttttatttgcaaaacaaggaaataaaggcttacttcttt

SEQ ID NO: 11381 - protein, 278 aa, Homo sapiens
MQQIRMSLRGKAVVLMGKNTMMRKAIRGHLENNPALEKLLPHIRGNVGFVFTKEDLTEIRDMLLANKVPAAARAGAIAPCEVTVPAQNTGLGPEKTSFFQALGITTKISRGTIEILSDVQLIKTGDKVGASEATLLNMLNISPFSFGLVIQQVFDNGSIYNPEVLDITEETLHSRFLEGVRNVASVCLQIGYPTVASVPHSIINGYKRVLALSVETDYTFPLAEKVKAFLADPSAFVAAAPVAAATTAAPAAAAAPAKVEAKEESEESDEDMGFGLFD

SEQ ID NO: 11382 - DNA, 1893 bp, Homo sapiens
  CDS (56)..(1663)
agaggaggatgacgaggacgaggatgaggatgaagatgaaattgaaccagcagcgatgaaagcagcagctgctgcccctgcctcagaggatgaggacgatgaggatgacgaagatgatgaggatgacgatgacgatgaggaagatgactctgaagaagaagctatggagactacaccagccaaaggaaagaaagctgcaaaagttgttcctgtgaaagccaagaacgtggctgaggatgaagatgaagaagaggatgatgaggacgaggatgacgacgacgacgaagatgatgaagatgatgatgatgaagatgatgaggaggaggaagaagaggaggaggaagagcctgtcaaagaagcacctggaaaacgaaagaaggaaatggccaaacagaaagcagctcctgaagccaagaaacagaaagtggaaggcacagaaccgactacggctttcaatctctttgttggaaacctaaactttaacaaatctgctcctgaattaaaaactggtatcagcgatgtttttgctaaaaatgatcttgctgttgtggatgtcagaattggtatgactaggaaatttggttatgtggattttgaatctgctgaagacctggagaaagcgttggaactcactggtttgaaagtctttggcaatgaaattaaactagagaaaccaaaaggaaaggacagtaagaaagagcgagatgcgagaacacttttggctaaaaatctcccttacaaagtcactcaggatgaattgaaagaagtgtttgaagatgctgcggagatcagattagtcagcaaggatgggaaaagtaaagggattgcttatattgaatttaagacagaagctgatgcagagaaaacctttgaagaaaagcagggaacagagatcgatgggcgatctatttccctgtactatactggagagaaaggtcaaaatcaagactatagaggtggaaagaatagcacttggagtggtgaatcaaaaactctggttttaagcaacctctcctacagtgcaacagaagaaactcttcaggaagtatttgagaaagcaacttttatcaaagtaccccagaaccaaaatggcaaatctaaagggtatgcatttatagagtttgcttcattcgaagacgctaaagaagctttaaattcctgtaataaaagggaaattgagggcagagcaatcaggctggagttgcaaggacccaggggatcacctaatgccagaagccagccatccaaaactctgtttgtcaaaggcctgtctgaggataccactgaagagacattaaaggagtcatttgacggctccgttcgggcaaggatagttactgaccgggaaactgggtcctccaaagggtttggttttgtagacttcaacagtgaggaggatgccaaagctgccaaggaggccatggaagacggtgaaattgatggaaataaagttaccttggactgggccaaacctaagggtgaaggtggcttcgggggtcgtggtggaggcagaggcggctttggaggacgaggtggtggtagaggaggccgaggaggatttggtggcagaggccggggaggctttggagggcgaggaggcttccgaggaggcagaggaggaggaggtgaccacaagccacaaggaaagaagacgaagtttgaatagcttctgtccctctgctttcccttttccatttgaaagaaaggactctggggtttttactgttacctgatcaatgacagagccttctgaggacattccaagacagtatacagtcctgtggtctccttggaaatccgtctagttaacatttcaagggcaataccgtgttggttttgactggatattcatataaactttttaaagagttgagtgatagagctaaaaaaaag

SEQ ID NO: 11383 - protein, 536 aa, Homo sapiens [sequence omitted]

SEQ ID NO: 11384 - DNA, 1516 bp, Homo sapiens
  CDS (38)..(811)
aaaaaaaagaatagtagaggatcctgaatccctaaacatgaaaaacattctatctattcttcatacttactcttctctcaatcatgtctacaaatgccagaacaaagaacagttcgtggaagttatggctagtgctctgactggttatcttcacactatttcttctgaaaacttattggatgcagtatattcattttgcttgatgaattactttcccctggctccttttaatcagcttctgcaaaaagacatcatcagtgagctgctgacatcagatgacatgaagaatgcttacaagctgcatactttggatacttgtctaaaacttgatgatactgtctatctgagggacatagccttgtcactcccacagctgccgcgggagctgccatcgtcacatacaaatgcaaaggtggcagaggtgctgagcagccttctgggaggtgaaggacacttctcaaaggatgtgcacttgccacacaattatcatattgattttgaaatcagaatggacactaacaggaatcaagtgctaccactttctgatgtggatacaacttctgctacagatattcaaagagtagctgtgctatgtgtttccagatctgcttattgtttgggttcaagccaccccagaggattccttgctatgaaaatgcggcatttgaatgcaatgggttttcatgtgatcttggtcaataactgggagatggacaaactagagatggaagatgcagtcacatttttgaagactaaaatctattcagtagaagctcttcctgttgctgctgtaaatgtgcaaagcacacaataaagtgaaaatcaaccttttcatattaggagacatgcatttgtaaaaattaataaagatgacaagtcagttgtcaatggaattgagctatctgctaagacaaaaaatgttacctcagttcactattaaaattaattttaggagtggaagaaatgttgttactgccatttaaaaatatgctgagaaaattccagaagggttatttttccaaccacacctattccctctagtgcccagatatttgatttgtgagctgtacgtttcaccttttcatctttgatctactaaaaactggtttcttagttgtgaggtgtcacaggcaggttgatgtgggtagtagtccttgtctttggaatctgaatatttatactcctgctctaagctgttctaagacttggggttatgcctttaaatcattttcaagcattggccaaataataattggacaaagttctaaagttgtcaagtgtgtaagaattagtgaggtagctgttgaaaatgagtgaggatggtatttgtatttgtaataagcactgcaggtagagatatttcatgggttataataagagaaacacagatgagatgtagatggtaaggagtcttactgttgttggggtccttcctttctctttcttttttcccccttacccctcccacaatttcatgaagtctttgaaattaaatatatagctgaattgtgttgtg

SEQ ID NO: 11385 - protein, 258 aa, Homo sapiens
MKNILSILHTYSSLNHVYKCQNKEQFVEVMASALTGYLHTISSENLLDAVYSFCLMNYFPLAPFNQLLQKDIISELLTSDDMKNAYKLHTLDTCLKLDDTVYLRDIALSLPQLPRELPSSHTNAKVAEVLSSLLGGEGHFSKDVHLPHNYHIDFEIRMDTNRNQVLPLSDVDTTSATDIQRVAVLCVSRSAYCLGSSHPRGFLAMKMRHLNAMGFHVILVNNWEMDKLEMEDAVTFLKTKIYSVEALPVAAVNVQSTQ

SEQ ID NO: 11386 - DNA, 1608 bp, Homo sapiens
  CDS (140)..(1252)
gagtgcaagatcgttttctcagtggtggtggaagttgcctcatcgcaggcagatgttggggctttgtccgaacagctcccctctgccagcttctgtagataagggttaaaaactaatatttatatgacagaagaaaaagatgtcattccgtaaagtaaacatcatcatcttggtcctggctgttgctctcttcttactggttttgcaccataacttcctcagcttgagcagtttgttaaggaatgaggttacagattcaggaatcgtagggcctcaacctatagactttgtcccaaatgctctccgacatgcagtagatgggagacaagaggagattcctgtggtcatcgctgcatctgaagacaggcttgggggggccattgcagctataaacagcattcagcacaacactcgctccaatgtgattttctacattgttactctcaacaatacagcagaccatctccggtcctggctcaacagtgattccctgaaaagcatcagatacaaaattgtcaattttgaccctaaacttttggaaggaaaagtaaaggaggatcctgaccagggggaatccatgaaacctttaacctttgcaaggttctacttgccaattctggttcccagcgcaaagaaggccatatacatggatgatgatgtaattgtgcaaggtgatattcttgccctttacaatacagcactgaagccaggacatgcagctgcattttcagaagattgtgattcagcctctactaaagttgtcatccgtggagcaggaaaccagtacaattacattggctatcttgactataaaaaggaaagaattcgtaagctttccatgaaagccagcacttgctcatttaatcctggagtttttgttgcaaacctgacggaatggaaacgacagaatataactaaccaactggaaaaatggatgaaactcaatgtagaagagggactgtatagcagaaccctggctggtagcatcacaacacctcctctgcttatcgtattttatcaacagcactctaccatcgatcctatgtggaatgtccgccaccttggttccagtgctggaaaacgatattcacctcagtttgtaaaggctgccaagttactccattggaatggacatttgaagccatggggaaggactgcttcatatactgatgtttgggaaaaatggtatattccagacccaacaggcaaattcaacctaatccgaagatataccgagatctcaaacataaagtgaaacagaatttgaactgtaagcaagcatttctcaggaagtcctggaagatagcatgcgtgggaagtaacagttgctaggcttcaatgcctatcggtagcaagccatggaaaaagatgtgtcagctaggtaaagatgacaaactgccctgtctggcagtcagcttcccagacagactatagactataaatatgtctccatctgccttaccaagtgttttcttactacaatgctgaatgactggaaagaagaactgatatggctagttcagctagctggtacagataattcaaaactgctgttggttttaattttgtaacctgtggcctgatctgtaaataaaacttacatttttc

SEQ ID NO: 11387 - protein, 371 aa, Homo sapiens
MSFRKVNIIILVLAVALFLLVLHHNFLSLSSLLRNEVTDSGIVGPQPIDFVPNALRHAVDGRQEEIPVVIAASEDRLGGAIAAINSIQHNTRSNVIFYIVTLNNTADHLRSWLNSDSLKSIRYKIVNFDPKLLEGKVKEDPDQGESMKPLTFARFYLPILVPSAKKAIYMDDDVIVQGDILALYNTALKPGHAAAFSEDCDSASTKVVIRGAGNQYNYIGYLDYKKERIRKLSMKASTCSFNPGVFVANLTEWKRQNITNQLEKWMKLNVEEGLYSRTLAGSITTPPLLIVFYQQHSTIDPMWNVRHLGSSAGKRYSPQFVKAAKLLHWNGHLKPWGRTASYTDVWEKWYIPDPTGKFNLIRRYTEISNIK

SEQ ID NO: 11388 - DNA, 2193 bp, Homo sapiens
  CDS (11)..(1753)
gggcgccatcatggacgaggactactacgggagcgcggccgagtggggcgacgaggctgacggcggccagcaggaggatgattctggagaaggagaggatgatgcggaggttcagcaagaatgcctgcataaattttccacccgggattatatcatggaaccctccatcttcaacactctgaagaggtattttcaggcaggagggtctccagagaatgttatccagctcttatctgaaaactacaccgctgtggcccagactgtgaacctgctggccgagtggctcattcagacaggtgttgagccagtgcaggttcaggaaactgtggaagatcacttgaagagtttgctgatcaaacattttgacccccgcaaagcagattctatttttactgaagaaggagagaccccagcgtggctggaacagatgattgcacataccacgtggcgggaccttttttataaactggctgaagcccatccagactgtttgatgctgaacttcaccgttaagcttatttctgacgcagggtaccagggggagatcaccagtgtgtccacagcatgccagcagctagaagtgttctcgagagtgctccggacctctctagctacaattttagatggaggagaagaaaaccttgaaaaaaatctccctgagtttgccaagatggtgtgccacggggagcacacgtacctgtttgcccaggccatgatgtccgtgctggcccaggaggagcaggggggctccgctgtgcgcaggatcgcccaggaagtgcagcgctttgcccaggagaaaggtcatgacgccagtcagatcacactagccctgggcacagctgcctcctaccccagggcctgccaggctctcggggccatgctgtccaaaggagccctgaaccctgctgacatcaccgtcctgttcaagatgttcacaagcatggaccctcctccggttgaacttatccgcgttccagccttcctggacctgttcatgcagtcactctttaaaccaggggctcggatcaaccaggaccacaagcacaaatacatccacatcttggcgtacgcagcaagcgtggttgagacctggaagaagaacaagcgagtgagcatcaataaagatgagctgaagtcaacgtcaaaagctgtcgaaaccgttcacaatttgtgttgcaacgagaacaaaggggcctctgaactagtggcagaattgagcacactttatcagtgtattaggtttccagtggtagcaatgggtgtgctgaagagggtggattggactgtatcagaaccaaggtactttcagctgcagactgaccatacccctgtccacctggcgttgctggatgagatcagcacctgccaccagctcctgcacccccaggtcctgcagctgcttgttaagctttttgagactgagcactcccagctggacgtgatggagcagcttgagttgaagaagacactgccggacaggatggttcacctgctgagtcgaggttatgtacttcctgttgtcagttacatccgaaagtgtctggagaagctggacactgacatttcactcattcgctattttgtcactgaggtgctggacgtcattgctcctccttatacctctgacttcgtgcaacttttcctccccatcctggagaatgacagcatcgcaggtaccatcaaaacggaaggcgagcatgtccctgtgacggagtttatagctcactgcaaatctaacttcatcatggtgaactaatttagagcatcctccagagctgaagcagaacattccagaacccgttgtggaaaaaccctttcaagaagctgttttaagaggctcgggcagcgtcttgaaaatgggcaccgctgggaggaggtggatgacttctttacaaaggaaaatggtagcagcttcagtgagaaactgcccttacaaacagtcccttctctgctgtcaatccaatactgctcccaaatcctgttttcagtgttcatttccctcaaggcaggcgctgggctcccacgacccctcaggacagatctggccgtcagccgcgggccgctgggaactccactcggggaactcctttccaagctgacctcagttttctcacaagaacccagttagctgatgttttattgtaattgtcttaatttgctaagaacaagtaataagtaaatttttaaaaagcc

SEQ ID NO: 11389 - protein, 581 aa, Homo sapiens [sequence omitted]

SEQ ID NO: 11390 - DNA, 1934 bp, Homo sapiens
  CDS (118)..(1560)
ggaccaagatggcggcgccctgtgagggacaagcgtttgccgtaggggttgaaaagaattggggtgcagtagttcgctccccagaagggaccccccagaaaatccggcagctgatagatgaggggattgccccggaagagggaggcgtggacgcaaccacacccgcttgaggctctctatgaatctctgagagtcttagagaaggacacgtctgccacatcccagtcagttaatggatcaccccaagcggaacaaccttcattggaatctacaagcaaagaagccttctttagcagagtggaaacattttcttctttgaaatgggcaggtaagccctttgagctgtctccactcgtctgtgcaaaatatggctgggtcacagtggaatgtgatatgctcaagtgctctagctgtcaagcttttctctgtgccagtttacaaccagcttttgactttgacagatataagcaacgatgtgctgagctgaagaaagccttgtgtactgcccatgagaagttctgtttctggccagacagcccatccccagaccgatttgggatgttgcccctggatgagcctgctattcttgttagtgaattcctagatcgttttcaaagcctttgtcacttggacctccagcttccttccctaaggccggaggacttgaaaactatgtgcttgacagaggacaagatcagtcttctcctacacttgcttgaagatgaacttgatcaccgaactgatgagagaaaaactacaatcaaattaggctcagacatccaagtccacgtcactgcctgtattctctctgtgtgtggctgggcgtgtagttcctctttggaatccatgcagctctccctgataacatgttcgcaatgtatgaggaaggtggggctctggggcttccagcagattgaatcgtccatgactgacctggatgcatcctttggcctgaccagctccccaatcccaggccttgaggggcgaccagagcgcttacctctggtgcctgaatctcctcggaggatgatgacccggagccaggatgccactttctccccaggctcagagcaggctgaaaagagccctggtcccattgtctctcgaactcggagctgggactcttccagtcctgttgaccgtcctgagccagaggctgctagccccaccaccagaactcgcccagtgacccgaagcatgggaacaggagacacccctggcctggaggtaccatctagccctctgcggaaagccaagcgagctcgcctctgctcctccagcagttcggacacatcttcccgaagcttctttgatcccacctctcagcatagagactggtgcccttgggtgaatatcacacttggcaaagaaagcagggagaatggtggaactgaaccagatgccagcgccccagcagagccaggctggaaagcagtgctgaccatcctcttggcgcacaaacagtctagccagccagctgaaacggactccatgagtctctctgagaaatcaaggaaagtattccgaatatttcggcagtgggaatctctgtgctcatgctgaagatactccagcgccttcctggagatagctggaatgagagtgactttttgaaaaattaaggctgagttcctttcggtcagctgacactaagtttttcctgttctgggttaatcataaggagccccctgccatagcaaaggcagtgagtgtcaactatctgcatctggctgagagagacccgtttcctttcagggatgtggacagggtaagggcagcaagcatggttctgttaaaggagtgtggggttaacagactagaaggaagactaaggacctgaccacccatttcagcatcttcaatgtggagcagtgttctgaggactcttctatcctaggactatgacagtgtgtattaataaaatatttgctaag

SEQ ID NO: 11391 - protein, 481 aa, Homo sapiens
MRGLPRKREAWTQPHPLEALYESLRVLEKDTSATSQSVNGSPQAEQPSLESTSKEAFFSRVETFSSLKWAGKPFELSPLVCAKYGWVTVECDMLKCSSCQAFLCASLQPAFDFDRYKQRCAELKKALCTAHEKFCFWPDSPSPDRFGMLPLDEPAILVSEFLDRFQSLCHLDLQLPSLRPEDLKTMCLTEDKISLLLHLLEDELDHRTDERKTTIKLGSDIQVHVTACILSVCGWACSSSLESMQLSLITCSQCMRKVGLWGFQQIESSMTDLDASFGLTSSPIPGLEGRPERLPLVPESPRRMMTRSQDATFSPGSEQAEKSPGPIVSRTRSWDSSSPVDRPEPEAASPTTRTRPVTRSMGTGDTPGLEVPSSPLRKAKRARLCSSSSSDTSSRSFFDPTSQHRDWCPWVNITLGKESRENGGTEPDASAPAEPGWKAVLTILLAHKQSSQPAETDSMSLSEKSRKVFRIFRQWESLCSC

SEQ ID NO: 11392 - DNA, 1787 bp, Homo sapiens
  CDS (125)..(949)
cggaggtgacggagcggcggccccgcccggtgcgctggaggtcgaagcttccaggtagcggcccgcagagcctgacccaggctctgggcatcctgagcccaagtcccccacactcagtgcagtgatgagtgcggaagtgaaggtgacagggcagaaccaggagcaatttctgctcctagccaagtcggccaagggggcagcgctggccacactcatccatcaggtgctggaggcccctggtgtctacgtgtttggagaactgctggacatgcccaatgttagagagctggctgagagtgactttgcctctaccttccggctgctcacagtgtttgcttatgggacatacgctgactacttagctgaagcccggaatcttcctccactaacagaggctcagaagaataagcttcgacacctctcagttgtcaccctggctgctaaagtaaagtgtatcccatatgcagtgttgctggaggctcttgccctgcgtaatgtgcggcagctggaagaccttgtgattgaggctgtgtatgctgacgtgcttcgtggctccctggaccagcgcaaccagcggctcgaggttgactacagcatcgggcgggacatccagcgccaggacctcagtgccattgcccgaaccctgcaggaatggtgtgtgggctgtgaggtcgtgctgtcaggcattgaggagcaggtgagccgtgccaaccaacacaaggagcagcagctgggcctgaagcagcagattgagagtgaggttgccaaccttaaagaaaccattaaagttacgacggcagcagcagccgcagccacatctcaggaccctgagcaacacttgactgagctgagggaaccagctcctggcaccaaccagcgccagcccagcaagaaagcctcaaagggcaaggggctccgagggagcgccaagatttggtccaagtcgaattgaaaggactgtcgtttcctccctggggatgtggggtcccagctgcctgcctgcctcttaggagtcctcagagagccttctgtgcccctggccagctgataatcctaggttcatgacccttcacctcccctaaccccaaacatagatcacaccttctctagggaggaggcaaatgtaggtcatgtttttgttggtactttctgttttttgtgacttcatgtgttccattgctccccgctgccatgctctctcccttgtttccttaagagctcagcatctgtccctgttcattacatgtcattgagtaggtgggtagccctgatgggggtcgctctgtctggagcataacccacaggcgttttttctgccaccccatccctgcatgcctgatccccagttcctataccctacccctgacctattgagcagcctctgaagagccatagggcccccacctttactcacaccctgagaattctgggagctagtctgccatgccaggagtcactggacatgttcatcctagaatcctgtcacactacagtcatttcttttcctctctctggcccttgggtcctgggaatgctgctgcttcaaccccagagcctaagaatggcagccgtttcttaacatgttgagagatgattctttcttggccctggccatctcgggaagcttgatggcaatcctggaagggtttaatctccttttgtgagtttggtggggaagggaagggtatatagattgtattaaaaaaaaaaaaggtatatatgcatatatctatatataatatgacgcagaaataaatctatgagaaatctatctacaaactaccctg

SEQ ID NO: 11393 - protein, 275 aa, Homo sapiens [sequence omitted]

SEQ ID NO: 11394 - DNA, 1758 bp, Homo sapiens
  CDS (150)..(1337)
cgttccgccgctgtcgccgccgtcgtgcgtgccgctcggcggaggggacgggcctgcgttctctcctccttcctccccgcctccagctgccggcaggacctttctctcgctgccgctgggaccccgtgtcatcgcccaggccgagcacgatgccccctaaaaagggaggtgatggaattaaaccacccccaatcattggaaggtttggaacctcactgaaaattggtattgttggattgccaaatgctgggaaatctactttcttcaatgtgttaaccaatagtcaggcttcagcagaaaacttcccgttctgcactattgatcctaatgagagcagagtacctgtgccagatgaaaggtttgactttctttgtcaataccacaaaccagcaagcaaaattcctgcctttctaaatgtggtggatattgctggccttgtgaaaggagctcacaatgggcagggcctggggaatgcttttttatctcatattagtgcctgtgatggcatctttcatctaacacgtgcttttgaagatgatgatatcacgcacgttgaaggaagtgtagatcctattcgagatatagaaataatacatgaagagcttcagcttaaagatgaggaaatgattgggcccattatagataaactagaaaaggtggctgtgagaggaggagataaaaaactaaaacctgaatatgatatcatgtgcaaagtaaaatcctgggttatagatcaaaagaaacctgttcgcttctatcatgattggaatgacaaagagattgaagtgttgaataaacacttatttttaacttcaaaaccaatggtctacttggttaatctttctgaaaaagactacattagaaagaaaaacaaatggttgataaaaattaaagagtgggtggacaagtatgacccaggtgctttggtcattccttttagtggggccttggaactcaagttgcaagaattgagtgctgaggagagacagaagtatctggaagcgaacatgacacaaagtgctttgccaaagatcattaaggctgggtttgcagcactccaactagaatactttttcactgcaggcccagatgaagtgcgtgcatggaccatcaggaaagggactaaggctcctcaggctgcaggaaagattcacacagattttgaaaagggattcattatggctgaagtaatgaaatacgaagattttaaagaggaaggttctgaaaatgcagtcaaggctgctggaaagtacagacaacaaggcagaaattatattgttgaagatggagatattatcttcttcaaatttaacacacctcaacaaccgaagaagaaataaaatttagttattgctcagataaacatacaacttccaaaaggcatctgatttttaaaaaattaaaatttctgaaaaccaatgcgacaaataaagttggggagatgggaatctttgacaaacaaattatttttatttgttttaaaattaaaatactgtgtacccccccccccccatgaaatgcaggttcactaaatgtgaacagctttgcttttcacgtgattaagaccctactccaaattgtagaagcttttcaggaaccatattactctcatgatacttcattaatctccatcatgtatgccaagcctgacacatttgacagtgaggacaatgtggcttgctcctttttgaatctacagataatgcatgttttacagtactccagatgtctacactcaataaaacatttgacaaaacc

SEQ ID NO: 11395 - protein, 396 aa, Homo sapiens [sequence omitted]

SEQ ID NO: 11396 - DNA, 1407 bp, Homo sapiens
atttaccaatgactctgctccgtttttggagcagactgttttaagttgctcaggagcctgatggaaccatgaaccgagactcttctctgtttcctgccaagacctcatctgcactaatgccttctccctgaccttgacacttccccctttagctataaaagcacttaccagccgaacgtggaacagtatcacaaaagattccatctcccaacgatttcagaactctgagctcagagagactccagattttaaaaaataatttgagtgcttggaaactattagctttttaagttccttccaaatatgttagtacctaccctttactttttccccaagaccatctcagggtggagcattctgtctaagagaagaaagataaggaggctcccacccacctctcccaagagcagacattaaacatctttgtgctttgaagagagtgaattttggatagtcttgtgatttcagactaacttccagaattatactttaacccctcccagatatggtccgcctttggcattgtgtgtacatctgcagttttgcatggtgggttgttaatatttcaaatgtgtggtttatgaatacgtctgtataatcggcttctggagtgaaacagcaaaccccaaatcttcaaagttggaaggaactttaaaaatcatccggtccaatctctttcctctttctgccacctcccaaggcagaaatcccctcttcagcttcttttgtaggtgggaatccagcctctgttagatatgtccagagatggaaactcactcccctacaaaagatggagcttaatggagaaattgcaactttcattaaaaaacaaattcagatgaaatatcagtaactgtcttggacagtgctgaaatcaggtggttaaacgggtaaacaaaatatactgtattttgagaaatggcacaaaaacaggcagtcatctttaagggctatgcctaggcaaactactaacatgcattgtgagaatgccgtgtatacctcacgtactgtgtactttgtacatatattttaccttttatacctatgttcgattttgttttgttttgttctggctttgaggcttgttttgttgtctgtgtctgtctgaataacctgcgtgtctaaaaccacgtgaaatgtgaatgattattggcaatattaccttgacagaatcatgggactttgagaagagggaggacagaggcctctgtcgcactaacgctctcgtggttgctcgactgttgtatctgtgatacattatccgactaaggactctgggctggcagggccttctgccgggaaagctagaaacactaggttcttcctgtacatacgtgtatatatgtgaacagtgagatggccgtttctgacttgtagagaaattttaataaacctggtttcgtaaat

SEQ ID NO: 11397 - DNA, 1364 bp, Homo sapiens
  CDS (219)..(1079)
acttccccgggagccggaagtcccgtctcacggttgccctggcagcgcgcgaggctggtgagtcggcagccctgtggcagccggcgggctggtttccatggttgcacgattaggaaccaccagctgctgcatcccatggccaggggtggcgtccaggtggcagagcagctaggaacgcaaggcctgaacctggggccagacaccctgctctcccggccatggtcaacgaccctccagtacctgccttactgtgggcccaggaggtgggccaagtcttggcaggccgtgcccgcaggctgctgctgcagtttggggtgctcttctgcaccatcctccttttgctctgggtgtctgtcttcctctatggctccttctactattcctatatgccgacagtcagccacctcagccctgtgcatttctactacaggaccgactgtgattcctccaccacctcactctgctccttccctgttgccaatgtctcgctgactaagggtggacgtgatcgggtgctgatgtatggacagccgtatcgtgttaccttagagcttgagctgccagagtcccctgtgaatcaagatttgggcatgttcttggtcaccatttcctgctacaccagaggtggccgaatcatctccacttcttcgcgttcggtgatgctgcattaccgctcagacctgctccagatgctggacacactggtcttctctagcctcctgctatttggctttgcagagcagaagcagctgctggaggtggaactctacgcagactatagagagaactcgtacgtgccgaccactggagcgatcattgagatccacagcaagcgcatccagctgtatggagcctacctccgcatccacgcgcacttcactgggctcaggttaacatccgaaaaagagacaattcccggaaggaagtccaacgaaggatctctgctcatcagccagggcctgaaggccaggaggagtcaactccgcaatcagatgttacagaggatggtgagagccctgaagatccctcagggacagagggtcagctgtccgaggaggagaaaccagatcagcagcccctgagcggagaagaggagctagagcctgaggccagtgatggttcaggctcctgggaagatgcagctttgctgacggaggccaacctgcctgctcctgctcctgcttctgcttctgcccctgtcctagagactctgggcagctctgaacctgctgggggtgctctccgacagcgccccacctgctctagttcctgaagaaaaggggcagactcctcacattccagcactttcccacctgactcctctcccctcgtttttccttcaataaactattttgtgtcagctt

SEQ ID NO: 11398 - protein, 287 aa, Homo sapiens
MVNDPPVPALLWAQEVGQVLAGRARRLLLQFGVLFCTILLLLWVSVFLYGSFYYSYMPTVSHLSPVHFYYRTDCDSSTTSLCSFPVANVSLTKGGRDRVLMYGQPYRVTLELELPESPVNQDLGMFLVTISCYTRGGRIISTSSRSVMLHYRSDLLQMLDTLVFSSLLLFGFAEQKQLLEVELYADYRENSYVPTTGAIIEIHSKRIQLYGAYLRIHAHFTGLRLTSEKETIPGRKSNEGSLLISQGLKARRSQLRNQMLQRMVRALKIPQGQRVSCPRRRNQISSP

SEQ ID NO: 11399 - DNA, 1853 bp, Homo sapiens
  CDS (30)..(1484)
tctctttctcctccacgtggggacgcaggatggcggcagcagtggcggacgaggcggtggcgcgcgatgtgcagcggttgctagtgcagttccaggatgagggcgggcagctgctgggttccccgttcgacgtgcccgtggacatcaccccggacaggctgcagctcgtgtgcaacgcgctactggcccaggaggatcccctgccactggctttctttgtccacgatgctgagatcgtctcctcactggggaagacgttggagtcccaggcagtggagacagagaaggtcctagacatcatctaccagccacaggctatcttcagagtccgggctgtgactcgctgcaccagctccttggagggtcacagtgaggcagtcatttctgtggccttcagccctacgggaaagtacctggccagtggctctggagacaccaccgtgcgcttctgggatctcagcacagagacaccacatttcacatgcaagggacacagacactgggtccttagtatatcctggtctccagatggcaagaagctggcctcaggctgcaagaatggccagattctcctctgggacccaagcacagggaagcaggtgggcaggaccctcgctggccacagcaagtggatcacaggcctgagctgggagcccctccatgcgaaccctgagtgccgctatgtggccagcagctccaaggatggcagtgtgcggatctgggacacaactgcaggccgctgtgagcgcatcctcaccgggcacacccagtcggtcacctgtctccggtggggaggggacgggcttctctactctgcctcccaggaccgcaccatcaaagtctggagagctcatgacggtgtgctgtgccggactctgcaaggccacggccactgggtgaacaccatggccctcagcactgactatgccctgcgcactggggcctttgaacctgctgaggcctcagttaatccccaagacctccaaggatccttgcaggagttgaaggagagggctctgagccgatacaacctcgtgcggggccagggtccagagaggctggtgtctggctccgacgacttcaccttattcctgtggtccccagcagaggacaaaaagcctctcactcggatgacaggacaccaagctctcatcaaccaggtgctcttctctcctgactcccgcatcgtggctagtgcctcctttgacaagtccatcaagctgtgggatggcaggacgggcaagtacctggcttccctacgcggccacgtggctgccgtgtaccagattgcgtggtcagctgacagtcggctcctggtcagcggcagcagtgacagcacactgaaggtgtgggatgtgaaggcccagaagctggccatggacctgcccggccacgcggatgaggtatatgctgttgactggagtccagatggccagagagtggcaagtggtgggaaggacaaatgcctccggatatggaggagatgagacggcccgaagttctctctgacccccacctcgactcggcctctgccagctgccttccctgccagagaacaaaggctgagatggcagtgcacacaccctccccaccagtggggacctgagaatgcgtgtggcctgctgtcctcgatagaccggaatggggttttcccacagatccccgcctgtggcacaccccagagccagaaatcgaaggtcacaggaagttgtcactgaacttggcccgtgtctgctactctgtaccttgctggtacagacaggggtggtgggcagccaggctctatgagtgggcccctagtgtcagctctgtacagggtcagatcccaggttctatgaccaaataagtaactt

SEQ ID NO: 11400 - protein, 485 aa, Homo sapiens
MAAAVADEAVARDVQRLLVQFQDEGGQLLGSPFDVPVDITPDRLQLVCNALLAQEDPLPLAFFVHDAEIVSSLGKTLESQAVETEKVLDIIYQPQAIFRVRAVTRCTSSLEGHSEAVISVAFSPTGKYLASGSGDTTVRFWDLSTETPHFTCKGHRHWVLSISWSPDGKKLASGCKNGQILLWDPSTGKQVGRTLAGHSKWITGLSWEPLHANPECRYVASSSKDGSVRIWDTTAGRCERILTGHTQSVTCLRWGGDGLLYSASQDRTIKVWRAHDGVLCRTLQGHGHWVNTMALSTDYALRTGAFEPAEASVNPQDLQGSLQELKERALSRYNLVRGQGPERLVSGSDDFTLFLWSPAEDKKPLTRMTGHQALINQVLFSPDSRIVASASFDKSIKLWDGRTGKYLASLRGHVAAVYQIAWSADSRLLVSGSSDSTLKVWDVKAQKLAMDLPGHADEVYAVDWSPDGQRVASGGKDKCLRIWRR

SEQ ID NO: 11401 - DNA, 771 bp, Homo sapiens
  CDS (82)..(708)
gcttccggcaccggccgaggtgcgggtcgcctccagagatcctgtgccttcaaaccctacgagtccatactttaaaacaaaatgaagaaagtaaggcttaaggaactagagagtcgcctgcaacaagtggatggatttgaaaagcccaagctacttctgggacagtatcctaccaggccgcacattgcagcatgtatgctctatacaatccataacacttatgatgacattgaaaataaagtcgttgcagatctaggatgtggttgtggagtacttagcatcggaactgcaatgttaggagcagggttgtgtgttggatttgacatagatgaagacgcattggaaatatttaataggaatgcagaagagtttgagttaacaaatattgacatggttcaatgtgatgtgtgcttattatctaacagaatgtccaagtcattcgatacagtaattatgaatcctccctttgggaccaaaaataataaagggacagatatggcttttctaaagactgctttggaaatggcaagaacagcagtatattccttacacaaatcctcaactagagaacatgttcaaaagaaagctgcagaatggaaaatcaagatagatattatagcagaacttcgatatgacctgccagcatcatacaagtttcacaaaaagaaatcagtggacattgaagtggacctaattcggttttccttttaaaagccccgcaaacaaaagtcgtttaaaacctatttaaaatgaataaaaaattggtttact

SEQ ID NO: 11402 - protein, 209 aa, Homo sapiens [sequence omitted]

SEQ ID NO: 11403 - DNA, 1754 bp, Homo sapiens
  CDS (19)..(723)
ggaaggtgcgtccgagccatggccgctgccaacccgtgggacccggcgtccgcgcctaacggcgctgggctagtgctaggccacttcatagcttcggggatggtcaatcaggagatgttaaacatgtctaagaaaacagtttcttgttttgtgaacttcaccagactacagcagatcacaaatattcaagctgaaatctaccagaaaaacctggaaattgaactcctgaaactagaaaaagatacagcagatgttgttcatcctttctttttggctcagaagtgtcatactctgcaaagcatgaataatcatttggaagcagtgctgaaagagaagagatcccttaggcaaagactgttgaaacccatgtgccaggaaaacttacctattgaagctgtttatcacagatatatggtacatttgctggagttggctgtgactttcattgagagattagaaacccaccttgaaacaattagaaatattcctcatttagctgcaaatctaaagaaaatgaaccaggctttagcaaagatggatatattggtgactgagacagaagaactggcagagaatatactcaagtggcgtaaacaacaaaacgaagtttcgtcttgtatccccaaaatattagctgaagaaagttatctttataaacatgatattataatgcctcctttaccttttacttctaaagttcatgtccaaactattaatgccaagtagtcatcaactttatttttgcttaattatgtgtagtcatatgaagtctatttctagttgactgtaacatgggtattaatagtctttgctgctggtaatactgaaagaacctgctttatattggagtatcaagatctcaggttcattaagaccaaactgacttttcctttgtttttcatatatttttattctacctttcagtaaaactagagaagctaaaaaagagccatgacaatttattaatataagtgaattaaccatttctcaggtgggaaattctctttttttaaaaatgtgtgtttatcgtctggtgtggtggctcacacctgtaatcctaacacttggggaggctgaggcgggcagatcacttaaacccaggagttcaagaccagcctgggtaacatggtgaaatcccatatctacaaaataaacaaaaaattagccgaccatggtggtgcatgcctgtagtcccagctattcgggaggctgaggtaagaggatcacctaagcctgtgaggtcatggttgcaatgagtcatgatcacgccactgcgctacagcctgggcgacacagtaagaccctgtctcaaaaaaaagaagtgtgtttctggccaggcacggtggctcacgcctgtaatcccagcactttgggaggcctaggtgggcagatcatgaggtcaggagttcgagaccagcctggccaacatggcgaaacacctgtctctactaaaaatacaaaaattaggccgggcgcagtggctcacacctgtaatcccaacactttgggaggccgacccagatgggtggatcacctgaggtcaggagtttgagaccagccttgacaacatggtgaaaccccatctctggtagaaatataaaaaattaaccgggcatggtggtggacgcctgtaatcccagctacttgggaggctgaggcagaataatcgcttgaacccaggaggcagaggttgcagtaagccaagatcgtgcctctgcactccaacctgggtgatggagcaagactccatctcc

SEQ ID NO: 11404 - protein, 235 aa, Homo sapiens
MAAANPWDPASAPNGAGLVLGHFIASGMVNQEMLNMSKKTVSCFVNFTRLQQITNIQAEIYQKNLEIELLKLEKDTADVVHPFFLAQKCHTLQSMNNHLEAVLKEKRSLRQRLLKPMCQENLPIEAVYHRYMVHLLELAVTFIERLETHLETIRNIPHLAANLKKMNQALAKMDILVTETEELAENILKWRKQQNEVSSCIPKILAEESYLYKHDIIMPPLPFTSKVHVQTINAK

SEQ ID NO: 11405 - DNA, 1978 bp, Homo sapiens
  CDS (200)..(745)
atcttctcaccgaagcttagtacagcgggttgaaacaatttctctaggtgagcacccctgtgacagaggagaacaagtaactctcttcctcttcaatgattgcctagagatagcaagaaaacggcacaaggttattggcacttttaggagtcctcatggccaaacccgacccccagcttctcttaagcatattcacctaatgcctctttctcagattaagaaggtattggacataagagagacagaagattgccataatgcttttgccttgcttgtgaggccaccaacagagcaggcaaatgtgctactcagtttccagatgacatcagatgaacttccaaaagaaaactggctaaagatgctgtgtcgacatgtagctaacaccatttgtaaagcagatgctgagaatcttatttatactgctgatccagaatcctttgaagtaaatacaaaagatatggacagtacattgagtagagcatcaagagcaataaaaaagacttcaaaaaaggttacaagagcattctctttctccaaaactccaaaaagagctcttcgaagggctcttatgacatcccacggctcagtggagggaagaagtccttccagcaatgataagcatgtaatgagtcgtctttctagcacatcatcattagcaggtatcccttctccctcccttgtcagccttccttccttctttgaaaggagaagtcatacgttaagtagatctacaactcatttgatatgaagcgttaccaaaatcttaaattatagaaatgtatagacacctcatactcaaataagaaactgacttaaatggtacttgtaattagcacttggtgaaagctggaaggaagataaataacactaaactatgctatttgatttttcttcttgaaagggtaaggtttacctgttacattttcaagttaattcatgtaaaaaatgatagtgattttgatgtaatttatctcttgtttgaatctgtcattcaaaggccaataatttaagttgctatcagctgatattagtagctttgcaaccctgatagagtaaataaattttatgggcgggtgccaaatactgctgtgaatctatttgtatagtatccatgaatgaatttatggaaatagatatttgtgcagctcaatttatgcagagattaaatgacatcataatactggatgaaaacttgcatagaattctgattaaatagtgggtctgtttcacatgtgcagtttgaagtatttaaataaccactcctttcacagtttattttcttctcaagcgttttcaagatctagcatgtggattttaaaagatttgccctcattaacaggaataacatttaaaggagattgtttcaaaatatttttgcaaattgagataaggacagaaagattgagaaacattgtatattttgcaaaaacaagatgtttgtagctgtttcagagagagtacggtatatttatggtaattttatccactagcaaatcttgatttagtttgatagtgtgtggaattttattttgaaggataagaccatgggaaaattgtggtaaagactgtttgtacccttcatgaaataattctgaagttgccatcagttttactaatcttctgtgaaatgcatagatatgcgcatgttcaactttttattgtggtcttataattaaatgtaaaattgaaaattcatttgctgtttcaaagtgtgatatctttcacaatagcctttttatagtcagtaattcagaataatcaagttcatatggataaatgcatttttatttcctatttctttagggagtgctacaaatgtttgtcacttaaatttcaagtttctgttttaatagttaactgactatagattgttttctatgccatgtatgtgccacttctgagagtagtaaatgactctttgctacattttaaaagcaattgtattagtaagaactttgtaaataaatacctaaaaccc

SEQ ID NO: 11406 - protein, 182 aa, Homo sapiens
MPLSQIKKVLDIRETEDCHNAFALLVRPPTEQANVLLSFQMTSDELPKENWLKMLCRHVANTICKADAENLIYTADPESFEVNTKDMDSTLSRASRAIKKTSKKVTRAFSFSKTPKRALRRALMTSHGSVEGRSPSSNDKHVMSRLSSTSSLAGIPSPSLVSLPSFFERRSHTLSRSTTHLI

SEQ ID NO: 11407 - DNA, 1973 bp, Homo sapiens
  CDS (148)..(1692)
gaaagactggagccgtttccttgtggctggagcgcttcccgtagcctcggggaaggagcaggatttagaggaccactagttggaccccatcctcgtgctggaggaacaggaacctctttcaggagctataaaagaaaggggggaatcatgtccacaattgcagctttctatggcggcaagtccatcctcatcacgggggccacaggctttctgggcaaagtgctaatggagaagctgtttcgcaccagcccagacctgaaagtcatttacatccttgtgaggcccaaggctggccagacactgcagcagagggttttccagatcctagacagtaagctatttgagaaagtcaaagaagtttgtccaaatgtgcatgagaagatcagagctatttatgcagatctcaatcagaatgactttgccatcagcaaagaggacatgcaggagcttctctcctgtacaaacataatatttcactgtgcagccactgtacgctttgacgacactctcagacatgctgtgcaacttaacgtcactgccacccggcagctcttgcttatggctagtcagatgccaaagctggaagcctttatacatatctctactgcctattcaaattgtaacctgaagcacatcgatgaagttacctatccgtgccctgtggagccaaaaaaaatcattgattcccttgagtggttagacgatgctattattgacgagattacacccaagctgatcagagattggcccaatatttatacctacaccaaggccttgggagaaatggtggtgcagcaagagagcaggaacctgaacattgccatcataaggccctccattgtgggagcaacttggcaggagcctttcccaggttgggttgataatataaatggacctaatggaatcattattgcgactgggaaagggtttcttcgggccataaaagctactccaatggctgtggcagacgtaattccagttgatacagtcgtcaatctcatgctagctgtaggatggtatactgcagttcacagacctaagtcaacattagtctaccacattacatctggtaacatgaatccctgcaattggcacaaaatgggagtccaagtcttggcaacctttgaaaaaatcccatttgagagacctttcaggaggccaaatgctaattttaccagcaacagcttcacatcacagtactggaatgcggtcagccaccgggcccctgccattatctatgactgctatctgcggctcactggaaggaagcccaggatgacaaagctcatgaatcggcttttaagaactgtttccatgttggagtatttcatcaaccggagttgggaatggagcacgtacaatacagaaatgctgatgtctgagctgagtcctgaagaccagagggtattcaactttgacgtgcgccagttgaactggttggaatacattgaaaattatgttttgggagttaaaaaatacttattgaaagaggatatggctgggatcccaaaggcaaagcaacgcttaaaaaggctccgaaatattcactacctctttaatactgccctcttccttatcgcctggcgccttctcattgcaagatctcagatggctcggaatgtctggttcttcattgtaagcttctgttataaattcctctcctactttagagcatccagcacgctcaaagtttaagagcatttagccatcgccttttatctggaacctctcagatacctctaaaacagcaaactgtgattctcaagattagaaagtaacaaggaatatgcccaaactgtcaaatgtcacctgttatgtattcgtccctattccttaactatgtatttttatttcagtgagagaaggaaagttgtaaactagcccatagtcacctatattttagggaaaaaaatccaaattgtttcctaacattctattttatgcctttgcgtattaaacgtgaaagtactccc

SEQ ID NO: 11408 - protein, 515 aa, Homo sapiens
MSTIAAFYGGKSILITGATGFLGKVLMEKLFRTSPDLKVIYILVRPKAGQTLQQRVFQILDSKLFEKVKEVCPNVHEKIRAIYADLNQNDFAISKEDMQELLSCTNIIFHCAATVRFDDTLRHAVQLNVTATRQLLLMASQMPKLEAFIHISTAYSNCNLKHIDEVTYPCPVEPKKIIDSLEWLDDAIIDEITPKLIRDWPNIYTYTKALGEMVVQQESRNLNIAIIRPSIVGATWQEPFPGWVDNINGPNGIIIATGKGFLRAIKATPMAVADVIPVDTVVNLMLAVGWYTAVHRPKSTLVYHITSGNMNPCNWHKMGVQVLATFEKIPFERPFRRPNANFTSNSFTSQYWNAVSHRAPAIIYDCYLRLTGRKPRMTKLMNRLLRTVSMLEYFINRSWEWSTYNTEMLMSELSPEDQRVFNFDVRQLNWLEYIENYVLGVKKYLLKEDMAGIPKAKQRLKRLRNIHYLFNTALFLIAWRLLIARSQMARNVWFFIVSFCYKFLSYFRASSTLKV

SEQ ID NO: 11409 - DNA, 1772 bp, Homo sapiens
  CDS (5)..(1678)
cgcgatggaggccgccgcccagttcttcgtcgagagcccggacgtggtctacggccccgaggccatcgaggcgcaatacgagtaccggacgacgcgcgtcagccgcgagggtggcgttctcaaggtgcaccccacgtccacgcgcttcaccttccggaccgcccggcaggtgccccggctcggggtcatgcttgtcggctggggcgggaacaacggctccacactcaccgccgcggtgctggccaatcgactgcgtttgtcctggcccacgcgcagcggccgcaaggaggccaactactacggctcgctgactcaggcgggcaccgtgagcctgggcctggacgccgagggccaggaggtgttcgtacccttcagcgcggtgctgcccatggtggcgcccaacgacctcgtgttcgatggctgggacatctcgtcgctgaacctggccgaggcgatgcggcgcgcgaaggtgctggactgggggctgcaggagcaactgtggccgcacatggaggccctgcggccccggccttctgtttacatccccgaattcatcgcggccaaccagagcgcgcgcgcggacaacctcatcccaggctcgcgtgcgcagcagctggagcagatccgcagggacatccgagacttccggtctagcgcggggctggacaaagtcatagtgctgtggacggcgaacacggagcgcttctgtgaggtgattccaggcctcaacgacacagccgagaacctgctgcgcaccattgagctcggtctggaggtgtcgccctccacgctcttcgccgtggccagcatcctggagggctgtgccttcctcaatgggtctccgcagaacaccctggtgcccggagctcttgagctcgcgtggcagcaccgggtttttgtgggcggagatgacttcaagtcaggccagaccaaagtcaagtccgtgcttgtggacttcctcattggctccggcctcaagaccatgtccatcgtgagttacaaccacctgggcaacaacgatggggagaacctgtcggcgccattgcagttccgctctaaggaggtgtccaagagcaacgtggtggacgacatggtgcagagcaacccagtgctctatacgcccggcgaagagcctgaccactgcgtggtcatcaagtatgtgccgtacgtgggtgacagcaagcgcgcgctggatgagtatacctcggagctgatgctgggcggaaccaacacactggtgctgcacaacacgtgtgaggactcgctgctggccgcacccatcatgctggacctagcgctgctgaccgagctgtgccagcgcgtgagcttctgcactgacatggaccccgagccgcagaccttccaccccgtgctgtccctgctcagcttcctcttcaaggcgccactagtgccgcccggcagcccggtggtcaatgcgcttttccgccagcgcagctgcatcgagaacatcctcagggcctgcgtggggctcccgccacagaaccacatgctcctggaacacaaaatggagcgcccagggccctgcctcaagcgagttggacccgtggctgccacctaccctatgttgaacaagaaaggaccggtacccgctgccaccaatggctgcaccggtgatgccaatgggcatctgcaagaggagcccccaatgcccaccacctgaggccccggtcacacagtttctcggctcttcctccccgctgccccccacgaccctaccttgaaggcccccacaaataaaggcgctgccactc

SEQ ID NO: 11410 - protein, 558 aa, Homo sapiens [sequence omitted]

SEQ ID NO: 11411 - DNA, 1784 bp, Homo sapiens
  CDS (218)..(976)
gttgccagggagcggcgcgggagccctgaggggactgcggcggctgcgcggaggagcgaggcgcttgctggggtcggggctgcgcgacggcgcaggggctgcggggagcgccgcgcaggccgtgcagttcctagcgaggaggcgccgccgccattgccgctctctcggtgagcgcagccccgctctccgggccgggccttcgcgggccaccggcgccatgggccagtgcggcatcacctcctccaagaccgtgctggtctttctcaacctcatcttctggggggcagctggcattttatgctatgtgggagcctatgtcttcatcacttatgatgactatgaccacttctttgaagatgtgtacacgctcatccctgctgtagtgatcatagctgtaggagccctgcttttcatcattgggctaattggctgctgtgccacaatccgggaaagtcgctgtggacttgccacgtttgtcatcatcctgctcttggtttttgtcacagaagttgttgtagtggttttgggatatgtttacagagcaaaggtggaaaatgaggttgatcgcagcattcagaaagtgtataagacctacaatggaaccaaccctgatgctgctagccgggctattgattatgtacagagacagctgcattgttgtggaattcacaactactcagactgggaaaatacagattggttcaaagaaaccaaaaaccagagtgtccctcttagctgctgcagagagactgccagcaattgtaatggcagcctggcccacccttccgacctctatgctgaggggtgtgaggctctagttgtgaagaagctacaagaaatcatgatgcatgtgatctgggccgcactggcatttgcagctattcagctgctgggcatgctgtgtgcttgcatcgtgttgtgcagaaggagtagagatcctgcttacgagctcctcatcactggcgggacctatgcatagttgacaactcaagcctgagctttttggtcttgttctgatttggaaggtgaattgagcaggtctgctgctgttggcctctggagttcatttagttaaagcacatgtacactggtgttggacagagcagcttggcttttcatgtgcccacctacttacctactacctgcgactttctttttccttgttctagctgactcttcatgcccctaagattttaagtacgatggtgaacgttctaatttcagaaccaattgcgagtcatgtagtgtggtagaattaaaggaggacacgagcctgcttctgttacctccaagtggtaacaggactgatgccgaaatgtcaccaggtcctttcagtcttcacagtggagaactcttggccaaaggtttttggggggaggaggaggaaaccagctttctggttaaggttaacaccagatggtgcccctcattggtgtccttttaaaaaatatttactgtagtccaataagatagcagctgtacaaaatgactaaaatagattgtaggatcatatggcgtatatcttggttcatcttcaaaatcagagactgagctttgaaactagtggcttttaatcaaagttggctttataggaggagtataatgtatgcactactgttttaaaagaattagtgtgagtgtgtttttgtatgaatgagcccattcatggtaagtcttaagcttgttggaaataatgtacccatgtagactagcaaaatagtatgtagatgtgatctcagttgtaaatagaaaaatctaattcaataaactctgtatcagccccc

SEQ ID NO: 11412 - protein, 253 aa, Homo sapiens; identical to SEQ ID NO: 11371

SEQ ID NO: 11413 - DNA, 1745 bp, Homo sapiens
  CDS (17)..(829)
accacgcgtctcatccatggcttccgcggactcgcgccggctggcagatggcggcggtgccgggggcaccttccagccctacctagacaccttgcggcaggagctgcagcagacggacccaacgctgttgtcagtagtggtggcggttcttgcggtgctgctgacgctagtcttctggaagttaatccggagcagaaggagcagtcagagagctgttcttcttgttggcctttgtgattccgggaaaacgttgctctttgtcaggttgttaacaggcctttatagagacactcagacgtccattactgacagctgtgctgtatacagagtcaacaataacaggggcaatagtctgaccttgattgaccttcccggccatgagagtttgaggcttcagttcttagagcggtttaagtcttcagccggggctattgtgtttgttgtggatagtgcagcattccagcgagaggtgaaagatgtggctgagtttctgtatcaagtcctcattgacagtatgggtctgaagaatacaccatcattcttaatagcctgcaataagcaagatattgcaatggcaaaatcagcaaagttaattcaacagcagctggagaaagaactcaacaccttacgagttacccgttctgctgcccccagcacactgtacagttccagcactgcccctgctcagctggggaagaaaggcaaagagtttgaattctcacagttgcccctcaaagtggagttcctggagtgcagtgccaagggtggaagaggggacgtgggctctgctgacatccaggacttggagaaatggctggctaaaattgcctgagaggcagctctaaagcacaagacctggatgtgtgacacacagttttggaaaaaggtctgtggtagtctggagttgatgaggaaggggtacaagatgtggttagaaacatttctttgttctggaaacaaagtactgttgaaaccagcttggaattttttttttttttttttttaagttcagttctcccttatggctgcctttcaaacaagtaccttttatctgatgcctgtatcttccctttgttaaggtgtaacttgatgtagggtcaaggtttttgtgacaacaggcagactccacacagagaggatatgatgagaatatggccatcacctgaaaagttttcttatcttctgtgcttttggtccctggaaacaaatccgcctatgtatgaagctagttgatttccagttgcactatttccagttgcctctgaagttcacaggcaatacattgtctagtcctttgcgaatttctctgatttgtgggcacagttatgaagtttccccacatgtgaagacaggtacaaaatagcagagccaagcagacagtgggtctattcttcattagctcagtgacttgtccacactcgtcttagcacttacgtttcaaaagcttgtcacaaacccttggagtcattcccagataatagaactggaaatgataaatcccctaatgccaagggtctagtgtgttcttagtggttatactgggaagtgtgtggagatttaggtgctgctctgctgctctggatggctgaaggctcctgggccatcttcatgtgctgcttgaagagctcctattttgtactcctggctagaatgctgtggaacaaatacaaagtgaaaaaagttctctgtagatttctgaagtgcatattcattgatgccaagaaaaaaaaaaagttgcctttttg

SEQ ID NO: 11414 - protein, 271 aa, Homo sapiens [sequence omitted]

SEQ ID NO: 11415 - DNA, 1843 bp, Homo sapiens
actctgctgccggcttctcggagcggcgctgggcgaccagagcagggtcgagatgtcctacatcccgggccagccggtcaccgccgtggtgcaaagagttgaaattcacaagctgcgtcaaggtgagaacttaatcctgggtttcagcattggaggtggaatcgaccaggacccttcccagaatcccttctctgaagacaagacggacaaggtgagggggtctggggtcctgggaccgctccatggggcacaggggcctgagatggtgggtctctgcttcctgggcctgcatggaaggaacagacttcatctctcaaaccatgctctctaagaaggcatcggaagtgacctagtgagaataaggacgggtggggtgaggaagggctgctcagacagagcccaggaggagcaggaggcggccatcagcagggccggtgcatggtggtgcagcaactctgccccggctctctcagaacagtcctcactgaccatatgtgctgggagaggctgggtgcagggacagagggacggctgagaatgtgccatgctggcttccgctgtgtgataaggggccagtccagtgaccacagggcttgacttgggctgcccctttccagggtatttatgtcacacgggtgtctgaaggaggccctgctgaaatcgctgggctgcagattggagacaagatcatgcaggtaacaggtgtcccaaaggaggagaaataaggtttgggcaagcaggtctgaagcacttgggggtggggagctgccccagcctcccagctgggagagactcactgcagccaattgggaacccatactggcattgccccagaggacgctggctttctctcctgtgtgtctcagccacagtgcttggtgtctcccagccctgggatgttaggctgggggcctacttgaatgacctgggcccccaaagccctctgcttccagatcccagagggcggggagctgaggtgagcctgtgttctctcctggggccaggtgaacggctgggacatgaccatggtcacacacgaccaggcccgcaagcggctcaccaagcgctcggaggaggtggtgcgtctgctggtgacgcggcagtcgctgcagaaggccgtgcagcagtccatgctgtcctagcagccaccaccatctgcgactcctgcctgccgcctctctgtacagtaacgccacttccacactctgtccccatctggcttctgctgaccgctgggccccagctcagaagggctatagctggtcccagaggcctggcctggccttccttcccttctcccatccctggcctggggcctctgggaccagctttctctcctggacaccgaggattggaaataagggcctggagctgagtagtagccagtctgctgtgaccacaggctcaggtccgaccctgctgcttggccacagcagtggctgggcaagtgggaaccactatctcttgggagcccccaaaagctgggaaatgctggaggaaccaggcctttcccgcttttgcctggctgcagggttcggctccgcccctgccccccagccctcgtgtgtccacaccgcagtgcctctgcccctcgggggactggacacacatcctgccagaggcgctacgaagctttgcccagatgaagccaggtgggctccgcgttcactcccactctcccgaggggtgctggcctccccagggtttgccttcttacggatttagacgaggttcgaggctcacctatcagggcagctctcaggattgtcattttcctctttgcctgtgggtttaacttttgtatttttttaatcacaagtttgatacaaaatgtttttatcgt

SEQ ID NO: 11416 - DNA, 2103 bp, Homo sapiens
  CDS (102)..(2021)
aaaaaccatggatcctggaggtgcccgcgaacactgcttgtcgcctgggcaaccggagaggacgaagcaggacctaggtggcggcggtggtaccggctgcaatggtgtccaatcccgtgcatggcttgccctttcttccgggcacgtcctttaaggactctacgaaaacagccttccacagaagtcagacgctgagctacaggaacggctatgcaattgttcgacgtccaacagttgggataggcggagaccggctccagttcaaccagctgtcccaggctgagctggatgagttggccagtaaggcaccagtcttaacttatggccaacctaaacaagccccacctgcggattttattcctgcgcatgtggcctttgacaaaaaggtactgaaatttgatgcctatttccaagaagatgttcctatgtcaactgaggaacagtataggatccgtcaggtgaacatttactattatctagaagatgacagcatgtctgtcatagagcctgttgtagaaaattctggaatccttcaaggcaagttaataaaacgccagcggctagccaagaatgaccggggtgaccattaccattggaaagacctaaatcgaggaataaacatcacaatttatggcaaaactttccgcgttgttgactgtgaccaattcacacaggtatttttagaaagccaaggaattgagttaaatccaccagagaagatggctcttgatccttacactgaactccgaaaacagcctcttcgtaagtatgtcaccccatcagactttgatcaactcaagcaatttctcacctttgacaaacaggtccttcgattctatgcaatctgggatgatacagacagcatgtatggtgaatgtcggacctacatcattcattactatcttatggatgatacggtggaaattcgagaggtccacgaacggaatgatgggagagatcctttcccactcctaatgaaccgccagcgtgtgcccaaagttttggtggaaaatgcaaagaacttccctcagtgtgtgctagaaatctctgaccaagaagtgttggaatggtatactgctaaagacttcattgttgggaagtcactcactatccttgggagaactttcttcatttatgattgtgatccatttactcgacggtattacaaagagaagtttggaatcactgatttaccacgtattgatgtgagcaagcgggaaccacctccagtaaaacaggagttgcctccttataacggttttggactagtggaagattctgctcagaattgttttactctcattccaaaagctccaaaaaaagacgttattaaaatgctggtgaatgataacaaggtgcttcgttatttggctgtactggaatcccccatcccagaagacaaagaccgcagatttgtcttctcttactttctagctaccgacatgatcagtatctttgagcctcctgttcgcaattctggtatcattgggggcaagtaccttggcaggactaaagttgttaaaccatactctacagtggacaaccctgtctactatggccccagtgacttcttcattggtgctgtgattgaagtgtttggtcaccggttcatcatccttgatacagacgagtatgttttgaaatacatggagagcaacgctgcccagtattcaccagaagcactcgcgtcaattcagaaccatgtccgaaagcgagaagcgcctgctccagaagcagaaagcaagcaaactgaaaaggatccaggcgtgcaggaattggaagcattaatagacacaattcagaagcaactgaaagatcactcatgcaaagacaacattcgtgaggcatttcaaatttatgacaaggaagcttcaggatatgtggacagagacatgttctttaaaatctgtgaatcgcttaacgtcccagtggatgactccttggttaaggagttaatcaggatgtgctctcatggagaaggcaaaattaactactataactttgttcgtgctttctcaaactgacctgctgatgagaaaatgcaagacaatttttgatactggaactatgctttgaaatacaccttacactcttcatagtggc

SEQ ID NO: 11417 - protein, 640 aa, Homo sapiens
MVSNPVHGLPFLPGTSFKDSTKTAFHRSQTLSYRNGYAIVRRPTVGIGGDRLQFNQLSQAELDELASKAPVLTYGQPKQAPPADFIPAHVAFDKKVLKFDAYFQEDVPMSTEEQYRIRQVNIYYYLEDDSMSVIEPVVENSGILQGKLIKRQRLAKNDRGDHYHWKDLNRGINITIYGKTFRVVDCDQFTQVFLESQGIELNPPEKMALDPYTELRKQPLRKYVTPSDFDQLKQFLTFDKQVLRFYAIWDDTDSMYGECRTYIIHYYLMDDTVEIREVHERNDGRDPFPLLMNRQRVPKVLVENAKNFPQCVLEISDQEVLEWYTAKDFIVGKSLTILGRTFFIYDCDPFTRRYYKEKFGITDLPRIDVSKREPPPVKQELPPYNGFGLVEDSAQNCFTLIPKAPKKDVIKMLVNDNKVLRYLAVLESPIPEDKDRRFVFSYFLATDMISIFEPPVRNSGIIGGKYLGRTKVVKPYSTVDNPVYYGPSDFFIGAVIEVFGHRFIILDTDEYVLKYMESNAAQYSPEALASIQNHVRKREAPAPEAESKQTEKDPGVQELEALIDTIQKQLKDHSCKDNIREAFQIYDKEASGYVDRDMFFKICESLNVPVDDSLVKELIRMCSHGEGKINYYNFVRAFSN

SEQ ID NO: 11418 - DNA, 2682 bp, Homo sapiens
aattactatgaaattctgggagtttctcgagatgctagtgacgaagagcttaagaaagcttacagaaaactcgccctgaaatttcaccctgacaagaactgtgctcctggagcaacagatgctttcaaagcaataggaaatgcatttgcagtcctgagcaatcctgataagagacttcgctatgatgaatacggagatgaacaggtgactttcactgcccctcgagccagaccttataattattacagggattttgaagctgacatcactccagaagagctgttcaacgtcttctttggaggacattttcctacaggaaatattcatatgttttcaaatgtgacagatgacacttactattaccgtcgacggcaccgacatgagaggacacagactcagaaggaggaggaagaagagaaacctcagactacatattctgcatttattcagctacttccagttcttgtgattgtgattatatctgtcattactcagctgctggctactaatcccccatatagtctgttctataaatcgaccttgggctacaccatttctagagaaactcataacctgcaggtgccttactttgtggataaaaactttgacaaggcctacagaggagcttctctgcatgacttggagaaaacaatagagaaggattacattgattatatccagactagttgttggaaggagaaacaacaaaagtcagagctgacaaatttggcaggattatacagagatgaacgattgaaacagaaagcagagtcgctgaaacttgaaaactgtgagaaactttccaaactcattggcctacgcagaggtggctgagaggataatggtcctacgcagggctggggttttgctacttgttcctatttatgttcctgattccattttataatacaaaactaggtaatgatgaacactttactatttgctaacttcgttggttgggcagagtggcaggagcatgggcacgagagccagatgtgtcttcacaggatccttcctggggagtggctccagggaccaggagtagttcatctaagttaaattaatggcaaggcattggattccgtctccctgctccatgcctaccctgcctatgtgaatggagttcagggcatcccagagcagatccatgctttcttccttcttcccttcttcagtgaagtcttaagaaccaggcattcctaggcttagccaaagcttaatattagttatttacactgtctaccaagaattatacctctcccttcattagagtcatcatctccgccaagatttagcctttggaacatgttcctgcccagctttccattttctaggggaatatggagaaatttaaactattgtagtcaatagttttctattattccaatctctgctcagttagtagcattagcaaactgcctaatttgagattcctttatttccttaaccctctctcctttagagagtccagaaattaaaactactgagcagcatctggaggcgggggccagggcgaaggtataatgcaagaccgagcctcatctcctccacgaagcctccctactccatcatagaacccagagaatgtcccttcggtcatttcccctcagtatcatcattggtgtcatcgcacttaggctgagttcctacatcccacagaggcagatggtcagacccaggaggaggcattgccagctctccaggctgtttgctcaagcctagagatagaggagacagatcctctctccttggatatgggggtctagctttggccccagcagccactttgtttaacccagtatcctatagtttgtgatttgagatgatttttcattcattcaacatttattgagtgcctactataaaagcaggggctctcacacatattttcttacttaaacctcctcacaactctgaagtagatgtattatccctggttctatgaatgagaacattggcccagagaggatgacccaggtcttgtagtggcagagcaagacggtaggctgagtgtcaagtagaaagtggagagcatcctcatgtctcaggtgattctagccagactggcaaagcagaacctttcccgaggatgcctccgtcctccccaaccccatgacccctcatcttttctgtggcaatcttgcatctgttcaggacaacatccctgctgctctttaggaagcaggaccctgtctaacataaattctgtacacaaaataagaggtccctcacaggcaggcagccctccactggtgactaggaagaattcagtcactgcctgggctgtgtggttctgggccttcctgtggagctgagctgcctgaattatcatgactctgaacttggaaggatcattaagtgactgtagcctacactccatgcttccttcatattggaagaaaagtttctggtagagagtcggccgggtgcactggctcaagcctgtaatcccagcactttgggaggctgtggcaggtggatcacctgaggtcaggagttcaagaccagcccggccaacacagtgaaaccccatctctactaataatacaaaaattagccaggtgtggtggcacatgcctgtagtcccagctactcgggaggctgaggcatgagaatcgctgcaacttgcaaggtggaggttacagtgagctgaaatcacgccactgcactccactccatctc

SEQ ID NO: 11419 - DNA, 2307 bp, Homo sapiens
  CDS (114)..(953)
gtgactgtggagtttgaattgggtggcggttgactgtagagccgctctctctcactggcacagcgaggttttgctcagcccttgtctcgggaccgcagcctccgccgagcgccatggctcctaggaagggcagtagtcgggtggccaagaccaactccttacggaggcggaagctcgcctcctttctgaaagacttcgaccgtgaagtggaaatacgaatcaagcaaattgagtcagacaggcagaacctcctcaaggaggtggataacctctacaacatcgagatcctgcggctccccaaggctctgcgcgagatgaactggcttgactacttcgcccttggaggaaacaaacaggccctggaagaggcggcaacagctgacctggatatcaccgaaataaacaaactaacagcagaagctattcagacacccctgaaatctgccaaaacacgaaaggtaatacaggtagatgaaatgatagtggaagaggaagaagaagaagaaaatgaacgtaagaatcttcaaactgcaagagtcaaaaggtgtcctccatccaagaagagaactcagtccatacaaggaaaaggaaaagggaaaaggtcaagccgtgctaacactgttaccccagccgtgggccgattggaggtgtccatggtcaaaccaactccaggcctgacacccaggtttgactcaagggtcttcaagacccctggcctgcgtactccagcagcaggagagcggatttacaacatctcagggaatggcagccctcttgctgacagcaaagagatcttcctcactgtgccagtgggcggcggagagagcctgcgattattggccagtgacttgcagaggcacagtattgcccagctggatccagaggccttgggaaacattaagaagctctccaaccgtctcgcccaaatctgcagcagcatacggacccacaaatgagacaccaaagttgacaggatggacttttaatgggcacttctgggaccctgaagagacttcttcccttcaggcttattgtttgagtgtgaagttccagagcaaggagccatgttcctctaagggaattcaggaattcagacgtgctagtcccacaccagttaggtagagctgtctgttcaccctcccatcccagctgatcccagtcactgcttgctggggccatgccatggaagcttcccatcagtctcccagctgaatcctccctgctctctgagctgctgccttttgcctcctgcaactcaacatcctcttcaccctgccctgcctgcagttgagggggcgaagaagaaccctgtgttctcaggaagactgcctccaccaccgctacccagagaacctctgcatctggcatttctgctctctatgcttgagaccgggaggtttaggctcagataagtgagctctgggccatgagagggtaggtccagaaggtggggggaactgtacagatcagcagagcaggacagttggcagcagtgacctcagtagggaacatgtccgtctaccctctcgcactcatgacacctccccctaccagccctcctcttcctcctcctcctcctcctgtgggaggtggtcagtgggacttagggatctttcacctgctgtgcccagtagttctgaagtctgcttgtggagcagtgttttatgtttatccctgtttactgaagaccaaatactggtttggagacaacttccatgtcttgctcttctacctccctagttagtggaaatttggataagggaactgtagggcccagattctggaggttttatgtcattggccacagaataactgtctctaagctatccatggtccagtggtccctgccaagtctgtagacttcagagagcacttctctcttatggggttcatgggaacaggggcgggtgtgacttgcttggtggcctcattccatgtgtgcctgtgcctggggcatggactttgttaagcagagtcagcagtgaggtcctcattctccagccagcctctctgccctggagaatcatgtgctatgttctaagaatttgagaactagagtcctcatccccaggcttgaaggcacatggctttctcatgtagggctctctgtggtatttgttattattttgcaacaagaccattttagtaaaacagtcctgttcaagttgtattcttttaagttcttttattctcctttccctgagatttttgtatatattgttctgagtaatggtatctttgagctgattgttctaatcagagctggtacctactttcaataaattctggttttgtgttttcttctgt

SEQ ID NO: 11420 - protein, 280 aa, Homo sapiens
MAPRKGSSRVAKTNSLRRRKLASFLKDFDREVEIRIKQIESDRQNLLKEVDNLYNIEILRLPKALREMNWLDYFALGGNKQALEEAATADLDITEINKLTAEAIQTPLKSAKTRKVIQVDEMIVEEEEEEENERKNLQTARVKRCPPSKKRTQSIQGKGKGKRSSRANTVTPAVGRLEVSMVKPTPGLTPRFDSRVFKTPGLRTPAAGERIYNISGNGSPLADSKEIFLTVPVGGGESLRLLASDLQRHSIAQLDPEALGNIKKLSNRLAQICSSIRTHK

SEQ ID NO: 11421 - DNA, 2430 bp, Homo sapiens
  CDS (184)..(2223)
cttccgggtgagggtcctgcagcccgtgaatccctggtcccgccgagacttggacctggtgcgaactggaggcgaagcgggtgcacccacaacctataggaagggctggcggcgagctctgagcactcgggcgtcggagggaacgctctgctttcaacactcttggccctttctcaagagaacatgaaaatgaaaaaatttcagataccagtttcattccaggacctgactgtgaacttcacccaagaggaatggcagcaactggaccctgctcagaggctcctgtacagggatgtgatgctggagaactacagcaacttggtctctgtggggtatcatgttagcaaaccagatgtgattttcaaattggagcaaggagaagagccatggatagtggaggaattctcaaatcagaactacccagacattgatgatgccttagagaagaacaaggaaatccaagataaacatttgacacaaactgtattcttcagcaacaaaacactgattacagaaagagagaatgtatttggggaaacacttaatctgggcatgaatagtgttccctcaagaaaaatgccctataaatgtaatccaggaggaaacagtttgaaaactaattcagaagtaattgttgcaaagaaaagcaaagaaaacagaaagattcctgatggatacagtggatttgggaagcatgagaaaagtcatttgggaatgaaaaaatacagatacaatccaatgaggaaagccagcaatcaaaacgaaaatcttattctgcaccagaacattcagattttgaaacaaccgtttgactataataaatgtgggaaaaccttcttcaagagggcaattctcattacacaaaaggggagacagactgaaaggaaaccaaatgaatgtaatgaatgtaggaaaaccttttctaagagatctaccctcattgtacatcagagaattcatacaggggagaaaccgtatgtttgtagtgattgtaggaaaacttttcgtgtgaagacaagcctcactcgacaccgaagaattcatactggagagagaccctatgaatgcagtgaatgcaggaaaaccttcattgacaaatctgcccttattgtacaccagaaaattcatggaggggagaaatcctatgagtgtaatgaatgtggaaagaccttttttcggaagtcagccctggctgaacatttcaggtcacacacaggggagaagccttacgaatgcaaggaatgtggaaatgccttcagcaagaaatcgtatcttgttgtacatcaaagaactcacagaggagagaagccaaatgaatgtaaggaatgtgggaaaaccttcttctgtcagtcagcccttactgcgcatcagagaattcacacaggggaaaaaccctatgaatgtagtgaatgtgagaaaaccttcttttgtcaatctgccctcaatgtgcatcgaagaggtcatacaggagagaagccctatgaatgcagtcaatgtggaaaatttttatgtacgaaatcagccctcattgcacatcagataactcatagaggaaagaagtcttatgaatgtaatgaatgtgggaaatttttctgccataagtcaacactcactatacatcagagaacacacacaggagagaaacatggtgtgtttaataaatgtggtagaatctccattgtgaagtcaaactgcagtcagtgtaagagaatgaacacaaaggagaatctttatgagtgtagtgaacatgggcacgccgtcagcaaaaactcacacctcattgtacatcagagaactatatgggagagaccatatgaatgcaatgaatgtgggagaacctactgcaggaagtcagccctgactcaccatcagagaacacacacaggacagagaccctatgagtgtaatgaatgtgggaaaaccttctgtcagaagttctcctttgttgaacatcagcgaactcacactggggagaaaccatatgaatgtaatgaatgtgggaaatccttctgccataagtcagccttcagagtccatagaagaattcacacaggagagaaaccatatgaatgtaatcaatgtgggaaaacctaccgtcgcctgtggactctcactgaacatcagaaaatacacacaggagagaaaccttatgaatgtaacaaatgtgagaaaacatttcgccacaaatcaaactttcttttacatcagaaatcccacaaggaataagttccaacaaagtaataaattccaacaaagcaacaaatcaaataacttacacaatgctaaactgtgagtatgtatagaggagtaaaatcttataaatgtaatgaatatggaaaatttttctgccataagtcaaccctcaatgtaacatcagagaaatcatgtaggaaagaaataatttgtttaataaatgtattattcattgtg

SEQ ID NO: 11422 - protein, 680 aa, Homo sapiens
MKMKKFQIPVSFQDLTVNFTQEEWQQLDPAQRLLYRDVMLENYSNLVSVGYHVSKPDVIFKLEQGEEPWIVEEFSNQNYPDIDDALEKNKEIQDKHLTQTVFFSNKTLITERENVFGETLNLGMNSVPSRKMPYKCNPGGNSLKTNSEVIVAKKSKENRKIPDGYSGFGKHEKSHLGMKKYRYNPMRKASNQNENLILHQNIQILKQPFDYNKCGKTFFKRAILITQKGRQTERKPNECNECRKTFSKRSTLIVHQRIHTGEKPYVCSDCRKTFRVKTSLTRHRRIHTGERPYECSECRKTFIDKSALIVHQKIHGGEKSYECNECGKTFFRKSALAEHFRSHTGEKPYECKECGNAFSKKSYLVVHQRTHRGEKPNECKECGKTFFCQSALTAHQRIHTGEKPYECSECEKTFFCQSALNVHRRGHTGEKPYECSQCGKFLCTKSALIAHQITHRGKKSYECNECGKFFCHKSTLTIHQRTHTGEKHGVFNKCGRISIVKSNCSQCKRMNTKENLYECSEHGHAVSKNSHLIVHQRTIWERPYECNECGRTYCRKSALTHHQRTHTGQRPYECNECGKTFCQKFSFVEHQRTHTGEKPYECNECGKSFCHKSAFRVHRRIHTGEKPYECNQCGKTYRRLWTLTEHQKIHTGEKPYECNKCEKTFRHKSNFLLHQKSHKE

SEQ ID NO: 11423 - DNA, 2410 bp, Homo sapiens
  CDS (7)..(2052)
attctcatggtcagtagcaacttttggttcaaatatcccaaaacatgctcaaaagtagaacattttgtttcaatattaggaaagtgctttgaatccccttggacgacaaaagcgttgtctgagacagcatgcgaagactcagaggaaaacaagcagagaataacaggtgcccagactctaccaaagcatgtttctaccagcagtgatgaagggagccccagtgccagtacaccaatgatcaataaaactggctttaaattttcagctgagaagcctgtgattgaagttcccagcatgacaatcctggataaaaaggatggagagcaggccaaagccctgtttgagaaagtgaggaagttccgtgcccatgtggaagatagtgacttgatctataaactctatgtggtccaaacagttatcaaaacagccaagttcatttttattctctgctatacagcgaactttgtcaacgcaatcagctttgaacacgtctgcaagcccaaagttgagcatctgattggttatgaggtatttgagtgcacccacaatatggcttacatgttgaaaaagcttctcatcagttacatatccattatttgtgtttatggctttatctgcctctacactctcttctggttattcaggatacctttgaaggaatattctttcgaaaaagtcagagaagagagcagttttagtgacattccagatgtcaaaaacgattttgcgttccttcttcacatggtagaccagtatgaccagctatattccaagcgttttggtgtgttcttgtcagaagttagtgaaaataaacttagggaaattagtttgaaccatgagtggacatttgaaaaactcaggcagcacatttcacgcaacgcccaggacaagcaggagttgcatctgttcatgctgtcgggggtgcccgatgctgtctttgacctcacagacctggatgtgctaaagcttgaactaattccagaagctaaaattcctgctaagatttctcaaatgactaacctccaagagctccacctctgccactgccctgcaaaagttgaacagactgcttttagctttcttcgcgatcacttgagatgccttcacgtgaagttcactgatgtggctgaaattcctgcctgggtgtatttgctcaaaaaccttcgagagttgtacttaataggcaatttgaactctgaaaacaataagatgataggacttgaatctctccgagagttgcggcaccttaagattctccacgtgaagagcaatttgaccaaagttccctccaacattacagatgtggctccacatcttacaaagttagtcattcataatgacggcactaaactcttggtactgaacagccttaagaaaatgatgaatgtcgctgagctggaactccagaactgtgagctagagagaatcccacatgctattttcagcctctctaatttacaggaactggatttaaagtccaataacattcgcacaattgaggaaatcatcagtttccagcatttaaaacgactgacttgtttaaaattatggcataacaaaattgtcactattcctccctctattacccatgtcaaaaacttggagtcactttatttctctaacaacaagctcgaatccttaccagtggcagtatttagtttacagaaactcagatgcttagatgtgagctacaacaacatttcaatgattccaatagaaataggattgcttcagaacctgcagcatctgcatatcactgggaacaaagtggacattctgccaaaacaattgtttaaatgcataaagttgaggactttgaatctgggacagaactgcatcacctcactcccagagaaagttggtcagctctcccagctcactcagctggagctgaaggggaactgcttggaccgcctgccagcccagctgggccagtgtcggatgctcaagaaaagcgggcttgttgtggaagatcacctttttgataccctgccactcgaagtcaaagaggcattgaatcaagacataaatattccctttgcaaatgggatttaaactaagataatatatgcacagtgatgtgcaggaacaacttcctagattgcaagtgctcacgtacaagttattacaagataatgcattttaggagtagatacatcttttaaaataaaacagagaggatgcatagaaggctgatagaagacataactgaatgttcaatgtttgtagggttttaagtcattcatttccaaatcatttttttttttcttttggggaaagggaaggaaaaattataatcactaatcttggttctttttaaattgtttgtaacttggatgctgccgctactgaatgtttacaaattgcttgcctgctaaagtaaatgattaaattgacattttcttactat

SEQ ID NO: 11424 - protein, 682 aa, Homo sapiens
MVSSNFWFKYPKTCSKVEHFVSILGKCFESPWTTKALSETACEDSEENKQRITGAQTLPKHVSTSSDEGSPSASTPMINKTGFKFSAEKPVIEVPSMTILDKKDGEQAKALFEKVRKFRAHVEDSDLIYKLYVVQTVIKTAKFIFILCYTANFVNAISFEHVCKPKVEHLIGYEVFECTHNMAYMLKKLLISYISIICVYGFICLYTLFWLFRIPLKEYSFEKVREESSFSDIPDVKNDFAFLLHMVDQYDQLYSKRFGVFLSEVSENKLREISLNHEWTFEKLRQHISRNAQDKQELHLFMLSGVPDAVFDLTDLDVLKLELIPEAKIPAKISQMTNLQELHLCHCPAKVEQTAFSFLRDHLRCLHVKFTDVAEIPAWVYLLKNLRELYLIGNLNSENNKMIGLESLRELRHLKILHVKSNLTKVPSNITDVAPHLTKLVIHNDGTKLLVLNSLKKMMNVAELELQNCELERIPHAIFSLSNLQELDLKSNNIRTIEEIISFQHLKRLTCLKLWHNKIVTIPPSITHVKNLESLYFSNNKLESLPVAVFSLQKLRCLDVSYNNISMIPIEIGLLQNLQHLHITGNKVDILPKQLFKCIKLRTLNLGQNCITSLPEKVGQLSQLTQLELKGNCLDRLPAQLGQCRMLKKSGLVVEDHLFDTLPLEVKEALNQDINIPFANGI

SEQ ID NO: 11425 - DNA, 2583 bp, Homo sapiens
  CDS (18)..(1376)
agagtccccgggccaagatggctgcgcggtgctccacacgctggttgctggtggttgtggggaccccgcggctgccggctatatcgggtagaggggcccggccgcccagggagggcgtggtgggggcatggctgagccgcaagctgagcgtccccgcctttgcgtcttccctgacctcttgcggcccccgagcgctgctgacattgagacctggtgtcagccttacaggaacaaaacataaccctttcatttgtactgcctccttccacacgagtgcccctttggccaaagaagattattatcagatattaggagtgcctcaaaatgccagccagaaagagatcaagaaagcctattatcagcttgccaagaagtatcaccctgacacaaataaggatgatcccaaagccaaggagaagttctcccagctggcagaagcctatgaggttttgagtgatgaggtgaagaggaagcagtacgatgcctacggctctgcaggcttcgatcctggggccagcggctcccagcatagctactggaagggaggccccactgtggaccccgaggagctgttcaggaagatctttggcgagttctcatcctcttcatttggagatttccagaccgtgtttgatcagcctcaggaatacttcatggagttgacattcaatcaagctgcaaagggggtcaacaaggagttcaccgtgaacatcatggacacgtgtgagcgctgcaacggcaaggggaacgagcccggcaccaaggtgcagcattgccactactgtggcggctccggcatggaaaccatcaacacaggcccttttgtgatgcgttccacgtgtaggagatgtggtggccgcggctccatcatcatatcgccctgtgtggtctgcaggggagcaggacaagccaagcagaaaaagcgagtgatgatccctgtgcctgcaggagtcgaggatggccagaccgtgaggatgcctgtgggaaaaagggaaattttcattacgttcagggtgcagaaaagccctgtgttccggagggacggcgcagacatccactccgacctctttatttctatagctcaggctcttcttgggggtacagccagagcccagggcctgtacgagacgatcaacgtgacgatcccccctgggactcagacagaccagaagattcggatgggtgggaaaggcatcccccggattaacagctacggctacggagaccactacatccacatcaagatacgagttccaaagaggctaacgagccggcagcagagcctgatcctgagctacgccgaggacgagacagatgtggaggggacggtgaacggcgtcaccctcaccagctctggaaaaagatccactggaaactaggccgggaagcagcagcccctccaagggccagggcacctgggagacgggaggattccagaacagcagcactgagctcccacccgcagagcctctggacggccttggcaacagcaaaatcatgggacaacacctctctccacggaaaggtcacagtggacagcccgggcagtaggatgcagccccagaggctggtggcagtttcctgtccattggtaggtgacggcccctggctcaggcagagggagatggttagactcttgcagggctaaaactctaatttggaattgaatattgtggatatcttagttaaaggccatgcttacagcttagaaatgaagccttaagctgcatcaagttacgaagtgattaatttccttctcagcaaacctccgggaggttccagaatgagttcttcctgacaggttgtcttcactgggagcgtggggcccccaggccccaccagcaccgtcctcccctaatgaggggccctgccgaggcatcagctgctctgctcagttagtttttattcccggggtaccaagcagctgcacagtcggtgcctgggaggcacgtagaggcccagagagtccctgggggttctgctctgaccgtgtgggtggtgatccttgtcaggatgtacagtccttgctcccaccccatccgggatggccgcctgtccctgactattgagtcctgttgttgtaagccaggcatggagggctcctgcccttctgctgagccacagcccattgcagcactgtgctggccagacttcagctgccttgggaactgaagccctgccactgttgctagtcaggggcttggttctcccacttacactgttgacatctattttctgaagtgtgtttaaattattcagtgctaatcattgttttttcctttgtaaatgttgattcagaaaaggaaagcacaggctaagcagttgaaggttccccaccattcagtgagagcagaacccccattccccagcctctgctggtagcatgtcgcagtttccatgtgtttcaggatcttcgggctgtcgttagacaggttaatgaagaacacttctcaacagtttcctttttgttttcctttataattcactaaaataaagcatctattagtgtctgatttaggaatgtaaaatgattctgtattaatgtaaataagattatctattgcaaaaagatatttcaaacct

SEQ ID NO: 11426 - protein, 453 aa, Homo sapiens [sequence omitted]

SEQ ID NO: 11427 - DNA, 2275 bp, Homo sapiens
  CDS (211)..(2082)
gctgcttggtaacaatggggaagataatggctgcctgagcaacgtctccgagcaggcgctgagctagaggcgggtctcaaccagctactcattggaggcgggcttgagagcggcggccagggaggtgcggagcagcctcggcggcggcggccgaaccaaccgagtcggatcctgaccctaaaacctagtattttccacttgttcatcaatatggaaaactcagattccaatgacaaaggaagtggtgatcagtctgcagcacagcgcagaagtcagatggaccgattggatcgagaagaagctttctatcaatttgtaaataacctgagtgaagaagattataggcttatgagagataacaatttgctaggcaccccaggtgaaagtactgaggaagagttgctgagacgactacagcaaattaaagaaggcccaccaccgcaaaactcagatgaaaatagaggaggagactcttcagatgatgtgtctaatggtgactctataatagactggcttaactctgtcagacaaactggaaatacaacaagaagtgggcaaagaggaaaccaatcttggagagcagtgagtcggactaatccaaacagtggtgatttcagattcagtttagagataaatgttaaccgtaataatgggagccaaaattcagagaatgaaaatgagccatctgcaagacgttctagtggagaaaatgtggaaaacaacagccaaaggcaagtggaaaacccacgatctgaatcaacatctgcaaggccatctagatcagaacgaaattcaactgaagcgttaacagaggtcccacctaccagaggtcagaggagggcaagaagcaggagcccagaccatcggagaaccagagcaagagctgaaagaagtaggtcacctctgcatccaatgagtgaaattccacgaagatctcatcatagtatctcatctcagacttttgaacatcctttggtaaatgagacggagggaagttctagaacccggcaccatgtgacattgaggcagcaaatatctgggcctgagttgctaagtagaggtctttttgcagcttctggaacaagaaatgcttctcaaggagcaggttcttcagacacagctgccagtggtgaatctacaggatcaggacagagacctccaaccatagtccttgatcttcaagtaagaagagttcgtcctggagaatatcggcagagagatagcatagccagcagaactcggtctaggtctcagacaccaaacaacactgtcacctatgaaagtgaacgaggaggttttaggcgtacattttcacgttctgagcgggcaggtgtgagaacctatgtcagtaccatcagaattcccattcgtagaatcttaaatactggtttaagtgagactacatctgttgcaattcagaccatgttaaggcagataatgacaggttttggtgagttaagccattttatgtacagtgatagcgactcagagcctactggctcagtctcaaatcgaaatatggaaagggcagagtcacggagtggaagaggaggttctggtggtggtagtagttctggttccagttcgagttccagttccagttcgagttccagttccagttcaagttccagttccagtcctagttccagttccggtggtgaaagttcagaaactagctcagatttatttgaaggcagtaatgaaggaagctcatcatcaggctcatcaggtgccaggcgagagggtcgacatagggccccagtcacatttgatgaaagtggctctttgcccttccttagcctggctcagtttttcctcttaaatgaggatgatgatgaccaacctagaggactcaccaaagaacagattgacaacttggcaatgagaagttttggtgaaaatgatgcattaaaaacctgtagtgtttgcattacagaatatacagaaggcaacaaacttcgtaaactaccttgttcccatgagtaccatgtccactgcatcgatcgctggttatctgagaattctacctgtcctatttgtcgcagagcagtcttagcttctggtaacagagaaagtgttgtgtaattaagatctgaactctcagctatgtagctgatatagtgatgggcaaacaggaatcacttgcttttatgtccactttttgagtggtacttaaatgtaaagtaacaacctgaattgagtcattgctttctgaaggaatcattgtcctttctccagtttttgttccagaataaaaggaaatattttaaaagcc

SEQ ID NO: 11428 - protein, 624 aa, Homo sapiens
MENSDSNDKGSGDQSAAQRRSQMDRLDREEAFYQFVNNLSEEDYRLMRDNNLLGTPGESTEEELLRRLQQIKEGPPPQNSDENRGGDSSDDVSNGDSIIDWLNSVRQTGNTTRSGQRGNQSWRAVSRTNPNSGDFRFSLEINVNRNNGSQNSENENEPSARRSSGENVENNSQRQVENPRSESTSARPSRSERNSTEALTEVPPTRGQRRARSRSPDHRRTRARAERSRSPLHPMSEIPRRSHHSISSQTFEHPLVNETEGSSRTRHHVTLRQQISGPELLSRGLFAASGTRNASQGAGSSDTAASGESTGSGQRPPTIVLDLQVRRVRPGEYRQRDSIASRTRSRSQTPNNTVTYESERGGFRRTFSRSERAGVRTYVSTIRIPIRRILNTGLSETTSVAIQTMLRQIMTGFGELSHFMYSDSDSEPTGSVSNRNMERAESRSGRGGSGGGSSSGSSSSSSSSSSSSSSSSSSSSPSSSSGGESSETSSDLFEGSNEGSSSSGSSGARREGRHRAPVTFDESGSLPFLSLAQFFLLNEDDDDQPRGLTKEQIDNLAMRSFGENDALKTCSVCITEYTEGNKLRKLPCSHEYHVHCIDRWLSENSTCPICRRAVLASGNRESVV

SEQ ID NO: 11429 - DNA, 3079 bp, Homo sapiens
ttttagatgtatttcaagctgtgaagagtttacgacttcagagaccacatatggtgcaaaccctggaacagtatgaattctgctacaaagtggtacaagattttattgatatattttctgattatgctaatttcaaatgaagattcctgccttaaaatattttttaatttaatggtcagtatattttgtaaaaatcatgttaatttatttcatagttgacattaatatcttccctaatttctttgtatatattttgttatgccttaaaggccacctgctatacagttgttaaatcttaaatatgctttttaaaaattggaataatgtattaaggtcaaataatatcccataaaatatatatttctgctaatattagtaaatatcttaatttttcattagattcatatcatttaatttcacatattcaacacctttaaatgttgtaatcttaatatgcgaagtgtgcctctgcaagatactaacacaaagctcatgttaagaaaacagttgaggactcggaagtcagttgaaaatgcactttcctaacagtgaattcacaaccctgaacagcagcatttttggaaggcaaactgttcgtgatggtacaatgtaaatggggacttctgtaaagttctcagtttcggtccatgtggtttatctttacattttgaagatcaaagaagtctttacaacctgaatccaggtctaaaacacactagagtagctggtgactataaataatatttaaaaatgctgtgtctacaccatcaagactgtgtctacactatcttggctgaacgagaagagatgtaaatgctgggtggtcccgttgacccacggcgttgggtacaacaaaaccagccatcggagttacaccccaaagcaccatttgctgtccagctgcctgtcgtttggcccagaccaccctcagaaaaaaaccagctgcctctcccattctgccctcccgttctgccacagcggcctgggctggtccagtgctatgcctggaggctcaacacaaaacttcccatccaaacattcagatgaactgagcgtcttacacacgcagtacagaggagcacacattgggatagaaacagtagaataaccacgggcaattaaactttaaattttctgagcagcattttggtatttaaacatctcttgtaaaaagctgagacagtttgtaagaaaagaatccttaaaatctagatttataccattttttaaagtcccacctttcaatgtttaataaaacaaaaagagaaatccttaatctaaaagctaaattatttttgaatggaaatactactgagaccattgacactggataacagtaatgatcccattaccagataagattgactgatggggaaaaaaaaaaaaagaatggggtgtgaatgtaccaacactgaatcttacagcagttatctttctatggccattaggtacctagcagatgtgcacaatataaacaaaaagatatctggcctaccttactactaaaagcatttaacacatgcattttttggtactttcttttgttttctaaaagctacataaaggccttatttgacattttcactgataactgatcgcaccctcgtgttgcagtgttcgtcccctattcattaacagtgtgtgcaaatgcaaccccaggacacgttattgttctgatagatgctcacagggaatcaagcttctcgcccactccacggctctgagccccatccaagggcaagacttggtgcccagctggaaggacgaaagcacactttgtgaccgccatcctcaccagctgcatgcctgggctgcacactgctgaacgtgctcctctctccttctctgtacaatgattcagcatctcggcggaagaggaaaatggagctttttgaggctcgccaggtcccttttgttttcaccattaaaattccaaacccaaagcctttgtttgactgaaggagaagagagggaagtaagcttctgttcagcacctgaaccctagaaaaagagccagtttgctacgatgaaggtgacatttctctggtcatttgagagttcgaagtcaaagccgaggggcacaggctttggttcatgtctaggagccctctgtcagaatccttgaagccctttaatggtctaactggcatctcttgtatcaagaagtacctttaaggtagaccttttcagggtgccctcaggaaagggccctgctcatgtttttttcctgtccccttagaccaaccccaggtttccactgcaggggttctgcctgttcccaaactttttccattccaggaacaaaggagaagccactttccccaggacgcaggactctcccctccactgtccgggacagcgttcgccctttagcggggaggtcattacagcctcatggcctctaccaaggccccagatcacaggatctcctgggccttggagcacctcacgctgggggaatcaatccctgagggactcagaatcttctccgtgcaacctggaaagttcatctcttgtttccttcagtcaaagaaagtccattgtacataacaaaacagcccccaaacagcccagtgccgacaccattgttcctttcacactttcctttgttgcatgcagttgggttcaaatgccaaatagtgattagaagacgaccattctgatctgtgtgtgatctggtcactatgtgactgcctttacggtttctctccatgtgctatatgaatgaagaatgcataccagtgttttaaaaggtatttttatgtgtttttaaacacttttttaaatgagcctgacacctgtgtttcagcatttggagacatccccatgttattcttttaagtgtataattactgatacttttttgtttgtttgtttaactaagttgtgtttaatttatgtgcagtctttataatgtatgtatgttattacagttcaactatcatattttctttgattacatttataatttgatcttgctctgattataatgccagtgaatgttgctgaactctttgtatatgcaaattgcaagatttaaaccattctgatgcaaggacaaacctttactttgactacc

SEQ ID NO: 11430 - DNA, 3614 bp, Homo sapiens
  CDS (149)..(3283)
agttttgtttacttaccatggcaatagtggccttttagccactaaaagtgatgaaactggatggacaacgttttttgactatgacagtgaaggtcgtctgacaaatgttacgtttccaactggagtggtcacaaacctgcatggggacatggacaaggctatcacagtggacattgagtcatctagccgagaagaagatgtcagcatcacttcaaatctgtcctcgatcgattctttctacaccatggttcaagatcagttaagaaacagctaccagattggttatgacggctccctcagaattatctacgccagtggcctggactcacactaccaaacagagccgcacgttctggctggcaccgctaatccgacggttgccaaaagaaacatgactttgcctggcgagaacggtcaaaacttggtggaatggagattccgaaaagagcaagcccaagggaaagtcaatgtctttggccgcaagctcagggttaatggcagaaacctcctttcagttgactttgatcgaacaacaaagacagaaaagatctatgacgaccaccgtaaatttctactgaggatcgcctacgacacgtctgggcacccgactctctggctgccaagcagcaagctgatggccgtcaatgtcacctattcatccacaggtcaaattgccagcatccagcgaggcaccactagcgagaaagtagattatgacggacaggggaggatcgtgtctcgggtctttgctgatggtaaaacatggagttacacatatttagaaaagtccatggttcttctgcttcatagccagcggcagtacatcttcgaatacgatatgtgggaccgcctgtctgccatcaccatgcccagtgtggctcgccacaccatgcagaccatccgatccattggctactaccgcaacatatacaaccccccggaaagcaacgcctccatcatcacggactacaacgaggaagggctgcttctacaaacagctttcttgggtacaagtcggagggtcttattcaaatacagaaggcagactaggctctcagaaattttatatgatagcacaagagtcagttttacctatgatgaaacagcaggagtcctaaagacagtaaacctccagagtgatggttttatttgcaccattagatacaggcaaattggtcccctgattgacaggcagattttccgctttagtgaagatgggatggtaaatgcaagatttgactatagctatgacaacagctttcgagtgaccagcatgcagggtgtgatcaatgaaacgccactgcctattgatctgtatcagtttgatgacatttctggcaaagttgagcagtttggaaagtttggagttatatattatgatattaaccagatcatttctacagctgtaatgacctatacgaagcactttgatgctcatggccgtatcaaggagattcaatatgagatattcaggtcgctcatgtactggattacaattcagtatgataacatgggtcgggtaaccaagagagagattaaaatagggccctttgccaacaccaccaaatatgcttatgaatatgatgttgatggacagctccaaacagtttacctcaatgaaaagataatgtggcggtacaactacgatctgaatggaaacctccatttactgaacccaagtaacagtgcgcgtctgacaccccttcgctatgacctgcgagacagaatcactcgactgggtgatgttcaatatcggttggatgaagatggtttcctacgtcaaaggggcacggaaatctttgaatatagctccaaggggcttctaactcgagtttacagtaaaggcagtggctggacagtgatctaccgttatgacggcctgggaaggcgtgtttctagcaaaaccagtctaggacagcacctgcagtttttttatgctgacttaacttatcccactaggattactcatgtctacaaccattcgagttcagaaattacctccctgtattatgatctccaaggacatctttttgccatggaaatcagcagtggggatgaattctatattgcatcggataacacagggacaccactggctgtgttcagtagcaatgggcttatgctgaaacagattcagtacactgcatatggggaaatctattttgactctaatattgactttcaactggtaattggatttcatggtggcctgtatgacccactcaccaaattaatccactttggagaaagagattatgacattttggcaggacggtggacaacacctgacatagaaatctggaaaagaattgggaaggacccagctccttttaacttgtacatgtttaggaataacaaccctgcaagcaaaatccatgacgtgaaagattacatcacagatgttaacagctggctggtgacatttggtttccatctgcacaatgctattcctggattccctgttcccaaatttgatttaacagaaccttcttacgaacttgtgaagagtcagcagtgggatgatataccgcccatcttcggagtccagcagcaagtggcgcggcaggccaaggccttcctgtcgctggggaagatggccgaggtgcaggtgagccggcgccgggccggcggcgcgcagtcctggctgtggttcgccacggtcaagtcgctgatcggcaagggcgtcatgctggccgtcagccagggccgcgtgcagaccaacgtgctcaacatcgccaacgaggactgcatcaaggtggcggccgtgctcaacaacgccttctacctggagaacctgcacttcaccatcgagggcaaggacacgcactacttcatcaagaccaccacgcccgagagcgacctgggcacgctgcggttgaccagcggccgcaaggcgctggagaacggcatcaacgtgacggtgtcgcagtccaccacggtggtgaacggcaggacgcgcaggttcgcggacgtggagatgcagttcggcgcgctggcgctgcacgtgcgctacggcatgaccctggacgaggagaaggcgcgcatcctggagcaggcgcggcagcgcgcgctcgcccgggcctgggcgcgcgagcagcagcgcgtgcgcgacggcgaggagggcgcgcgcctctggacggagggcgagaagcggcagctgctgagcgccggcaaggtgcagggctacgacgggtactacgtactctcggtggagcagtaccccgagctggccgacagcgccaacaacatccagttcctgcggcagagcgagatcggcaggaggtaacgcccgggccgcgcccgccgagccgctcacgccctgcccacattgtcctgtggcacaacccgagtgggactctccaacgcccaagagccttcctcccgggggaatgagactgctgttacgacccacacccacaccgcgaaaacaaggaccgcttttttccgaatgaccttaaaggtgatcggctttaacgaatatgtttacatatgcatagcgctgcactcagtcggactgaacgtagccagaggaaaaaaaaatcatcaaggacaaaggcctcgacctgttgcgctgggccgtctgttccttctaggcactgtatttaactaacttt

SEQ ID NO: 11431 - protein, 1045 aa, Homo sapiens
MDKAITVDIESSSREEDVSITSNLSSIDSFYTMVQDQLRNSYQIGYDGSLRIIYASGLDSHYQTEPHVLAGTANPTVAKRNMTLPGENGQNLVEWRFRKEQAQGKVNVFGRKLRVNGRNLLSVDFDRTTKTEKIYDDHRKFLLRIAYDTSGHPTLWLPSSKLMAVNVTYSSTGQIASIQRGTTSEKVDYDGQGRIVSRVFADGKTWSYTYLEKSMVLLLHSQRQYIFEYDMWDRLSAITMPSVARHTMQTIRSIGYYRNIYNPPESNASIITDYNEEGLLLQTAFLGTSRRVLFKYRRQTRLSEILYDSTRVSFTYDETAGVLKTVNLQSDGFICTIRYRQIGPLIDRQIFRFSEDGMVNARFDYSYDNSFRVTSMQGVINETPLPIDLYQFDDISGKVEQFGKFGVIYYDINQIISTAVMTYTKHFDAHGRIKEIQYEIFRSLMYWITIQYDNMGRVTKREIKIGPFANTTKYAYEYDVDGQLQTVYLNEKIMWRYNYDLNGNLHLLNPSNSARLTPLRYDLRDRITRLGDVQYRLDEDGFLRQRGTEIFEYSSKGLLTRVYSKGSGWTVIYRYDGLGRRVSSKTSLGQHLQFFYADLTYPTRITHVYNHSSSEITSLYYDLQGHLFAMEISSGDEFYIASDNTGTPLAVFSSNGLMLKQIQYTAYGEIYFDSNIDFQLVIGFHGGLYDPLTKLIHFGERDYDILAGRWTTPDIEIWKRIGKDPAPFNLYMFRNNNPASKIHDVKDYITDVNSWLVTFGFHLHNAIPGFPVPKFDLTEPSYELVKSQQWDDIPPIFGVQQQVARQAKAFLSLGKMAEVQVSRRRAGGAQSWLWFATVKSLIGKGVMLAVSQGRVQTNVLNIANEDCIKVAAVLNNAFYLENLHFTIEGKDTHYFIKTTTPESDLGTLRLTSGRKALENGINVTVSQSTTVVNGRTRRFADVEMQFGALALHVRYGMTLDEEKARILEQARQRALARAWAREQQRVRDGEEGARLWTEGEKRQLLSAGKVQGYDGYYVLSVEQYPELADSANNIQFLRQSEIGRR

SEQ ID NO: 11432 - DNA, 2743 bp, Homo sapiens
  CDS (1173)..(2549)
agcaagcaggaagaggaggctttctaaggcggtcgctccgggaaatccgggccctaggattgtccactcatcccagtatcagcgagatacggggagatagagttagcgacagcgtgagccagagctggagcacgtttggtgagagaccagaaagcaatggaggccggagaggggaaggagcgcgttccgaaacaaaggcaagtcctgatattctttgttttgctgggcatagctcaggctagttgccagcctaggcactattcagtggccgaggaaacggagagtggctcctttgtggccaatttgttaaaagacctggggctggagataggagaacttgctgtgaggggggccagggtcgtttccaaaggaaaaaaaatgcatttgcagttcgataggcagaccggggatttgttgttaaatgagaaattggaccgggaggagctgtgcggccccacagagccctgtgtcctacctttccaggtgttactagaaaatcccttgcagttttttcaggcggagctacggattagggacgtaaatgatcattccccagttttcctagacaaagaaatacttttgaaaattccagaaagtatcactcctggaactactttcttaatagaacgtgcccaggacttggatgtaggaaccaacagtctccaaaattacacaatcagtcccaatttccactttcatcttaatttacaagacagtctcgatggcataatattaccacagctggtgctgaacagagccctggatcgcgaggagcagcctgagatcaggttaaccctcacagcgctagatggcgggagtccacccaggtccggcacggccctggtacggattgaagttgtggacatcaatgacaacgtcccagagttgcaaagctgctctatgaggtgcagatcccggaggacagccccgttggatcccaggttgccatcgtctctgccagggatttagacattggaactaatggagaaatatcttatgcattttcccaagcatctgaagacattcgcaaaacgtttcgattaagtgcaaaatcgggagaactgcttttaagacagaaactggatttcgaatccatccagacatacacagtaaatattcaggcgacagatggtgggggcctatctggaacttgtgtggtatttgtccaagtgatggatttgaatgacaatcctccggaactaactatgtcgacacttatcaatcagatcccagaaaacttgcaggacaccctcattgctgtattcagcgtttcagatcctgactccggagacaacggaaggatggtgtgctccatccaagatgatcttccttttttcttgaaaccttctgttgagaacttttacactctggtgataagcacggccctggaccgggagaccagatccgaatacaacatcaccatcaccgtcaccgacttcgggacacccaggctgaaaaccgagcacaacataaccgtgctggtctccgacgtcaatgacaacgcccccgccttcacccaaacctcctacaccctgttcgtccgcgagaacaacagccccgccctgcacatcggcagcgtcagcgccacagacagagactcgggcaccaacgcccaggtcacctactcgctgctgccgccccaggacccgcacctgcccctcgcctccctggtctccatcaacgcggacaacggccacctgttcgctctccagtcgctggactacgaggccctgcaggcgttcgagttccgcgtgggcgccgcagaccgcggctccccggcgttgagcagcgaggcgctggtgcgcgtgctggtgctggacgccaacgacaactcgcccttcgtgctgtacccgctgcagaacggctccgcgccctgcaccgagctggtgccccgggcggccgagccgggctacctggtgaccaaggtggtggcggtggacggcgactcgggccagaacgcctggctgtcgtaccagctgctcaaggccacggagcccgggctgttcggcgtgtgggcgcacaatggcgaggtgcgcaccgccaggctgctgagggagcgcgacgctgccaagcagaggctggtggtgctggtcaaggacaatggcgagcctccgcgctcggccaccgccacgctgcacgtgctcctggtggacggcttctcccagccctacctgctgctcccggaggcggcaccggcccaggcccaggccgacttgctcaccgtctacctggtggtggcgttggcctcggtgtcttcgctcttcctcttctcggtgctcctgttcgtggcggtgcggctgtgcaggaggagcagggcggcctcggtgggtcgctgctcggtgcccgagggcccctttccagggcagatggtggacgtgagcggcaccgggaccctgtcccagagctaccagtacgaggtgtgtctgactggagaatccgggacaaatgagttcaagttcctgaagccaattatccccaacttcgttgctcagggtgcagagagggttagcgaggcaaatcccagtttcaggaagggctttgaattcacttaagtgttaataaggatctactgaggctagtctcgtttaatttgtggaaagtccttttttaccgctttgcccattggaggtgtctccttttattagaaagtaaccatcttattccaattctatgcatgttactggtatttataaatgtatgagtttttttgcggtataataaatgtaaattttctttgtattct

SEQ ID NO: 11433 - protein, 459 aa, Homo sapiens
MDLNDNPPELTMSTLINQIPENLQDTLIAVFSVSDPDSGDNGRMVCSIQDDLPFFLKPSVENFYTLVISTALDRETRSEYNITITVTDFGTPRLKTEHNITVLVSDVNDNAPAFTQTSYTLFVRENNSPALHIGSVSATDRDSGTNAQVTYSLLPPQDPHLPLASLVSINADNGHLFALQSLDYEALQAFEFRVGAADRGSPALSSEALVRVLVLDANDNSPFVLYPLQNGSAPCTELVPRAAEPGYLVTKVVAVDGDSGQNAWLSYQLLKATEPGLFGVWAHNGEVRTARLLRERDAAKQRLVVLVKDNGEPPRSATATLHVLLVDGFSQPYLLLPEAAPAQAQADLLTVYLVVALASVSSLFLFSVLLFVAVRLCRRSRAASVGRCSVPEGPFPGQMVDVSGTGTLSQSYQYEVCLTGESGTNEFKFLKPIIPNFVAQGAERVSEANPSFRKGFEFT

SEQ ID NO: 11434 - DNA, 3404 bp, Homo sapiens
  CDS (526)..(1305)
agacacggaagtgctgggaggcgccgggagcccgttcggttgcgggtgtctctggccctgcggtcagccctgggaacgtcccggagagctagattcctagaggcccgattccgctagcccggaacagacaaagccagcgctcccgcccgctccccgacttaggatccgatgccggcagcgtcctggggcccccgtagcggggctggaccatgagcctgctggacggcctcgcttcctcgccgcgggctccgctgcagtccagcaaggccaggatgaaaaagctcccgaagaagagccagaatgagaagtaccggctgaagtacctgcggctgcgcaaagcggccaaggccacggtgtttgaaaatgctgctatttgtgatgaaattgctcgtcttgaggaaaaatttcttaaagcaaaagaagaaagaaggtacttgctaaagaagctcctccagcttcaggctctaactgaaggggaagtacaggctgcagctccttcccacagttccagtttgcccctgacttatggtgtggccagctctgtgggaactatacagggagctgggcctatttcagggcccagcactggggctgaggaaccatttgggaagaaaactaagaaggagaaaaaagaaaaaggcaaagagaacaacaaactggaagatcatcaccgaccgacctggctttcatgatgagagtgccatctaccccgtgggctattgcagtactcgaatatatgccagcatgaagtgcccagaccagaagtgtctatatacctgtcagatcaaggatggtggtgtgcagcctcagtttgaaattgttcctgaagatgacccccagaatgccattgtcagctcttctgcagatgcttgtcatgcagaactgctcaggactataagcactactatggggaaactaatgcctaacctgcttccagctggagctgacttttttggattttctcatccagccatccacaacctgatccagagctgtccaggagctcgaaaatgcatcaattaccagtgggtgaaatttgatgtgtgcaaacctggagatgggcagctacctgaggggctgccggagaatgatgcagctatgagctttgaagcctttcagagacagatctttgatgaagatcagaatgatccccttctgccaggatccttggacctcccagagcttcagcctgcagcctttgtgtcttcttaccagcccatgtacctgacacatgaacccttggtagatactcacctgcagcacttgaagtctccatcacagggtagcccaattcagtcttcagattgaacaagaagggatcagatgccacatcgtttttgtcgtgattaatttaacttaaactaaaattttgggtatatgaaagaaggcagcaattcagaagtaaagaagatactaacgtatttcatcatggaaggtcctgtggtgatggttttccctgggaaaaccttcagctgctttatttttagtaataaatttctcttgtcaattctgtttactttcatcttgtaatcgggatgtaatcttttttgcttagctctgcctgaggtaaagtaaacttcagcctcttataaacaagagtgatagagagctgcaggctgctacaacaaataccatagacaggttggtttataaataacatgaatttatttctcacagttctggatgctgggaagtccaagttcaaggagcgcagattcaatgtctggtgagggcccacttcctagttcttagacagctgtcttcctgcagtgtcctcacgtggtagaagaggaaggcagctctccggggtcccttttataagatcactaagccggttcatgagaggtctgctctcatgacctaatcacctcccaaaggccccacctcccaataccatcacattaggggttaggatttaacatgaattttggggacatataaacattaagtctgtagtagcagcagctgactaacgagggagatagggagattctgacaaacttctactcttgattgtgatcctaattcaaggaatatcaagtcccagcccctgcaacccaggctgctgcttaattttcatgtcagtatcatcaaaatccaatgttctgcttaaactcaagatggaaagtccagtccaaggtacactgttcatctttttcttcacattttgcacatccttcaaggggatctttaacctctttaacctttgtattgcacctcagataatgtgctttttagctcagtacactgaaaccatatgataacacaaattcacatataattgggggttagtcccatactctataacagacttagtcctgtcttttcattagccatgtaataatataactccatgttccatgcaactggatttttggaccctgttaatagcattaaggtagaggtttactctatcacctaacacctcaacactacctgtgggatgccttagttacccagcagcaggttaccaagggctgtctggaaagggagggacaaaaggacccagaagtagaagaatggggatggagtggtgagaattgaatggttaatgcactgccattcataattgccaattgaggacaacacaaatgggattggtactttatagtaataaatctgaccagcagagggagggatcaggcagcagtgtttagagcacaccacactggccactgtaaactgagaagctaagttaactggtattttatgattttgagtatagtctttttataagttgtatacactttacaatgtaaaagaaacaaactttgtataatagcaaatcgggaaggggactgcttaaaatgttaatgcagtgtttttctttttttctctgcataaatggcttgagcatactggcatttacacagaaatgatatatgctgcttttatcatataacaaatattttcccactattacagcctgagtaatacccgtattaaaagagcctcattttagaaagacatttaaaatttttggaacataccacatgtagaaaggttgaactggtttttcagctataatgcatatacaactatagtgtgtacgtataccacatatacatatacttgtatgaagatatgtgtaaaatgtttttactaaggatcatggatttaagaaacttgaaaagctgggcacggtggctcacgcctgtaatcccagcactttgggaggctgaggcgggtggatcaagaggtcaggagatcgagaccatcctggctaagtcggtctctaataaaaatacaaaaaattagccaggcgtggtggcacgcgcctgtagtcccagctactcgggaggctgaggcaggaagaatcgcttgaacccgggaggcagaggttgcagtgagccgagaccgcgccactgcactccagcctgggcaacagagcaaaactccaactc

SEQ ID NO: 11435 - protein, 260 aa, Homo sapiens
MVWPALWELYRELGLFQGPALGLRNHLGRKLRRRKKKKAKRTTNWKIITDRPGFHDESAIYPVGYCSTRIYASMKCPDQKCLYTCQIKDGGVQPQFEIVPEDDPQNAIVSSSADACHAELLRTISTTMGKLMPNLLPAGADFFGFSHPAIHNLIQSCPGARKCINYQWVKFDVCKPGDGQLPEGLPENDAAMSFEAFQRQIFDEDQNDPLLPGSLDLPELQPAAFVSSYQPMYLTHEPLVDTHLQHLKSPSQGSPIQSSD

SEQ ID NO: 11436 - DNA, 2286 bp, Homo sapiens
tttccccatgtctaattttgggatttcagtgaggccttttccatctgtccaggagaacagaagggaaaaaaagatacttgaaagaaactgaaggaaatttaaacaaagaaacacttgaaagaaactggaaagaaaaataatttttttatgtgaacaaattttgcaagaagaaaaaagcataaaagacactaacggcaaatctatgtttaaatggaaaatcgtctaactggagaagggcggtatccaccccacattcggatcccagggtcctgaggcctcgcattgagctgggggttccctctgagccccagtgtgtgtggaatcagtgcactcttgactgggcctgtagtaaggtgctcatggggtttgtcttctcacccaccatcagaggacttttaaaatcataggcgtagagagttagctatctgctgaattactgccactcttcttggtgggggctcctagctgtggctgggggctccaggcgcccctgtgattacctcctactgccaccatggcgctcattcagattccccactctcactaacattgcttccttttttgaccagcaggaaacagcaggtctggccagattctcacttgcccatcaatctcgttcttggatgatttccctcattgtgatgcttctggggcacgttgaccatatgcacctctagaacctaaccagggcttccttctaccagctgtgggcgggcttggtctggtaaccttgtctgctctgccattccactgctcctccatccactcgccaatcccaagagtctggcctccctccagccctgggcagactgaccagcaaggtggacctttacattcaagcacagctggcttttatgacataaagaactaaaggccgaaagaatctcttgctgctgcaaagaacagattttatatttcttcctctaatcttggcaaatgacctttaccttttggaaagatttcatattgcttcctcctccctggataggacctaatgtagcacagcgggactcaaagaggaggacattttctcttgccagtgcactgggcagtggggctgtccttcaactgctgctgccaaaattggttttctaaaattcttccagtagagactaaaagaagattcaattcctgtaacccaagactgagtcttagggctccagtctccacctgcttggtttcctatcctttgctgcctgcctggggtggcctggaagcctgttcagaaaggcacaatgtggagcctggggtgtctcccccaccccaggaccgtcaggtttaccagtgtgtgcaatcgccatgtattcagagggaagtacctttgttacctacaacttaggagctaggcctctgctacaagcacttgaaaatgatatttttatttttaacgtctcaacaatctgatatcggatgtcgtttaacctgggctcgtggtagggctccagcatttctccctccttcctggtttgcctgtaggggtagactcggaaggtgggtggggtgtgcatttcctgttaggagtgtatcagtgcttgtcttattataagcccctttcttttgtgaatttgaagtagcaccaacaagcctggattgtgaaggtattaagaatcggtctgtgggctactgagtgggtccttaggatactggcccagattttgccactgggtatggcagatcattttctaccatggcctgctgctcttgtagtggacttcctgagtccaatcccacctcctggtgtagaatttacactgctgcacctgaggtcgatgtttcaaagtaagatcaagccagtgttttgatctgggctctgagcacaagtcaggaaacaccaacatattcacactctcccagtaggttcctcagtccgatggtgaatggctattcgtaaatggctggtctggctctttggtgttggagcctttccaatagccccatgaaaagaagcatcacccaaggatattgtaaaaaggatgtaacaaggagatagggtagacattgtactcagtgggccttggggcctagcccagctctgagcagaggactgtggcattcactgtccttgagtgtttcaccttcttggataacacacgggccttctcttctggatttcatcagagattacagccagatgggggctgaagaccatcctcttgaccacagaggtgtgactgtgggaattcctcccaatttatggtttcccagaaaatcttagttccttttatttatagaatgcatgtcttttgtgttaagaaaccaaagagaaataaagagaacactcctaat

SEQ ID NO: 11437 - DNA, 2338 bp, Homo sapiens
  CDS (261)..(1838)
actcccgccttcatttcccatcgtgctgaggcgggtggcatggcggagaaggatgacaccggagtttgacgaagaggtggtttttgagaattctccactttaccaatacttacaggatctgggacacacagactttgaaatatgttcttctttgtcaccaaaaacagaaaaatgcacaacagagggacgacaaaagcctcctacaagagtcctaccaaaaggatctctcagtgctatttgccttcattagcttgctcgttatgcttcccgcttggtggattgtgtcttcctggctggtatggggagtgattctatttgtgtatctggtcataagagctttgagattatggaggacagccaaactacaagtgaccctaaaaaaatacagcgttcatttggaagatatggccacaaacagccgagcttttactaacctcgtgagaaaagctttacgtctcattcaagaaaccgaagtgatttccagaggatttacactggtcagtgctgcttgcccatttaataaagctggacagcatccaagtcagcatctcatcggtcttcggaaagctgtctaccgaactctaagagccaacttccaagcagcaaggctagctaccctatatatgctgaaaaactaccccctgaactctgagagtgacaatgtaaccaactacatctgtgtggtgccttttaaagagctgggccttggacttagtgaagagcagatttcagaagaggaagcacataactttacagatggcttcagcctgcctgcattgaaggttttgttccaactctgggtggcacagagttcagagttcttcagacgggtaataattcttgaagatgaacttgaaaagcttgtttgtactaaagaaacacaagaactagtgtcagaggcttatcccatcctagaacagaaattaaagttgattcagccccacgttcaagcaagcaacaattgctgggaagaggccatttctcaggtcgacaaactgctacgaagaaatacagataaaaaaggcaagcctgaaatagcatgtgaaaacccacattgtacagtagtacctttgaagcagcctactctacacattgcagacaaagatccaatcccagaggagcaggaattagaagcttatgtagatgatatagatattgatagtgatttcagaaaggatgatttttattacttgtctcaagaagacaaagagagacagaagcgtgagcatgaagaatccaagagggtgctccaagaattaaaatctgtgctgggatttaaagcttcagaggcagaaaggcagaagtggaagcaacttctatttagtgatcatgccgtgttgaaatccttgtctcctgtagacccagtggaacccataagtaattcagaaccatcaatgaattcagatatgggaaaagtcagtaaaaatgatactgaagaggaaagtaataaatccgccacaacagacaatgaaataagtaggactgagtatttatgtgaaaacgctctagaaggtaaaaataaagataattcttcaaatgaagtcttcccccaaggagcagaagaaagaatgtgttaccaatgtgagagtgaagatgaaccacaagcagatggaagtggtctgaccactgcccctccaactcccagggactcattacagccctccattaagcagaggctggcacggctacagctgtcaccagattttaccttcactgctggccttgctgcagaagtggctgctagatctctctcctttaccaccatgcaggaacagacttttggtgatgaggaggaagaacaaataatagaagaaaataaaaatgagatagaagaaaagtaagaaccaagattcatatgaagtgatattagattgttccttttacaaaagtgtttagcttcaagactggaaagggaatatgagtgtaagtttactatatataaagctaagatgtggatttacaggaagaaccctggtttgaataactgatctgaaattagtagttacctgtaaatggcagatcttttaggaaaataagagaaaggtaagggctcttttgaataaactgctgttttatttgtggcacaactgatcaatcttggaaattctttaagtatttttaataagaaatgaattatcatttcttgccagaatttgctaccttaaggtgattgggaaaattctgttgcaagaacattaacatttagtatgactcctttttactgtattcttgcagttaataactgcagctattatgttaataacaagttgtttgtattttatttttgtttataccagtcttaaagatccaggttctgaataaaaaaattaattgatac

SEQ ID NO: 11438 - protein, 526 aa, Homo sapiens [sequence omitted]

SEQ ID NO: 11439 - DNA, 2167 bp, Homo sapiens
  CDS (232)..(870)
gaagctgcctccgccatcttggagatgggagacgggcgatggctgtggtccttctgctaatgcaaacaacaaaacgggcacactagtcacccccgagggaggccaccatcactgtaactgttggccaaagctacaaaagaagcgagggaatccaaccgagcgcagcgacactgagaacagcttcccctgccttctgcggcggcagaagtgaagtgcctgaggaccggaaggatggtgcagtcctgctccgcctacggctgcaagaaccgctacgacaaggacaagcccgtttctttccacaagtttcctcttactcgacccagtctttgtaaagaatgggaggcagctgtcagaagaaaaaactttaaacccaccaagtatagcagtatttgttcagagcactttactccagactgctttaagagagagtgcaacaacaagttactgaaagagaatgctgtgcccacaatatttctttgtactgagccacatgacaagaaagaagatcttctggagccacaggaacagcttcccccacctcctttaccgcctcctgtttcccaggttgatgctgctattggattactaatgccgcctcttcagacccctgttaatctctcagttttctgtgaccacaactatactgtggaggatacaatgcaccagcggaaaaggattcatcagctagaacagcaagttgaaaaactcagaaagaagctcaagaccgcacagcagcgatgcagaaggcaagaacggcagcttgaaaaattaaaggaggttgttcacttccagaaagagaaagacgacgtatcagaaagaggttatgtgattctaccaaatgactactttgaaatagttgaagtaccagcataaaaaaatgaaatgtgtattgatttctaatggggcaataccacatatcctcctctagcctgtaaaggagtttcatttaaaaaaataacatttgattacttatataaaaacagttcagaatatttttttaaaaaaaattctatatatactgtaaaattataaatttttttgtttgtaatttcaggttttttacattttaacaaaatattttaaaagttataaactaacctcagacctctaatgtaagttggtttcaagattggggattttggggtttttttttttagtatttatagaaataatgtaaaaataaaaagtaaagagaatgagaacagtgtggtaaaagggagatttcagtttaaaacttaaaattagtactgttttattgagagaatttagttatattttaaatcagaagtatgggtcagatcatgggacataacttcttagaatatatatatacatatgtacatattctcatatgtaaagtcacaaggttcatttatctttctgaatcagttatcaaagataaattggcaagtcagtacttaagaaaaaagatttgattatcatcacagcagaaaaaagtcattgcatatctgatcaataacttcagattctaagagtggatttttttttttttacatgggctcctattttttcccctactgtcttgcattataaaattagaagtgtattttcagtggaagaaacatttttcaataaataaagtaaggcattgtcatcaatgaagtaattaaaactgggacctgatctatgatacgcttttttctttcattacaccctagctgaaggacatccagttccccagctgtagttatgtatctgccttcaagtctctgacaaatgtgctgtgttagtagagtttgatttgtatcatatgataatcttgcacttgactgagttgggacaaggcttcacataaaaaattatttcttcacttttaacacaagttagaaattatatcccatttagttaaatgcgtgatttatattcagaacaacctactatgtagcgtttattttactgaatgtggagatttaaacactgaggtttctgttcaaactgtgagttctgttctttgtgagaaattttacatatattggaagtgaaaatatgttctgagtaaacaaatattgctatgggagttatctttttagatttagaataactgttccaatgataattattacttttatatttcaaagtacactaagatcgttgaagagcaatagaacctttaagacagtattaaaggtgtgaagcaatggcattc

SEQ ID NO: 11440 - protein, 213 aa, Homo sapiens
MVQSCSAYGCKNRYDKDKPVSFHKFPLTRPSLCKEWEAAVRRKNFKPTKYSSICSEHFTPDCFKRECNNKLLKENAVPTIFLCTEPHDKKEDLLEPQEQLPPPPLPPPVSQVDAAIGLLMPPLQTPVNLSVFCDHNYTVEDTMHQRKRIHQLEQQVEKLRKKLKTAQQRCRRQERQLEKLKEVVHFQKEKDDVSERGYVILPNDYFEIVEVPA

SEQ ID NO: 11441 - DNA, 2244 bp, Homo sapiens
  CDS (87)..(1340)
cagctgaatgggcgcgagagcggcgctgggggcgggtgggggcgcggggtaccgggctggcggccggccggcgccccctcattagtatgcggacgaaggcggcgggctgcgcggagcggcgtcccctgcagccgcggaccgaggcagcggcggcacctgccggccgagcaatgccaagtgagtacacctatgtgaaactgagaagtgattgctcgaggccttccctgcaatggtacacccgagctcaaagcaagatgagaaggcccagcttgttattaaaagacatcctcaaatgtacattgcttgtgtttggagtgtggatcctttatatcctcaagttaaattatactactgaagaatgtgacatgaaaaaaatgcattatgtggaccctgaccatgtaaagagagctcagaaatatgctcagcaagtcttgcagaaggaatgtcgtcccaagtttgccaagacatcaatggcgctgttatttgagcacaggtatagcgtggacttactcccttttgtgcagaaggcccccaaagacagtgaagctgagtccaagtacgatcctccttttgggttccggaagttctccagtaaagtccagaccctcttggaactcttgccagagcacgacctccctgaacacttgaaagccaagacctgtcggcgctgtgtggttattggaagcggaggaatactgcacggattagaactgggccacaccctgaaccagttcgatgttgtgataaggttaaacagtgcaccagttgagggatattcagaacatgttggaaataaaactactataaggatgacttatccagagggcgcaccactgtctgaccttgaatattattccaatgacttatttgttgctgttttatttaagagtgttgatttcaactggcttcaagcaatggtaaaaaaggaaaccctgccattctgggtacgactcttcttttggaagcaggtggcagaaaaaatcccactgcagccaaaacatttcaggattttgaatccagttatcatcaaagagactgcctttgacatccttcagtactcagagcctcagtcaaggttctggggccgagataagaacgtccccacaatcggtgtcattgccgttgtcttagccacacatctgtgcgatgaagtcagtttggcgggttttggatatgacctcaatcaacccagaacacctttgcactacttcgacagtcaatgcatggctgctatgaactttcagaccatgcataatgtgacaacggaaaccaagttcctcttaaagctggtcaaagagggagtggtgaaagatctcagtggaggcattgatcgtgaattttgaacacagaaaacctcagttgaaaatgcaactctaactctgagagctgtttttgacagccttcttgatgtatttctccatcctgcagatactttgaagtgcagctcatgtttttaacttttaatttaaaaacacaaaaaaaattttagctcttcccacttttttttttcctatttatttgaggtcagtgtttgtttttgcacaccattttgtaaatgaaacttaagaattgaattggaaagacttctcaaagagaattgtatgtaacgatgttgtattgatctttaagaaagtaatttaatttgtaaaacttctgctcgtttacactgcacattgaatacaggtaactaattggaaggagaggggaggtcactcttttgatggtggccctgaacctcattctggttccctgctgcgctgcttggtgtgacccacggaggatccactcccaggatgacgtgctccgtagctctgctgctgatactgggtctgcgatgcagcggcgtgaggcctgggctggttggagaaggtcacaacccttctctgttggtctgccttctgctgaaagactcgagaaccaaccagggaagctgtcctggaggtccctggtcggagagggacatagaatctgtgacctctgacaactgtgaagccaccctgggctacagaaaccacagtcttcccagcaattattacaattcttgaattccttggggattttttactgccctttcaaagcacttaagtgttagatctaacgtgttccagtgtctgtctgaggtgacttaaaaaatcagaacaaaacttctattatccagagtcatgggagagtacaccctttccaggaataatgttttgggaaacactgaaatgaaatcttcccagtattataaattgtgtattt

SEQ ID NO: 11442 - protein, 418 aa, Homo sapiens
MRTKAAGCAERRPLQPRTEAAAAPAGRAMPSEYTYVKLRSDCSRPSLQWYTRAQSKMRRPSLLLKDILKCTLLVFGVWILYILKLNYTTEECDMKKMHYVDPDHVKRAQKYAQQVLQKECRPKFAKTSMALLFEHRYSVDLLPFVQKAPKDSEAESKYDPPFGFRKFSSKVQTLLELLPEHDLPEHLKAKTCRRCVVIGSGGILHGLELGHTLNQFDVVIRLNSAPVEGYSEHVGNKTTIRMTYPEGAPLSDLEYYSNDLFVAVLFKSVDFNWLQAMVKKETLPFWVRLFFWKQVAEKIPLQPKHFRILNPVIIKETAFDILQYSEPQSRFWGRDKNVPTIGVIAVVLATHLCDEVSLAGFGYDLNQPRTPLHYFDSQCMAAMNFQTMHNVTTETKFLLKLVKEGVVKDLSGGIDREF

SEQ ID NO: 11443 - DNA, 1259 bp, Homo sapiens
  CDS (209)..(1240)
aagtctcgtatcgcgcccgggaggcgccggagcccagcggctggcgccagatccaggctcctggaagaaccatgtccggcagctactggtcatgccaggcacacactgctgcccaagaggagctgctgtttgaattatctgtgaatgttgggaagaggaatgccagagctgccggctgaaaattacccaaccaagagaaatctgcaggatggactttctggtcctcttcttgttctacctggcttcggtgctgatgggtcttgttcttatctgcgtctgctcgaaaacccatagcttgaaaggcctggccaggggaggagcacagatattttcctgtataattccagaatgtcttcagagagccgtgcatggattgcttcattaccttttccatacgagaaaccacaccttcattgtcctgcacctggtcttgcaagggatggtttatactgagtacacctgggaagtatttggctactgtcaggagctggagttgtccttgcattaccttcttctgccctatctgctgctaggtgtaaacctgttttttttcaccctgacttgtggaaccaatcctggcattataacaaaagcaaatgaattattatttcttcatgtttatgaatttgatgaagtgatgtttccaaagaacgtgaggtgctctacttgtgatttaaggaaaccagctcgatccaagcactgcagtgtgtgtaactggtgtgtgcaccgtttcgaccatcactgtgtttgggtgaacaactgcatcggggcctggaacatcaggtacttcctcatctacgtcttgaccttgacggcctcggctgccaccgtcgccattgtgagcaccacttttctggtccacttggtggtgatgtcagatttataccaggagacttacatcgatgaccttggacacctccatgttatggacacggtctttcttattcagtacctgttcctgacttttccacggattgtcttcatgctgggctttgtcgtggttctgagcttcctcctgggtggctacctgttgtttgtcctgtatctggcggccaccaaccagactactaacgagtggtacagaggtgactgggcctggtgccagcgttgtccccttgtggcctggcctccgtcagcagagccccaagtccaccggaacattcactcccatgggcttcggagcaaccttcaagagatctttctacctgcctttccatgtcatgagaggaagaaacaagaatgacaagtgtatgactgcc

SEQ ID NO: 11444 - protein, 344 aa, Homo sapiens
MDFLVLFLFYLASVLMGLVLICVCSKTHSLKGLARGGAQIFSCIIPECLQRAVHGLLHYLFHTRNHTFIVLHLVLQGMVYTEYTWEVFGYCQELELSLHYLLLPYLLLGVNLFFFTLTCGTNPGIITKANELLFLHVYEFDEVMFPKNVRCSTCDLRKPARSKHCSVCNWCVHRFDHHCVWVNNCIGAWNIRYFLIYVLTLTASAATVAIVSTTFLVHLVVMSDLYQETYIDDLGHLHVMDTVFLIQYLFLTFPRIVFMLGFVVVLSFLLGGYLLFVLYLAATNQTTNEWYRGDWAWCQRCPLVAWPPSAEPQVHRNIHSHGLRSNLQEIFLPAFPCHERKKQE

SEQ ID NO: 11445 - DNA, 2512 bp, Homo sapiens
  CDS (21)..(2510)
gcggggcctctaccggcccgatggagcgcgcgggcgctactagccgcgggggccaagcccctggcttcttactgcggcttcatactgagggccgagccgaggcggcgcgggtgcaggagcaggacttacggcagtgggggctgacagggattcacctacgctcttaccagctggagggagtaaactggctcgcccagcgcttccattgtcagaatggctgtatcctgggagatgagatgggcctggggaagacctgccagactattgctctcttcatttatttggcaggaagattaaatgatgaagggccatttctgattctttgtcccttgtctgttttgagcaactggaaagaagaaatgcagagatttgctccaggtctttcctgtgtaacatatgcaggcgacaaggaggaaagagcctgccttcagcaagacctgaaacaggagtcacgttttcatgtgctactgactacctatgagatttgcttgaaagatgcatcatttctaaaatcattcccttggagtgttcttgttgtggatgaagctcacaggttgaaaaaccaaagctccctgctgcataagaccttgtcagagttctcagtagtcttcagtctcctgttgaccggaactcccatccagaacagcctccaagagctctactccctcctcagttttgtggagcctgatctcttttccaaggaagaggtgggagattttattcaacgctaccaggatattgagaaagaatctgagtcagcaagtgaactgcacaaactcttgcagccatttctgctgaggcgagtgaaagctgaggtagctacagagcttcccaagaagacagaagtagtgatataccatggcatgtcagcattgcagaagaaatactacaaggccattttgatgaaagacctagatgcatttgaaaatgagacggcaaagaaggttaaactacagaacattttgtcccagcttcgaaagtgtgtggatcacccatatttgtttgatggtgtggagccggagccttttgaagttggagaccacctgactgaggctagtgggaagcttcacctgctggataagctactagcattcctgtattctgggggccatcgggttttacttttctcccaaatgacccagatgttggatattctccaagactatatggattacagaggctacagctatgagcgtgtggatggttctgtgagaggagaagagagacacttggccattaagaactttggacagcagcccattttcgtttttctcctgagtactagggcaggtggagttggcatgaacttaacagcagcagatactgtgatttttgttgacagtgactttaatcctcagaatgacttgcaagcagctgccagggctcatcgcattggccaaaacaagtctgttaaagttattcggctgattggtcgagacactgtggaagaaatagtctataggaaagcagcctccaaactgcagctcaccaacatgatcatagaaggaggccattttactctgggagcccagaaacccgctgccgatgctgacctccagttgagtgagatactcaaatttggtttggataaactgctggcctctgaggggagcaccatggatgaaatagacctggagtccatcctgggagaaacaaaagatggccagtgggtctctgatgccttgcctgcagcagaaggagggagcagagatcaagaggaaggaaaaaatcatatgtacttatttgaaggtaaagattattctaaagagcccagtaaggaagacagaaaatcatttgaacaactggtaaaccttcagaaaacccttttggagaaagctagtcaagagggccgatcactccgaaataaaggcagtgttctcatcccaggccttgtggagggatctaccaaaaggaagcgggttctgagtccagaagagctggaggacagacagaagaaaagacaagaagcagctgccaagagaaggagactcatagaggagaagaagaggcaaaaggaagaggctgaacataagaaaaaggtggcctggtgggaatccaacaattaccagtccttctgcctgccctctgaggagagcgagccagaggaccttgagaatggggaagagagctctgctgagctggattaccaagacccagatgctacttccctcaagtacgttagtggtgatgtcacccaccctcaggctggggccgaggatgctctcattgtgcactgcgtagatgactctggccactggggcagaggtggtttatttacagctctggaaaagcgatccgctgagccaagaaaaatatatgagctggctgggaaaatgaaagacctgagtttgggaggtgtccttttatttcctgttgatgataaagaatcaagaaacaaagggcaagatttgttggccttgattgtggctcagcatcgtgatcgttccaatgtcctgtctggcattaagatggcagccctagaagagggcctgaagaagatatttttagcagc

SEQ ID NO: 11446 - protein, 830 aa, Homo sapiens
MERAGATSRGGQAPGFLLRLHTEGRAEAARVQEQDLRQWGLTGIHLRSYQLEGVNWLAQRFHCQNGCILGDEMGLGKTCQTIALFIYLAGRLNDEGPFLILCPLSVLSNWKEEMQRFAPGLSCVTYAGDKEERACLQQDLKQESRFHVLLTTYEICLKDASFLKSFPWSVLVVDEAHRLKNQSSLLHKTLSEFSVVFSLLLTGTPIQNSLQELYSLLSFVEPDLFSKEEVGDFIQRYQDIEKESESASELHKLLQPFLLRRVKAEVATELPKKTEVVIYHGMSALQKKYYKAILMKDLDAFENETAKKVKLQNILSQLRKCVDHPYLFDGVEPEPFEVGDHLTEASGKLHLLDKLLAFLYSGGHRVLLFSQMTQMLDILQDYMDYRGYSYERVDGSVRGEERHLAIKNFGQQPIFVFLLSTRAGGVGMNLTAADTVIFVDSDFNPQNDLQAAARAHRIGQNKSVKVIRLIGRDTVEEIVYRKAASKLQLTNMIIEGGHFTLGAQKPAADADLQLSEILKFGLDKLLASEGSTMDEIDLESILGETKDGQWVSDALPAAEGGSRDQEEGKNHMYLFEGKDYSKEPSKEDRKSFEQLVNLQKTLLEKASQEGRSLRNKGSVLIPGLVEGSTKRKRVLSPEELEDRQKKRQEAAAKRRRLIEEKKRQKEEAEHKKKVAWWESNNYQSFCLPSEESEPEDLENGEESSAELDYQDPDATSLKYVSGDVTHPQAGAEDALIVHCVDDSGHWGRGGLFTALEKRSAEPRKIYELAGKMKDLSLGGVLLFPVDDKESRNKGQDLLALIVAQHRDRSNVLSGIKMAALEEGLKKIFLA

SEQ ID NO: 11447 - DNA, 2286 bp, Homo sapiens
  CDS (169)..(2286)
cagagcgtcggcgccacggccgagaacacatcttcgccgccgagctgagctgggccgagccggaggttgtggtgtctgactgcgctgggcaccctcgggccgcagcggtgctctggggccaggtgccaccggccattgtccaggcagctgtgtgcaagccaaagaagcatgaggacactggaagactcctcggggacagtcctgcaccgcctcatccaggagcagctgcgctacggcaacctgactgagacgcgcacgctgctagccatccagcagcaggccctgaggggtggggctggaactgggggtacagggagcccccaggcctccctggagatcctggccccagaggacagtcaggtgctgcagcaggccaccaggcaggagccccagggccaggagcaccagggcggtgagaaccacctggcagagaacaccctctaccggctatgcccacagcccagcaagggagaggagctgcccacctatgaggaggccaaagcccactcgcagtactatgcggcccagcaggcagggacccggccacatgcgggggaccgagatccccgtggggccccgggaggcagtcggaggcaggacgaggccctgcgggagctgaggcatgggcacgtgcgctcgttgagtgaacggctccttcagttgtccctggagaggaacggcgcccgggcccccagccacatgagctcctcccacagcttcccacagctggcccgcaaccagcagggccccccactgaggggcccccctgctgagggcccagagtcccgaggacccccacctcagtaccctcatgttgtactagctcatgagaccaccactgctgtcactgacccacggtaccgtgcccgcggcagcccgcacttccagcatgctgaagtcaggatcctgcaggcccaggtgcctcctgtgttcctccaacagcagcagcagtaccagtacctgcagcaatctcaggagcacccccctcccccacatccagctgctctcggccatggccccctgagctccctcagtccacctgctgtggaggggccagtgagtgcccaggcctcctcagccacctcgggcagtgcccacctggcccagatggaggccgtgctgagggagaatgccaggctgcagagagacaatgagcggctgcagagggagctggagagctctgcggagaaggctggccgcattgagaagctggaaagcgaaatccagcggctctctgaggcccatgagagcctgaccagagcctcctccaagcgtgaggccctggagaagaccatgcggaacaagatggacagtgaaatgaggaggctgcaagacttcaaccgggatcttagagagagattggaatctgcaaatcgccgcctggcaagcaagacacaggaggcccaggccggcagtcaggacatggtggccaagctgcttgctcagagctacgaacagcagcaggagcaagagaagctggagcgagagatggcactgctgcgcggcgccatcgaggaccagcggcggcgtgccgagctgctggagcaggctctgggcaatgcgcagggccgggcagctcgagccgaagaggagctgcgcaagaagcaggcctatgtggagaaagtggagcggctgcagcaggcgctcgggcagctgcaggcagcctgtgagaagcgggagcagctggagctgcgtctgcggactcgcctggagcaggaactcaaggccctgcgtgcacagcagagacaggcaggtgccccaggtggtagcagtggcagtggtgggtctccagagctcagcgccctgcgactgtcagaacaactgcgagagaaggaggagcagatcctggcgctggaggccgacatgaccatgtgggagcagaagtatttggaggaacatgccatgaggcagtttgccatggatgcggctgccacggctgctgctcagcgtgacaccactctcatccgacattccccccagccctcacccagcagcagcttcaatgagggtctgctcactggtggccacaggcatcaggagatggaaagcaggttaaaggtgctccatgcccagatcctggagaaggatgcagtgatcaaggtccttcagcagcgctccaggagagaccctggcaaggccatccagggctccctgcggcctgccaagtcggtgccatctgttttcgcggctgcggcagcaggaacccagggctggcaagggctctcttctagtgagcgacaaacagcagacgcccctgctcggctgactacagcagacagagcaccc

SEQ ID NO: 11448 - protein, 706 aa, Homo sapiens
MRTLEDSSGTVLHRLIQEQLRYGNLTETRTLLAIQQQALRGGAGTGGTGSPQASLEILAPEDSQVLQQATRQEPQGQEHQGGENHLAENTLYRLCPQPSKGEELPTYEEAKAHSQYYAAQQAGTRPHAGDRDPRGAPGGSRRQDEALRELRHGHVRSLSERLLQLSLERNGARAPSHMSSSHSFPQLARNQQGPPLRGPPAEGPESRGPPPQYPHVVLAHETTTAVTDPRYRARGSPHFQHAEVRILQAQVPPVFLQQQQQYQYLQQSQEHPPPPHPAALGHGPLSSLSPPAVEGPVSAQASSATSGSAHLAQMEAVLRENARLQRDNERLQRELESSAEKAGRIEKLESEIQRLSEAHESLTRASSKREALEKTMRNKMDSEMRRLQDFNRDLRERLESANRRLASKTQEAQAGSQDMVAKLLAQSYEQQQEQEKLEREMALLRGAIEDQRRRAELLEQALGNAQGRAARAEEELRKKQAYVEKVERLQQALGQLQAACEKREQLELRLRTRLEQELKALRAQQRQAGAPGGSSGSGGSPELSALRLSEQLREKEEQILALEADMTMWEQKYLEEHAMRQFAMDAAATAAAQRDTTLIRHSPQPSPSSSFNEGLLTGGHRHQEMESRLKVLHAQILEKDAVIKVLQQRSRRDPGKAIQGSLRPAKSVPSVFAAAAAGTQGWQGLSSSERQTADAPARLTTADRAP

SEQ ID NO: 11449 - DNA, 2256 bp, Homo sapiens
  CDS (82)..(1350)
gtcgtcgctgccgccgccaccgccctcggccgctgccgccgccaccgccctcggccgctgccgaggcctcctgcagccatcatgtccgccagcgccgtctacgtgctggacctgaagggcaaggtgctcatctgccggaactaccgtggcgacgtggacatgtcagaggtggagcacttcatgcccatcctgatggagaaggaggaggaggggatgctgtcgcccatcctggcccacgggggggtccgtttcatgtggatcaaacacaacaacctgtatctggttgccacatccaagaagaacgcgtgcgtgtcgctggtcttttctttcctctataaggtggtgcaggtgttttccgagtacttcaaggagctggaggaggagagcatccgggacaactttgttatcatctacgagctgctggacgagctcatggacttcggctacccccagaccaccgacagcaagatcctgcaggagtacatcactcaggaaggccacaagctggaaacaggggccccgcggccaccagccaccgtcaccaacgcggtgtcctggcggtccgaaggcatcaagtatcggaagaatgaggtgttcttggacgtcatcgagtctgtcaacctcttggtcagcgccaacggcaatgtcctgcgcagcgagatcgtgggctccatcaagatgcgagtcttcctctcgggcatgcccgagctgcgcctgggcctcaacgacaaggtcctctttgacaacacgggccgcggcaaaagcaaatccgtggagctggaggatgtgaagttccaccagtgtgtgcggctatcacgcttcgagaatgaccgcaccatctccttcatcccacccgacggcgagttcgagctcatgtcctaccgtctcaacacccacgtcaagccttcgatatggatcgagtcggtgatcgagaagcactcccacagccgcatcgagtacatgatcaaggccaaaagccagttcaagcggcggtcaacagccaacaacgtggagatccacattcccgtgcccaatgatgccgactcacccaagttcaagacgacggtggggagcgttaagtgggtccccgagaacagcgagatcgtgtggtccatcaagtccttcccgggcggcaaggagtacctgatgcgggcccacttcggcctgcctagtgtggaggccgaagacaaggagggcaagcccccgatcagtgtcaagttcgagatcccttacttcactacctccggcatccaggtgcgctacctgaagatcattgagaagagtgggtaccaggccctgccctgggtgcgttatatcacgcagaatggagattaccagctccggacccagtgaggggctgtcgcagccaacaccccggcctcggggctcctggtggcagcaccaggggacacacctgccaaacccaccagatggaggggccctccctggtctctggccaccctcccagcctctgcccagggacccctgccttccccaggccatctgctctgccgtcgacactcgtctcagaagcccctttcccagaagaggctggtcttcaagaagtctcgtttctttgcccctgaagtcagtttcaggggaaggatgtgaaatttttccgtgtagaggttacagccttttatgctgttgagctcccaggtaccaaaaagcttggccaacgcttgccagccagccagctgcaggtggcatctgccacgaaggaagcgccagcctcgccaggccagcaggggcgtcgttttgttgccattttgttgaacgttatgggtttatgggtgttcctggaacttgtctttgtgcattcgttgctgtttgtgttaccctcactgtccccatgtcccacccacgtcctacggcactcaggaagcacttggtgaggacgagccctcacccttcttgtcttccttcccagcagcgcccgcagcgggccatttacacgtcgaggctggcacctggcgcgctcgggggccactgtagcgtctgcctgctccctggactcgcaggcctcgcctgtggcgccttcccagggccagcctgggtcacgagatgctgtcactcagccagatcagtattgacccaccaggggaggtggggtttggtgagagacgccagcctcagactttttcccactgagggtccagagagcggggccacgtgtcacccacgtctgcgcttggtcacccgtcctccccaccctgtgtgtgtttatgtcatagttacattaaattccattcattg

SEQ ID NO: 11450 - protein, 423 aa, Homo sapiens [sequence omitted]

SEQ ID NO: 11451 - DNA, 2339 bp, Homo sapiens
  CDS (150)..(1367)
attttgcgggaagaggaggcgctgtacctgcagtgctgcttttcttgcctagactctaggaactatccgagctccactccccacaacatactcaaaggaacggagagaaccgggacccccctgcggggacccggaactgatctgacaggatggcatctgatgactttgacatagtgattgaggccatgctggaagctccctataaaaaagaagaggatgagcaacaaaggaaagaagttaaaaaggattatcctagcaataccaccagcagcaccagcaacagtggcaatgagaccagtggaagcagcaccatcggggagacaagcaatcgtagtcgagatcgggatcggtatagacggagaaatagtcggagccgaagtccaggtcggcagtgtcgtcaccgtagccgtagctgggatcgtcgacatggtagtgagtcgcgaagtcgggaccatcgtcgtgaggatcgtgtgcattacaggagtcctccacttaccactggggagccagttgataatctgagtcctgaggagcgtgatgcccgcacagttttctgtatgcagttagctgcccgaattcggcctcgagatctggaggactttttctctgctgtaggcaaggttcgcgatgtacgtatcatttcagatcggaactcacgtcgttctaagggcattgcctacgtggaattctgtgaaatccagtctgtgccactggccattgggctgactgggcagcggttgctgggagtgcctatcattgtacaggcttcacaggcagagaaaaaccgactggcagccatggccaacaacctgcaaaagggcaatggtggaccaatgcgcctctatgtgggttccctgcacttcaatatcactgaagacatgctccggggcatctttgagccctttggtaaaattgataatattgtcctgatgaaggactcagatacaggccgctctaaaggttatggtttcatcacgttctctgattctgagtgtgcccggcgggccctggaacagttgaatgggtttgagcttgctggtcgacctatgagggttggccatgtgactgagcgactggatggtggcacagacatcacttttcctgatggggaccaggagctggatctgggatcagcaggtggacgttttcagctcatggcaaaactggcagaaggcgctggaatccaactgccaagcactgctgctgctgctgctgccgccgccgccgcccaggctgctgccttgcaactgaatggagcagttcccttgggggccctgaatccagcagctctgactgctctgagtccagccctgaaccttgcctcccagtgtttccagctctccagcctctttaccccccagaccatgtaaatcagtggcacagtatactgcctccttgtgcctctggatcctgccacttcacatctactcttccatggccccatttctccattttgtggaccaagccatcctgagggcatggacattgtctctgaggaaattggggccacccttaagataccaagaaaagctcctgcccatggtcccactggaaatggactctgctgagcaaagccaccagttgaagagaacagaatccacacctgcattgaatacctgtttctccatgtgtatcgtctctgagattaccttcttgccctttccaacaccttagtgattcctcaatttctcccccattgggaaggccatagggcattaactgaaggaactgacctctctccttttcctgtacctttaacctttagtctgtcaaggaaaacccttaggacctctgaatcaagaggactgagtttgtgggtgaaccttgaaggtgctctttctgctacaagggccctgggagatagcatggacgtgcattgagaagccagcctcagaccttagcttgaagcagcttgaggccagacctactgtagcctcagcatcttgctaggaggcatggaagtgatctatcctgccaggaggcctcagagtgatctgtcctgccaggaggtgtgagagtgatctgtcctgtgaggcatttaggggctttcaggaatttagtaaaaggtggagtatgcctttccagtatcttccatcttcctttgtatacttgtccttcctcccatttcctccctttggcccgaggtaggaggatggagggaggctgctactctaccacttcctgtgtgcctctactgtggcctcaaccctggcaattatagctactcccatcccttacctgggcatgtgtgagcccttctcactggattttatacccttgtgtctgtgtacataaatatatatacatatatatatacataaaaactttgtacaaaaggc

SEQ ID NO: 11452 - protein, 406 aa, Homo sapiens
MASDDFDIVIEAMLEAPYKKEEDEQQRKEVKKDYPSNTTSSTSNSGNETSGSSTIGETSNRSRDRDRYRRRNSRSRSPGRQCRHRSRSWDRRHGSESRSRDHRREDRVHYRSPPLTTGEPVDNLSPEERDARTVFCMQLAARIRPRDLEDFFSAVGKVRDVRIISDRNSRRSKGIAYVEFCEIQSVPLAIGLTGQRLLGVPIIVQASQAEKNRLAAMANNLQKGNGGPMRLYVGSLHFNITEDMLRGIFEPFGKIDNIVLMKDSDTGRSKGYGFITFSDSECARRALEQLNGFELAGRPMRVGHVTERLDGGTDITFPDGDQELDLGSAGGRFQLMAKLAEGAGIQLPSTAAAAAAAAAAQAAALQLNGAVPLGALNPAALTALSPALNLASQCFQLSSLFTPQTM

SEQ ID NO: 11453 - DNA, 3071 bp, Homo sapiens
  CDS (68)..(889)
attttttggattgtactgcatttgcaagagaccttatcctgatcctgaagacgagattccagatgagatgatccagtgcgtagtctgtgaagactggttccatggaaggcatcttggtgccactccccctgagagtggggattttcaggagatggtatgccaggcctgcatgaaacgttgttcttttttgtgggcttatgctgcacaattggcagtaaccaaaatatccactgaggatgatggattggtgcggaacattgatggaataggtgatcaggaagttatcaaacctgaaaatggagagcatcaagatagtaccctcaaagaggatgttccagaacagggaaaggatgatgtccgggaggttaaagtagagcagaacagtgaaccatgtgccggctctagttctgaatctgatctccagacagtgtttaagaatgaaagcctcaacgcagaatcaaaatctggctgcaaacttcaggagcttaaagctaagcagcttataaagaaagacactgccacctattggcccctgaactggcgtagcaagttgtgtacctgccaagactgtatgaaaatgtatggagatctagatgtcttattcctgacagatgaatacgacacagttctggcttatgaaaacaaagggaagattgcccaggccactgacaggagcgatcccctaatggatacccttagcagcatgaatagagtccagcaagtggaactcatttgtgaatacaatgatttgaagactgaacttaaagactatctcaagagatttgctgatgaaggcacggttgttaagagagaggacattcagcagttctttgaagagtttcagtcaaaaaagagaagaagagtggatgggatgcagtattactgcagctagagtggagtatgaagctttctcattcaagccaatgaaaatgcgcttcccattcttggaataaaagaggtgtggttcacatttggccccctttccgtcctcctctgtttggagaggcctcgcgctcccttcattctctttagctgcagtagccaccgtgtggatgctgacttcacagccagcgtcctctgtgactcagctgatgcagctcattccacagacttcgccagtgtactcctactccagtgcacccagggttatttgcatagtttttaagtttgattttgttttgagaaagcaaattggtgtcttgtttaatgatctgttatttcactcccagatgtgtgtgttttgccacagagctgttgccttccagaacctcctccgcaggcatcacggaaggctctcttcccgtcacctagaacctctacaggtcccctcgcccctatgatcgtggtgccttgggtcaaagcttcctcaagcctggtctgctccttctttcacgtccctgttttctgaggtttggtcatagcttagaaaggatcttggggcttgttttctctaggcccaacctccagagtagccaggactgatggttttctggtctggatgtctgtcacaggcggagagattaacagatgacagggttgaggaagcaagcctttgttatgaattttactaatacagttcaagtgaaattttcgttcatgattctattggcactagaattagaatttcagtactgtagtgctcacagggcttcctggagaacatttgcccgtatactagtcccttctctgctgcctagaaaacagaccgggtctcacccctgtgaaatcttggtggtttacgaagtcctctggatttcttgatattatcagggatattcataagcatatatcaaaaatggacctattttgatattctgttatgaaaatgttattagaaccccaataaattattatttttcccccttgaatctgctaaagaaaacagatcctgacttagcttacttgaaataagcagggcagggagccctgttttggaagagacagactgtggaagagattacaaacaaggcccgaggctgcacgaatgatgagttttgtgtatataatgttaatgtccaccgccacttccctaacgactatgagatcttttttttgaagatcctcatggaaggttgtacagagccccacatttgaggggaagtcctttcagttgatatgagatctctttaacacccctcagtctatgtaggaaatgccttgtgatacatagagaaccctcagcttctctctgcctctggaggaccaaggtctttcctgacagtcggagacacaccttgatgtatgttaataaaagcatttcaggctgtggggccaccatgtatattaatactccttatgtgtccagcatctgtgtattcattcgagtgcccaatccctggatgagatgaactaggccttataaaaagtcaaagcctcaaagaaatggcacaaccatgttcttcggcactcaggctcctaattgcagatcctcacgaagggtggtatgtggagctggaaggtcttgtggccacaggacatgctggtgagccctgagctggccttgtgcagagggctccgttcaaaggctcggggtgtctttgaggttgtttatcaagctggggaactcttccaagtctgacaatgtttcgaaccctttttgcaaggttgcactattagtataccatcatgtccggaaaacttttaatcttctcaaatatctgatgtaactaccagaaagtcccttacttcctatgaccaatcaggaccaagtcttggaggtgatgtgttacattacgtgcagcacaatagtaccgatcagttaactcagcgctgaagggcttgttttatgaaaggtactattccttctttcacattaactggaaacctctttttttacctgttgttcacaactagttttcttattgactgtattggactgtctcttcttgtagagactgattttggccaacatattaatgcatgttttatgcaaaacacaaatatgatattagttgcttttaaggagttctggcattgtatgtgcatttttgtagaaattgttactggacttataattacatacttaactctgatcaggtttctgtaaaatttaaataaaaccaatacaaaat

SEQ ID NO: 11454 - protein, 274 aa, Homo sapiens
MIQCVVCEDWFHGRHLGATPPESGDFQEMVCQACMKRCSFLWAYAAQLAVTKISTEDDGLVRNIDGIGDQEVIKPENGEHQDSTLKEDVPEQGKDDVREVKVEQNSEPCAGSSSESDLQTVFKNESLNAESKSGCKLQELKAKQLIKKDTATYWPLNWRSKLCTCQDCMKMYGDLDVLFLTDEYDTVLAYENKGKIAQATDRSDPLMDTLSSMNRVQQVELICEYNDLKTELKDYLKRFADEGTVVKREDIQQFFEEFQSKKRRRVDGMQYYCS

SEQ ID NO: 11455 - DNA, 1429 bp, Homo sapiens
  CDS (184)..(591)
tttcatcactatggcttagcgtctccaatatacacacattttacttcacccattagaagatacgcagatgtcattgttcatcggcttttggctgtggctattggggctgactgtacttatccagagttgacagacaaacacaagcttgcagatatatgtaaaaatctaaatttccggcacaaaatggctcaatatgcccaacgtgcatcagtggcttttcatacccagttattcttcaaaagcaaaggaatagtaagtgaagaagcctatattttatttgtaagaaagaatgccattgtggtattaattccaaagtatggtttagaagggacagtcttttttgaagaaaaggacaaaccaaacccacagcttatttatgatgatgagataccctcacttaaaatagaagatacagtgttccatgtatttgataaagttaaagtgaaaatcatgttagactcatctaatcttcaacatcagaagatccgaatgtccctggtagaaccacagataccaggaataagcattcctactgatacttcaaacatggaccttaatggaccaaagaaaaagaagatgaagcttggaaaatagctatattcaacaaaaatcttcaaagactggtttcttttttaaaagaaaaaacttgaaagaacacttctaagcctaagtgtgtgatacagtttgttacttttaagtacattttgataatttcagacatctgcatttttattgaacagttgactgtatctgacccatcatactactatacttctgggttgaacagaattatttatgcagaataattcaattgaatatccatcacttaaatacagtgacaggacagcaacttcagggatctgtaaagatcatttaaatggagtgctcatctcattgaggagcagattaattttgcgtaagtactttgattattcaatatttgtaagaaaaaactttcattttcctacagaggaaaatagaacaattttagaagcaaggaacaatctcttttctaagtcttggaagctgtcagtgttgaggatgtaatctcctttgccatctttaattcacctaacttacactaggtgttctcttactgtctttaaaagcttcctgtattttattagtggtccttgaaaaactgtgaatgtttgggatttggtagaaaggcaaaaagtaggatattttgacctgactggaaagatggttgtgtttttattgccaggtaataagtgtgatcattgttgaacttcagctccagtgtctctccagaataagacattggcattcaaatgtctatatcttgttactacaaagtaaaaaacagataattagtggcttttaaattgtagttatatcagtgtatatacacgaggggaactgtataaagacatactaaagggaacagattaaaataagtattattaat

SEQ ID NO: 11456 - protein, 136 aa, Homo sapiens
MAQYAQRASVAFHTQLFFKSKGIVSEEAYILFVRKNAIVVLIPKYGLEGTVFFEEKDKPNPQLIYDDEIPSLKIEDTVFHVFDKVKVKIMLDSSNLQHQKIRMSLVEPQIPGISIPTDTSNMDLNGPKKKKMKLGK

SEQ ID NO: 11457 - DNA, 1252 bp, Homo sapiens
  CDS (424)..(876)
atattttgataatggcacagcacttgtggtccagtgggaccatgtacatctccaggataattataacctgggaagcttcacattccaggcaaccctgctcatggatggacgaatcatctttggatacaaagaaattcctgtcttggtcacacagataagttcaaccaatcatccagtgaaagtcggactgtccgatgcatttgtcgttgtccacaggatccaacaaattcccaatgttcgaagaagaacaatttatgaataccaccgagtagagctacaaatgtcaaaaattaccaacatttcggctgtggagatgaccccattacccacatgcctccagtttaacagatgtggcccctgtgtatcttcccagattggcttcaactgcagttggtgtagtaaacttcaaagtcaaaagagaagatgtgtgagaatacagaaccagtggaaacttcttctcgaaccaccacaaccataggagcgacaaccacccagttcagggtcctaactaccaccagaagagcagtgacttctcagtttcccaccagcctccctacagaagatgataccaagatagcactacatctaaaagataatggagcttctacagatgacagtgcagctgagaagaaagggggaaccctccacgctggcctcatcgttggaatcctcatcctggtcctcattgtagccacagccattcttgtgacagtctatatgtatcaccacccaacatcagcagccagcatcttctttattgagagacgcccaagcagatggcctgcgatgaagtttagaagaggctctggacatcctgcctatgctgaagttgaaccagttggagagaaagaaggctttattgtatcagagcagtgctaaaatttctaggacagaacaacaccagtactggtttacaggtgttaagactaaaattttgcctatacctttaagacaaacaaacaaacacacacacaaacaagctctaagctgctgtagcctgaagaagacaagatttctggacaagctcagcccaggaaacaaagggtaaacaaaaaactaaaacttatacaagataccatttacactgaacatagaattccctagtggaatgtcatctatagttcactcggaacatctcccgtggacttatctgaagtatgacaagattataatgcttttggcttaggtgcagggttgcaaagggatcagaaaaaaaaaatcataataaagctttagttcatgagggatcgac

SEQ ID NO: 11458 - protein, 151 aa, Homo sapiens
MCENTEPVETSSRTTTTIGATTTQFRVLTTTRRAVTSQFPTSLPTEDDTKIALHLKDNGASTDDSAAEKKGGTLHAGLIVGILILVLIVATAILVTVYMYHHPTSAASIFFIERRPSRWPAMKFRRGSGHPAYAEVEPVGEKEGFIVSEQC

SEQ ID NO: 11459 - DNA, 2901 bp, Homo sapiens
  CDS (220)..(2535)
gcgatctctgcggggcaagatggcggcgcccagacaggcctggagcacggatgaataagagggtacccccacacggagacactgctggaatcagccacaagggtcctggagtgccctcggctgatagagactatagttcgagagttcttgcccaccagttggtctcctgtgggggcagggcctacccctagtctatacaaagtaccctgtgctactgccatgaaactacttcgtgtcctggcctcagctgggaggaatattgctgcccggctgttgagcagctttgatctccggagccgcctgtgccgcatcatagctgaggctccccaagaactggccttgcccccagaggaagctgagatgctgagcaccgaggccctccgtctgtgggctgtggctgcctcctatggccagggcggttacctttacagggagctctacccagtgctgatgcgggccttgcaggtggtgccgcgggagctcagcacccacccacctcaacccctgtccatgcagcggatagcctcactgctcactctcctcacccagctaaccctggcagccggcagtacccctgctgaaaccatcagtgattctgctgaggccagcctctcggccaccccttccttagtcgcttggacacaggtgtctgggctccagcctcttgttgagccgtgtctaaggcagaccttgaagttgctgtccagacctgagatgtggagagccgtgggcccagtgcccgttgcctgcctgttgttcctgggagcctactaccaggcctggagccagcaaccaagctcatgcccggaggattggctccaggacatggagcgcctgtcagaggagctgctgctgccactgctgagtcagcccacactgggcagcctgtgggattcccttaggcactgctcccttctctgcaacccgctgtcctgtgtgccagcccttgaagctccccccagcctcgtgtcactgggctgctcggggggctgcccccgtctcagtctggctggctcagcctcacccttcccattcctcactgccctcctctctcttcttaataccctggcccagatccacaaggggctgtgtggccagctggctgccatattggctgccccgggactccagaattacttcctccagtgtgtggctcctggggctgccccacacctcacacctttctctgcatgggccctgcgccatgagtaccacctgcagtacctggcactcgctctggcccagaaagcggcagcgctgcagccactgccagccacccatgctgccctctatcatggtatggccttggccctgctgagccggctgctgcccggaagtgagtacctcacccatgagctgctgctgagctgtgtattccggctggagttcctcccggaaagaacatcagggggtccagaggcagccgacttctctgaccagctgtcgttaggaagcagcagggtccctcggtgtgggcaagggactctgctggctcaggcctgccaggacctccccagcatccgcaactgctacctgactcattgctcgccagcccgagccagtctgctggcctcccaggctctgcaccgaggggagctacagcgagtcccaaccctgctactgcccatgcctacggagccgctgctgcccaccgactggcccttcctgccactgattcgcctctaccaccgggcttcagacaccccctcgggactctctcccacagacaccatgggcacagccatgcgggtcctgcagtgggtgctagttttggagagctggcgcccccaggctctctgggctgtgccccctgctgcccgcctggcacggctcatgtgtgtgttcctggtggacagtgagctgttccgggagtccccagtacagcatctggtggcagccctcctcgcccagctctgtcagcctcaagtcttgccaaacctcaacctggactgccgactccctggcctgacgtctttccctgacctctatgccaacttcctggatcattttgaggctgtctcttttggggaccacctctttggggccctggtcctcctgcccctgcagcgtcggttcagtgtcaccttgcgccttgccctctttggggaacacgtgggagccttgcgagctctgagcctgcctctgacccagttgcctgtgtccctggagtgttacacagtgcctcctgaagacaacctggccctccttcagctctacttccggaccctggttactggtgcgctccgcccacgttggtgccccgtgctctatgctgtggctgtggctcatgtcaatagcttcatcttctctcaggacccacagagctcagatgaggtcaaagctgcccgcaggagtatgctgcagaaaacatggctgctggcagatgagggtctccggcagcacctcctgcactataagcttcccaattccacgctcccagagggctttgagctctattctcagttgccccctctgcgtcagcactacctccagagactgacttcaacagtgctccaaaatggggtatcagagacctaggatagttgatatagatggaaagatgggtacgttgtcctgtatccagcctttcaacagatgtctggccagacgaagaacattgtgtcctaatggtaggcaggggaccaaggagcagaaggcttgccttcctgggagcaggttgtttgagctgttttagagcagtgagccctaccattacatcctgatatctggggcttctgaaggtctgtgctgggagtgaagagtggcttagctatttacccgctctttggggacagggcaaactaaatgcatcccttcttacctaactcccaacccctgccctgggctgaggcatatgaatgctatagttgtgcattaaaataaatgttttttatctcctgg

SEQ ID NO: 11460 - protein, 772 aa, Homo sapiens [sequence omitted]

SEQ ID NO: 11461 - DNA, 1202 bp, Homo sapiens
  CDS (26)..(760)
cagccggtccaggcctctggcgaacatggcgcttgtcccctgccaggtgctgcggatggcaatcctgctgtcttactgctctatcctgtgtaactacaaggccatcgaaatgccctcacaccagacctacggagggagctggaaattcctgacgttcattgatctggttatccaggctgtcttttttggcatctgtgtgctgactgatctttccagtcttctgactcgaggaagtgggaaccaggagcaagagaggcagctcaagaagctcatctctctccgggactggatgttagctgtgttggcctttcctgttggggtttttgttgtagcagtgttctggatcatttatgcctatgacagagagatgatatacccgaagctgctggataattttatcccagggtggctgaatcacggaatgcacacgacggttctgccctttatattaatcgagatgaggacatcgcaccatcagtatcccagcaggagcagcggacttaccgccatatgtaccttctctgttggctatatattatgggtgtgctgggtgcatcatgtaactggcatgtgggtgtaccctttcctggaacactttggcccaggagccagaatcatcttctttgggtctacaaccatcttaatgaacttcctgtacctgctgggagaagttctgaacaactatatctgggatacacagaaaaagcctccatcttggcaagatatgaaaattaagtttatgtacctaggaccatctagttagttccacaaagacagatgttttgtgccaagtaagtatcatcctcatttacaagaggggtcacaaactgctggcctcccccaacttctacctatcaagttctgttaggcctacatcgtggaatttttgtttttgaatcagtattttaaaattgggtgattttggctgggcgcagtggctcatgcctgtaatcccggcactttgggagactgaggcaggtggatcacgaggtcaagagatggagaccatcctggccaacatggtgaaatcccatctctactaaaaatacaaaaattagccaggcatggtggcgtgtgcctgtagtcccaggtactcgggaggctgaggcaggagaactgcttgaacccaggaggcagaggttgcagtgagctgagatcatgccactgcaccccagcctggcaacagaacaagactccatctc

SEQ ID NO: 11462 - protein, 245 aa, Homo sapiens [sequence omitted]

SEQ ID NO: 11463 - DNA, 2084 bp, Homo sapiens
  CDS (5)..(1750)
agcaatggcggttcccggcgtggggctcttgacccgtttgaacctgtgtgcccggagaagaactcgagtccagcggcctatcgtcaggcttttgagttgcccaggaactgtggccaaagaccttaggagagacgagcagccttcagggagcgtggagacaggctttgaagacaagattcccaaaaggagattctctgagatgcaaaatgaaagacgagaacaggcacagcggactgttttaatacattgcccagagaaaatcagtgaaaacaagtttcttaaatatttatcccaatttggacctattaataatcatttcttctatgaaagctttggtctctatgctgtcgtagaattttgccaaaaggaaagcataggttcactgcagaatgggactcatactccaagcacggccatggagactgcaattccattcagatcacgtttcttcaatctgaagttgaaaaaccagacttctgaacggtcacgcgtacggtcaagtaatcagttgccacgttcaaacaagcagctttttgaattactttgttatgcagaaagtatagacgatcagctgaacactctcttgaaggagttccagctaacagaggagaacactaagctccgatatctcacctgttctcttattgaagacatggccgccgcgtattttccagactgcatagtcagaccctttggctcctcagtcaacacttttgggaagttaggatgtgatttggacatgtttttggatctagatgaaaccagaaacctcagcgctcacaagatctcaggaaattttctgatggaatttcaagtgaaaaatgttccttcagaaagaattgcaactcagaagatcctgtctgtgttaggagagtgccttgaccactttggccctggctgtgtgggtgtgcaaaaaatattaaatgcccggtgtccgctcgtgaggttctcacaccaggcctccggatttcagtgtgatttgactacgaacaataggattgccttgacaagttccgaactcctttatatatatggtgccctagactcaagagtgagagccttggtgttcagtgtacggtgctgggctcgagcacattcactaacaagtagtattcctggtgcatggattacaaatttctcccttacaatgatggtcatcttttttctccagagaagatcaccccctattcttccaacactagattccttaaaaaccctagcagatgcagaagataaatgtgtaatagaaggcaacaactgcacatttgttcgtgacttgagtagaattaaaccttcacagaacacagaaacattagaattactactgaaggaattttttgagtattttggcaattttgctttcgataaaaattccataaatattcgacagggaagggagcaaaacaaacctgattcttctcctctgtacattcagaatccatttgaaacttctctcaacataagcaaaaatgtaagtcaaagccagctgcaaaaatttgtagatttggcccgagaaagtgcctggattttacaacaggaagatacagatcgaccttccatatcaagtaatcggccctgggggctggtatccctattgctaccatctgctccaaacagaaagtcctttaccaagaagaaaagcaataagtttgcaattgaaacagtcaaaaacttgctagaatctttaaaaggtaacagaacagaaaatttcacaaaaaccagtgggaagagaacaattagtactcagacatgatggctgctacattgtgtaaagaactgggcttagcctatcaaatggtctgtggacttacttggaaaaactgatttgaaactttcacagatctcagctttcatctgatgtcacttttcatgatcttctcattggcccccttaacctggtctgaagttctgggatgttttcagtttgatcagtctgatactcagtggcactttattaaaacatcagctgtggagtgtggcggtgcacacctgtagtcccagctgctcaggaggctgaggcaggaggatctcttgagcccaggattttgaatccatcgtggacaacatagcaagattccatctct

SEQ ID NO: 11464 - protein, 582 aa, Homo sapiens
MAVPGVGLLTRLNLCARRRTRVQRPIVRLLSCPGTVAKDLRRDEQPSGSVETGFEDKIPKRRFSEMQNERREQAQRTVLIHCPEKISENKFLKYLSQFGPINNHFFYESFGLYAVVEFCQKESIGSLQNGTHTPSTAMETAIPFRSRFFNLKLKNQTSERSRVRSSNQLPRSNKQLFELLCYAESIDDQLNTLLKEFQLTEENTKLRYLTCSLIEDMAAAYFPDCIVRPFGSSVNTFGKLGCDLDMFLDLDETRNLSAHKISGNFLMEFQVKNVPSERIATQKILSVLGECLDHFGPGCVGVQKILNARCPLVRFSHQASGFQCDLTTNNRIALTSSELLYIYGALDSRVRALVFSVRCWARAHSLTSSIPGAWITNFSLTMMVIFFLQRRSPPILPTLDSLKTLADAEDKCVIEGNNCTFVRDLSRIKPSQNTETLELLLKEFFEYFGNFAFDKNSINIRQGREQNKPDSSPLYIQNPFETSLNISKNVSQSQLQKFVDLARESAWILQQEDTDRPSISSNRPWGLVSLLLPSAPNRKSFTKKKSNKFAIETVKNLLESLKGNRTENFTKTSGKRTISTQT

SEQ ID NO: 11465 - DNA, 2895 bp, Homo sapiens
  CDS (218)..(595)
gtgggccttcatcgtcaccaacctggcgagtgtgtatatacgggaaggaaatagacaccaagagctctacagtctgctggagaggatcaacccggaccacagcttccctgtcagctcgcactgcctccgagcagccgccttctatgtgcgtgggctcttctccttcttccagggacgctacaacgaggccaagcgatttctgcgggaaactctgaagatgtccaatgctgaggacctgaaccggctcacagcctgctccctcgtgcttctgggccacatcttctatgtgctgggaaaccacagggagagtaacaacatggtggtgcctgccatgcagctcgccagcaagatcccggacatgtcggtacagctgtggtcgtcagcactgctgagagacctgaataaagcctgtgggaacgccatggatgcccatgaagccgcccagatgcaccagaacttctcgcagcagctgctccaggaccacattgaggcctgcagcctccccgaacacaacctcatcacgtggacagacggtccaccccccgtgcagttccaagctcagaatggacccaacaccagcctggccagcctcctgtgaggccttgatggggccatccagctccgcagggcctgcgcgtctccggcttccacccagacggcactcaagcctgcccccgaggcgtgcttccttcctgattgtctctagagcttccaagtcctgggaatgtgcggggccagtccctgccctcccaggaggggtggtagccgttcccacctcgcagcaggacccccagtgcagaggctcacaggtggcacacaggcgctgtctctccagagccatccttcagagtggacctcagtgccagtcctgcctcagcatctgggtcacgtcggccaggagtagggtgcaggcctccagcaggtcctaatcctgtgtgccagggcaggcagtgccccaggggcaccacgcctgactctccatcacccaggccttgatgccgagcgggagtagagtgtttcctctgctcaaggcaatttccagagcccggatgccagtttctggcctgaatttggagggaagaagtaatggccctagtgtgggacgaagcacagatcccagcacttttcccagctttccctccagcatcagtccctgcagcagctggggcctctggtcaggaaccctcagggacccaggaactcagcttccaaacatctgcaccttgaccggactcgccatcccgccgtgggggtgcaggtgattgtaaacacgggtgtgcatgtggatgcacacgggtgtgcggtgaagatctgtggagatggagctgggagctgaggctcctgttgcaccagccaccttcccccatcttgtggctgctgaggggcaggaagcgggggagtgggctcgtctcctaaatttaagatcacctcctcagctagcttagagtgcgtggcacgggccccccgcccccgagatctggagcccagggactttcttcctggcagatctgtggccttccctgctcagcctcttggtccccccactccctccaccgcctcaccttccctgctgggtctctggggcacagtgtgaaacccgcaccctagccaggccccagggagcctccgctgggcccagacagcagcgtttggttttatccacttttcttggataatcaggaggtgccccagtggtcacagtgtggcattccgagttggggcgggtggtcgggtcaagatagcagcagcaggtgtcagggctcaagacaccaccccctccagcttctggggcccaggagcctctccctgctacagggggtgggggtcctgctcagcagggtaggtggtggttttaggtcttgtcaccctcactcagtggaactgcctctgggagctttggcgtctgtgactaaagggacgctggattgctcaggtcagctgctcggggctcccaggctgggtgtgccttagccacaggcagggctgtcaataacccccttcctcactggccaccacctgacatcagcaccagtgacaggctggtcagagggcggggctggtgagggtttgtcctaagaggaccaccgccatctctgggtctccagggggagagcctggccctgtcctttgctacccagggctgcccccaggcccatgaagccaataggagagcgtgtggcactggcccacaaactgtccctgtcctgtcttcctcccgagccatggcctctgctagctccaccttgaaggagccccccacatcctcccctacatcccagagatgccgccacttgtgtctccacaatgtgctcctgcccacccgggttccgcactgtccgacccctgcacaccactcatgtcaccacggcgtgcatcatgttcatccccatctatttatttaagcctttctttgcttgtagggcattttgtatgtagagcagttgaaaacagaacctcagaacttaacatctgtcctgatgttaaagtgcttttcatgaccaccctgttatctatgtatatgtaaagttaaggatgaggtcttaagtttacaattaaaaactcagtactcaatatttaatattctactcgagctttatggaagccaaatcatgtgcatgtgtgtgtgtgcgtgtgtgcaagctttgaacctccttccacagccgcatcttctcatgacacaaagcttttgataagtactttcctgtgggtcgctcagggcctcatagcatctcattcaattacaagaatagaggccagacacggtggcgcatgcctgtagtcccagctaactgggaggctgaggcaggaggatcacttgagcccaggagattgaggctgcagtgagcatgatcgcgacactgcactccagcctgggtgacggtgagactttgtctc

SEQ ID NO: 11466 - protein, 126 aa, Homo sapiens
MSNAEDLNRLTACSLVLLGHIFYVLGNHRESNNMVVPAMQLASKIPDMSVQLWSSALLRDLNKACGNAMDAHEAAQMHQNFSQQLLQDHIEACSLPEHNLITWTDGPPPVQFQAQNGPNTSLASLL

SEQ ID NO: 11467 - DNA, 2253 bp, Homo sapiens
  CDS (278)..(1255)
gtcccagccggagccccagccggagcccgatccctagccctgcggccgcgcctccctcgccgtccccgcctggagcccggcgccgccgccgcccagcaggcgcggggcgaaggagctgctagaacaatgctgaggcgggtgaggtgaggagcagcccctcgcggcagccccgacagagtgtctggaacaggtgattggaggagccggagacccaggcacctgggcatccttcccctcgcctctgccaggccccgcgcccctaaaaggtgggaaaaccatggcgaccaatttcagtgacatcgtcaagcaaggctacgtgaagatgaagagcaggaagctcgggatctaccggaggtgctggctggtgttccggaaatcctccagcaaggggccccagcggctggagaagtatccagatgagaagtcggtgtgcctccggggctgccccaaggtgactgagatcagcagcgtcaagtgtgttacgcggctccccaaggagaccaagcggcaggcggtggccatcatattcactgatgactcggcacgtaccttcacctgcgactcagagctagaggcagaggagtggtacaagacactatctgtggagtgtctggggtcccgcctcaacgacatcagtctgggagaacctgacctcctggccccaggggtgcagtgtgaacagacagatcgcttcaatgtcttcctgctgccctgccccaacctggacgtgtatggcgagtgcaagctgcagatcacccacgagaacatctacctctgggacatccacaacccccgtgtgaagctcgtctcgtggcccctctgctcactgcgccgctatggccgggatgccacacgctttaccttcgaggctggccggatgtgtgatgctggggaaggactctataccttccagacacaagagggggagcagatttaccagcgcgtccacagtgccaccctggccatcgcagagcagcacaagcgggtcctgctggaaatggagaagaacgtgaggctgctgaacaagggcacggaacattactcgtatccctgcacacccacgaccatgctgccgcgcagtgcctactggcaccacatcactggttcccagaacatcgccgaagcctccagctatgctggtgaggggtatggggcagcccaggccagctcggaaacagacctcctcaacagattcatcctgctaaagccaaagcccagccagggggacagcagtgaggccaagaccccatcccagtgaccacagtgctggcgagcaccgatgactgctgggggctgcctgctgccgggctggctgcagtgtaccgtggacagcctcagggggctgtcggccaagagcctggagaaagggagcaagctgccccctccttgcccccaaggatgaggctggactgaggcaaagggctggccacaccacctgagcatgtgtgagaggttggagctaccgtgggactatatactgttaatgattttaatatatatggcttatgacatactctgtatcaatgagatcccctcaccctcaccccatccttccccaccaatacacacaaattttttaatcccatgaccaggccacggtcaaggctgtttttgagtatgagtgcagtcgtatccatcctccatggcacagccctcctgctgccaggacctgcttgaactaccagggccacaggagggggataatcagagcttgaggctggcactctgactgctggcttttcccaaacagcccaagggccggaacagcaggtggcttctcagttcctctgggcctggagtgacacaggaaggatctgcacttcctctgtgctgcttgccagccttgcagttggagttttaagcagaggtgacatctggttgacgcctcaggtgaaaatctggttttaaaatgtaacttctgcacaggctccttcctgctttgtaggctgggaagatgcccctggggtaggggtgctgattacctcagccatgtggaggaaggctggagcttgttcctgccccaggaataggccaggagggaaggccgcagcaggactgccgtggggagcacccctgctgcccccctctcactgaccaggggtggacaatgcccaagcagagggagcccccttgccctgtttggccaccctctggccagccaaaagcactctgaaaccaagaccttcccatttcctcctccccacatggtgctgaggctccctgctgcaatgcaattaaagcaattgattttct

SEQ ID NO: 11468 - protein, 326 aa, Homo sapiens
MATNFSDIVKQGYVKMKSRKLGIYRRCWLVFRKSSSKGPQRLEKYPDEKSVCLRGCPKVTEISSVKCVTRLPKETKRQAVAIIFTDDSARTFTCDSELEAEEWYKTLSVECLGSRLNDISLGEPDLLAPGVQCEQTDRFNVFLLPCPNLDVYGECKLQITHENIYLWDIHNPRVKLVSWPLCSLRRYGRDATRFTFEAGRMCDAGEGLYTFQTQEGEQIYQRVHSATLAIAEQHKRVLLEMEKNVRLLNKGTEHYSYPCTPTTMLPRSAYWHHITGSQNIAEASSYAGEGYGAAQASSETDLLNRFILLKPKPSQGDSSEAKTPSQ

SEQ ID NO: 11469 - DNA, 2674 bp, Homo sapiens
acagatggcctggatcagtgcaatgtgcaacaagaggactatatcgtctcagtaaaaaccttgaagagatgaacccatttcagagacccagcaagggatcacctgcatatacaggcatcagcagaaacaggaatttgggatttatcctggaggtagtggaagcttttggaggtcttaaccaggacagcacatgtggctttcctgcaatgggatcgtccttcaagaggacctcacaggctctccacccggactgtgacgtaagcagctgcagcagccttggatgtttctggatagccagccccatgagaacagctttaaaataggagactggcattgtgatgaagtgtggacttcgctgtcatatagacctggatttaaatcctggcttcagtgtttatggatgacattggacaagtcatttaacctccttaagtctcagagttctcattacggaaatggagctcttaatagtacctaccccctagtgtggttgtgagggttgagatcatctatgttcaaagtgcttattatacagagacggggacatgtaagtgctacataaatgttagcttttattagtcactggagtggaggagagaggactgttgcctccttgtcaatgtccccatcctgggaagcctgcctgtgtgcaccaaggcccatctgacccatatatcagaaaaggtgcccttctagggagcgacaccccccaccaagccccccagtcgctgtccatgctttcctctaggttcaaaatgcagctgcatctgtgcagaaaccaggtgttgcctgtgagttctgcctcgctggccagaggtggaaggaaggaggaaaggagaggggcctccatacttccagagccccactgggggttaccttcgcttgcccccactctttttgtcttgctctgaggatgccaggactttaaggacattgtcagcgagcacagaaagaatctcagtcatctggactgctttgtgctatatgaaaatctctgagaaccttcaagagcccaaaaacagttctcctccatgctgtatgccatggtcagtggttaaagagaacattttgttccactcctccagctctgccttagaaacccaagccctgcactccaaggctcctggcatcgtacaccagcaccagcaattttctgccaaaagcatcagccaaaatctattctatctatttcagttcctctcttttcatcggattgtatttttacaggtgattgctgattctcacactgctcttcagattcatgtacagctgtggtctgaatgtgtgtgttttctcaaaattcaagtttaaaacttaatcctcaatgtgatagtatcaacagctgcggccttttggaaagtgaaggtggagccctcgtgagtgggattagagctcttataaaagagattgaagggagctacctagcccttccatctcttctgccttgtgaggacacagtgttcatcccttttgtcttcccaccatttgaagatgcagaaagaaggtgccatcttggaagcaaagagcagccctcaccagacaccaagtctgctggcaccttgatcttggacttcccagcctccaggactgtgagaaatgaatttctgttgtttataaattacctagtctaaggtatgctgttacagtagcaggaatggactaagacacacattgtcaaaatcttcatgagttaaaggtgaaggtacaatcagaactggtgcatggaattggaaccataggtcttagtaaacactgtaaaaatgcactattcaaatctacagaaaatgctctctcttcaagttcagaaagaagctacaatctgcttttcctttttttctgaagatgtggggaacgaaattggatcttgtgcttttgggtgctaactttgagccctcttcctttacatctaaatgacaatttgtggatcaatgaggatgtgtcaactagccaagatcgaggacctggaggggtgctctgtggaaactgctttaaaatccttcagagggtgggcacggagctctggttctggttgaagagtcctgtcaaggccatctcaaaaggagaagcaaagcctgcagaggaggccagcctgagtcctggggtgcgaacgggtgctgggctcagcatgaggaggaggagaccctggccacagttccatgaatctttgctcccttccacattatggattctggctaagaagattttcatctttcaccacctgttctggattcttggaacaggtaaattcattggcctacgcaagtctgagctctaggtctgaacccgcatggacctgagggtgcaccgagaaaagaaaggctgacaactggatcccgggaatgtcaaggccaccctgggcttgaagggacccgccatgcctccaagccttgcccagagagggggttcaggatgctgcgtggttccaggtgatctattgctttctcgagtttaaagttcagaggatcatgaagtaccacagctggaaggggtgtaagtgacactgcctagcctaactctcttaaaaatcatagccctactcctgcctccccaaatcagatacgacaggcataggctctgactgttccttaagtcttagtggcaatactccctgaccagttttgcggggttgctcccagttccattgcttttgtaacaggtggccagaaagcctggg

SEQ ID NO: 11470 - DNA, 743 bp, Homo sapiens
  CDS (119)..(505)
gatgtcacctggagcgagtagcgcgcggcgtggaacgcgagtcgcgaccccggctcccggcagtggcgcgcactagccctcgcgccgcacgggacacgagggctgggcgggcagcgggatgaggctaaaggttggatttcaaggcgggggctgcttccggaaagacgcgctgtgtttggaaggtggagtgagcgcccggtgggcgagggcacctcattctgcacccctgcgcccgcctcgggaactgcacgcggcacccccacccgcgactcccacgcagacagtagtgcggcctgcagggttcccccggcggacgaggctaatggttcgctccgccccgcccacacagaggccgcccactggctccggctgcgtttcaggactctggaggaagggacttggccttcgccctcagacgctcttaagggtaggcggcgttgtcctcagttctgccccagcactcagacccagactgggtccctgcctccgccctccgccctcggactagtctcttggaagccggcctgtctccgccttcagacctagggagaggtcttaacctctgttctcagactctggaaaaggcttctcaacggcttggcctgacctcagctcctcgcattccctccacatctcaagacaccaacccagggatgcaggacagacacacagacactcagtgagggtcaaatatctttaaataaagtgccaggaacaataaatactgtacaggaagagagtgc

SEQ ID NO: 11471 - protein, 129 aa, Homo sapiens
MRLKVGFQGGGCFRKDALCLEGGVSARWARAPHSAPLRPPRELHAAPPPATPTQTVVRPAGFPRRTRLMVRSAPPTQRPPTGSGCVSGLWRKGLGLRPQTLLRVGGVVLSSAPALRPRLGPCLRPPPSD

SEQ ID NO: 11472 - DNA, 1458 bp, Homo sapiens
  CDS (70)..(813)
gtgctgcggctgtgctcggccttagtggtgtcggggtctagtggacagagaagactcttggccaggcagatggcttctcggtggcagaacatggggacctccgtgcgccggagatctctccagcaccaggagcagctggaggacagcaaggagctgcagcctgtggtcagccatcaggagacctctgtaggggccctggggtccctgtgcagacagttccaaaggaggctgcccctgagagccgtcaacctcaacctccgcgcagggccctcctggaaacgcctggaaaccccagagccaggtcagcagggcctccaggctgcagctcgctcagctaagagtgctttgggtgccgtgtcccagagaatccaggagtcctgccaaagtggcaccaagtggctggtggagacccaggtgaaggccaggaggcggaagagaggagcacagaagggcagtggatccccaactcacagcctgagccagaagagcacccggctgtctggagccgcccctgcccactcagccgcagacccctgggagaaggagcatcaccgcctctctgtccggctgggctcacatgcccacccattacggcgatcaaggcgggaggctgccttccggagcccctactcctcaacagagcccctctgctctcccagcgagtctgacagtgacctagagcctgtgggggcgggaattcagcatctccagaagctgtcccaagagctagatgaagccattatggcggaagagaggaaacaagccctgtctgaccgccaaggcttcatactcaaggatgtctatgcttccccgtgagcttcctggaaaaaacccccgggagtcgtcagtacccctgggccactgctaacaagcacctaacaaggggcccagagccccctgctccagccacatctggacccatcagtgactgcctgccatagcctgagagtgtcttggggagaccttgcagagggggagaattgttccttctgctttcctaggggactcttgagcttagaaactcatcgtacacttgaccttgagccttctatttgcctcatctataacatgaagtgctagcatcagatatttgagagctcttagctctgtacccgggtgcctggtttttggggagtcatccgcagagtcactcacccactgtgtttctggtgccaaggctcttgagggccccactctcatccctcctttccctaccagggactcggaggaaggcataggagatatttccaggcttacgaccctgggctcacgggtacctatttatatgctcagtgcagagcactgtggatgtgccaggaggggtagccctgttcaagagcaatttctgccctttgtaaattatttaagaaacctgctttgtcattttattagaaagaaaccagcatgtgactttcctagataacactgctttctcataataaagactatttgcatttg

SEQ ID NO: 11473 - protein, 248 aa, Homo sapiens [sequence omitted]

SEQ ID NO: 11474 - DNA, 2622 bp, Homo sapiens
  CDS (126)..(1562)
aagagcaagggatcactgtgctgggtttaaatgcggtatttgacatcttggtgataggcaaattcaatgttctggaaattgtccagaaggtactacataaggacaagtcattagagaatctcggcatgctcaggaacgggggcctcctcttcagaatgaccctgctcacctctggaggggctgggatgctctacgtgcgctggaggatcatgggcacgggcccgccggccttcaccgaggtggacaacccggcctcctttgctgacagcatgctggtgagggccgtaaactacaattactactattcattgaatgcctggctgctgctgtgtccctggtggctgtgttttgattggtcaatgggctgcatccccctcattaagtccatcagcgactggagggtaattgcacttgcagcactctggttctgcctaattggcctgatatgccaagccctgtgctctgaagacggccacaagagaaggatccttactctgggcctgggatttctcgttatcccatttctccccgcgagtaacctgttcttccgagtgggcttcgtggtcgcggagcgtgtcctctacctccccagcgttgggtactgtgtgctgctgacttttggattcggagccctgagcaaacataccaagaaaaagaaacccattgccgctgtcgtgctgggaatcttattcatcaacacgctgagatgtgtgctgcgcagcggcgagtggcggagtgaggaacagcttttcagaagtgctctgtctgtgtgtcccctcaatgctaaggttcactacaacattggcaaaaacctggctgataaaggcaaccagacagctgccatcagaaactaccgggaagctgtaagattaaatcccaagtatgttcatgccatgaataatcttggaaatatcttaaaagaaaggaatgagctacaggaagctgaggagctgctgtctttggctgttcaaatacagccagactttgccgctgcgtggatgaatctaggcatagtgcagaatagcctgaaacggtttgaagcagcagagcaaagttaccggacagcaattaaacacagaaggaaatacccagactgttactacaacctcgggcgtctgtatgcagatctcaatcgccacgtggatgccttgaatgcgtggagaaatgccaccgtgctgaaaccagagcacagcctggcctggaacaacatgattatactcctcgacaatacaggtaatttagcccaagctgaagcagttggaagagaggcactggaattaatacctaatgatcactctctcatgttctcgttggcaaacgtgctggggaaatcccaggaatacaaggaatctgaagctttattcctcaaggcaattaaagcaaatccaaatgctgcaagttaccatggtaatttggctgtgctttatcatcgttggggacatctagacttggccaagaaacactatgaaatctccttgcagcttgaccccacggcatcaggaactaaggagaattacggtctgctgagaagaaagctagaactaatgcaaaagaaagctgtctgatcctgtttccttcatgttttgagtttgagtgtgtgtgcatgaggcatatcattaatagtatgtggttacatttaaccatttaaaagtcttagacatgttattttactgatttttttctatgaaaacaaagacatgcaaaaagattatagcaccagcaatatactcttgaatgcgtgatatgatttttcattgaaattgtattttttcagacaactcaaatgtaattctaaaattccaaaaatgtcttttttaattaaacagaaaaagagaaaaaattatcttgagcaacttttagtagaattgagcttacatttgggatctgagccttgtcgtgtatggactagcactattaaacttcaattatgaccaagaaaggatacactggcccctacaatttgtataaatattgaacatgtctatatattagcatttttatttaatgacaaagcaaattaagtttttttatctcttttttttaaaacaacatactgtgaactttgtaaggaaatatttatttgtatttttatgttttgaatagggcaaataatcgaatgaggaatggaagttttaacatagtatatctatatgcttttccccataggaagaaattgactcttgcagtttttggatgctctgacttgtgcaatttcaatacacaggagattatgtaatgtaatatttttcataagcggttactatcaattgaaagttcaagccatgctttaggcaagagcaggcagcctcacatctttatttttgttacatccaaggtgaagagggcaacacatctgtgtaagctgctttttagtgtgtttatctgaaggccgttttccattttgcttaatgtaactacagacattatccagaaaatgcaaaattttctatcaaatggagccacattcggggaattcgtggtatttttaagaattgagttgttcctgctgttttttatttgatccaaacaatgttttgttttgttcttctctgtatgctgttgacctaatgatttatgcaatctctgtaatttcttatgcagtaaaattactacacaaactag

SEQ ID NO: 11475 - protein, 479 aa, Homo sapiens
MLRNGGLLFRMTLLTSGGAGMLYVRWRIMGTGPPAFTEVDNPASFADSMLVRAVNYNYYYSLNAWLLLCPWWLCFDWSMGCIPLIKSISDWRVIALAALWFCLIGLICQALCSEDGHKRRILTLGLGFLVIPFLPASNLFFRVGFVVAERVLYLPSVGYCVLLTFGFGALSKHTKKKKPIAAVVLGILFINTLRCVLRSGEWRSEEQLFRSALSVCPLNAKVHYNIGKNLADKGNQTAAIRNYREAVRLNPKYVHAMNNLGNILKERNELQEAEELLSLAVQIQPDFAAAWMNLGIVQNSLKRFEAAEQSYRTAIKHRRKYPDCYYNLGRLYADLNRHVDALNAWRNATVLKPEHSLAWNNMIILLDNTGNLAQAEAVGREALELIPNDHSLMFSLANVLGKSQEYKESEALFLKAIKANPNAASYHGNLAVLYHRWGHLDLAKKHYEISLQLDPTASGTKENYGLLRRKLELMQKKAV

SEQ ID NO: 11476 - DNA, 2700 bp, Homo sapiens
  CDS (1819)..(2277)
ggtccaaactcctaagagctaggcttcggaaataccatgtgtacagtcatctttccagcacctgcacaatatcataaaatcattgtctttgagctgaagtggtcctaaaaagtcagcctttccattttacagatgagaaaatagacccagagaggttaagtcacacggtggtttgtggcaaagctagaaacataactgtggtctcctcttcatagttctttccactacactattacatttctcaactctgaaaaaccaccataaagcataatggctacctaaaataaatggcccatttctaaagtaattagtattcctaaacaaattttaagtagctctgcttctccagtgacattttggtttaaagaatcaaggggaggctgggtgcagtggctcatccctgtaatcccagcactttgcaaggccgaggtgggcagatcacttgaacccaggagttcaagacaagcctcggcaacatgacaaaacctcatctctacaaaaaatacaaaaattagccaggcccagtggcatgtgcctgtaatcccaactactcaggaggctgaggtgggaggattgtttgaacttgggaggctgaggtaggagtgagcccagatcacgccactgcactcctgcctaggcaacagagctagaccctgtctcaaaataaaaaagaaaggataaaggagatttgattaatagattaataaactgttctttcctgattggttatgatgttgaactacttcccaaattatgtaaccaaatttctgtgtggctctggtgctattaggtcaaaactttggggaactaagcatgagatagcatactcctgtttccttctctgtcccagggaaatacaaattcccttttgcctcaattagagaaggatgtctattcttgctacaaattatgatttatgtcctggtgtcaaatgaagataagaataagatcaaagaaaggcaagatgattgtggaagagaaagaaaaaggattaatttagatttatttaaccaagaaacatttatttcgtatctcctatttccaggctgagtgctaagaaataaaatgatgagtagagtatagcctttctcctcaaggagcttaccctctaatcatgggagagacagacatgtaactagttaaaccatattgtttggtggcttgaaccatgccagtagtagccactattaaggaaggaactgaagggcacttactgatttgggtaatagtgggaaaaatcagagaggagggaggatttagattgaagtatgtgcttctattttagaaggggctgtatttactatgtttattacttaaaagttcataaaagccaataatacgggtttgagctgtgttagtaatgagttaacaaacatatcaggattatttaacctccctgagcccctgttctctaaatgggagaataataactctacctgattgagttcttggaaaataacatagtgtaatggaaagagcaggctttggaggaaaagaggatttgactttgcatctctatcaattaattgtgtgactttgagcaagttatttaactctctgagcttcactttccttatgtgcaaaatggataacaccatggcataagacaatcccatgaagataagatataaaagaagataatgtttgaaaagaaagaaggaagtggatgctttggaagaattaagcaggcagctttttctggaaacagctgatctatatgctaccaaggagagaatagaatactccaaaaccttcaaggggaaatattttaattttcttggttactttttctctatttactgtgtttggaaaattttcatggctaccatcaatattgtttttgatcgagttgggaaaacggatcctgtcacaagaggcattgagatcactgtgaattatctgggaatccaatttgatgtgaagttttggtcccaacacatttccttcattcttgttggaataatcatcgtcacatccatcagaggattgctgatcactcttaccaagttcttttatgccatctctagcagtaagtcctccaatgtcattgtcctgctattagcacagataatgggcatgtactttgtctcctctgtgctgctgatccgaatgagtatgcctttagaataccgcaccataatcactgaagtccttggagaactgcagttcaacttctatcaccgttggtttgatgtgatcttcctggtcagcgctctctctagcatactcttcctctatttggctcacaaacaggcaccagagaagcaaatggcaccttgaacttaagcctactacagactgttagaggccagtggtttcaaaatttagatataagaggggggaaaaatggaaccagggcctgacattttataaacaaacaaaatgctatggtagcatttttcaccttcatagcatactccttccccgtcaggtgatactatgaccatgagtagcatcagccagaacatgagagggagaactaactcaagacaatactcagcagagagcatcccgtgtggatatgaggctggtgtagaggcggagaggagccaagaaactaaaggtgaaaaatacactggaactctggggcaagacatgtctatggtagctgagccaaacacgtaggatttccgttttaaggttcacatggaaaaggttatagctttgccttgagattgactcattaaaatcagagactgt

SEQ ID NO: 11477 - protein, 153 aa, Homo sapiens [sequence omitted]

SEQ ID NO: 11478 - DNA, 2076 bp, Homo sapiens
  CDS (118)..(990)
gctggagccggcgcggaggagcgggcggccgcggctgtgccctctcctactcctcaccgcgcgcgcgcggggaaccagtagccgcggctgcttcggttgccgcggtcggtggtcgttatggattctccatgggacgagttggctctggccttctcccgcacgtccatgtttcccttttttgacatcgcgcactatctagtgtcagtgatggcggtgaaacgtcagccgggagcagctgcattggcatggaagaatcctatttcaagctggtttactgctatgctccactgttttggtggaggaattttatcctgtctactgcttgcagagcctccattgaagtttcttgcaaaccacactaacatattactggcatcttcaatctggtatattacatttttttgcccgcatgacctagtttcccagggctattcatatctacctgttcaactactggcttcgggaatgaaggaagtgaccagaacttggaaaatagtaggtggagtcacacatgctaatagctattacaaaaatggctggatagtcatgatagctattggatgggcccgaggtgcaggtggtaccattataacgaattttgagaggttggtaaaaggagattggaaaccagaaggtgatgaatggctgaagatgtcataccctgccaaggtaaccctgctggggtcagttatcttcacattccagcacacccagcatctggcaatatcaaagcataatcttatgttcctttataccatctttattgtggccacaaagataaccatgatgactacacagacttctactatgacatttgctccttttgaggatacattgagttggatgctatttggctggcagcagccgttttcatcatgtgagaagaaaagtgaagcaaagtcaccttccaatggcgttgggtcattggcctcaaagccggtagatgttgcctcagataatgttaaaaagaaacatactaagaagaatgaataaatttacgtgatgagctctacaaggccaaaaattttttttcttatctacctgttatattgtgctaatttttctatgtatgtgatgtgaaatgaagactatatatatggaatggaggtgacagaaagaaagaaattctttgtttgagggagacttcccctttctggattgtatttgtagagtgttacgagtgtatcatgtgattatgctttaccggtataagagattctgttgtgattatttgaatagttttatattaataaaagaagacaaaattttttaaatgttagaaaaagcagatctgtcattgcaaagtaacaaaaattttaagcttttaaaaatgtagatttttcatatttttaaaatttgaatctatttgagctttagttcagcagaattaaatttttacttgacattatcattaaaattgctaggtatggagaacaattcctattttattttgaacactgagaagagtaaacttttcctaaaacactttatattataaatgaaaataaattgctagtttatattttagatataaacatcatattttttattaatacctacatcaaatggaaaatatctgaaattttttttccatagcaggtattttctactagaagtagttttactacttttcatttagaacagagtatgagtcttaatctgaagtctttttcatgcccttgttttaaaaaaactactttttttggcctcaaaaaaatcaagggtgtaatttttaataaattgttaatcctatgttttgtaattttcattttaggagcttgacttatttttttctctctcataaaaacacatttgttttaattgtaggagaaattttctcagcattttgcatgttctttctaatctttgttggtctgaatatattggtagtaattactgtaattattcaacaaaaagcatatccgttcaaaaatttttccactatgtcttttttctagtggctactgttttagttttctagttgaatatctctgacaagctttcgtatggttttgttatatcttcatctacatgtaatgtgttattaattttattaaatgaaaactaatcaccttc

SEQ ID NO: 11479 - protein, 291 aa, Homo sapiens
MDSPWDELALAFSRTSMFPFFDIAHYLVSVMAVKRQPGAAALAWKNPISSWFTAMLHCFGGGILSCLLLAEPPLKFLANHTNILLASSIWYITFFCPHDLVSQGYSYLPVQLLASGMKEVTRTWKIVGGVTHANSYYKNGWIVMIAIGWARGAGGTIITNFERLVKGDWKPEGDEWLKMSYPAKVTLLGSVIFTFQHTQHLAISKHNLMFLYTIFIVATKITMMTTQTSTMTFAPFEDTLSWMLFGWQQPFSSCEKKSEAKSPSNGVGSLASKPVDVASDNVKKKHTKKNE

SEQ ID NO: 11480 - DNA, 2328 bp, Homo sapiens
  CDS (344)..(1795)
gtttctgtcgcaggctgcgaggaaaggcccctaggctgggtctgggtgcttggcggcggcggcttcctccccgctcgtcctccccgggcccagaggcacctcggcttcagtcatgctgagcagagtatggaagcacctgactacgaagtgctatccgtgcgagaacagctattccacgagaggatccgcgagtgtattatatcaacacttctgtttgcaacactgtacatcctctgccacatcttcctgacccgcttcaagaagcctgctgagttcaccacagtttcatcctacaaaatgggcgtaacaatgtctacctactccattgtgtggaccaaaggagatggttaatgtgaaagccctttgtgaacctgaagtgagcaactgctggatgaatgtcattacgggcacaggctctgtgtcatctcctctcctagtgcttccacagccaggaccagagacctccctgatgactggggaacctgtggatgatgaagatgccaccgtcaacaagattgcgctcgagctgtgcacctttaccctggcaattgccctgggtgctgtcctgctcctgcccttctccatcatcagcaatgaggtgctgctctccctgcctcggaactactacatccagtggctcaacggctccctcatccatggcctctggaaccttgtttttctcttctccaacctgtccctcatcttcctcatgccctttgcatatttcttcactgagtctgagggctttgctggctccagaaagggtgtcctgggccgggtctatgagacagtggtgacgttgatgctcctcactctgctggtgctaggtatggtgtgggtggcatcagccattgtggacaagaacaaggccaacagagagtcactctatgacttttgggagtactatctcccctacctctactcatgcatctccttccttggggttctgctgctcctggtgtgtactccactgggtctcgcccgcatgttctccgtcactgggaagctgctagtcaagccccggctgctggaagacctggaggagcagctgtactgctcagcctttgaggaggcagccctgacccgcaggatctgtaatcctacttcctgctggctgcctttagacatggagctgctacacagacaggtcctggctctgcagacacagagggtcctgctggagaagaggcggaaggcttcagcctggcaacggaacctgggctaccccctggctatgctgtgcttgctggtgctgacgggcctgtctgtgctcattgtggccatccacatcctggagctgctcatcgatgaggctgccatgccccgagtcatgcagggtacctccttaggccaggtctccttctccaagctgggctcctttggtgccgtcattcaggttgtactcatcttttacctaatggtgtcctcagttgtgggcttctatagctctccactcttccggagcctgcggcccagatggcacgacactgccatgacgcagataattgggaactgtgtctgtctcctggtcctaagctcagcacttcctgtcttctctcgaaccctggggctcactcgctttgacctgctgggtgactttggacgcttcaactggctgggcaatttctacattgtgttcctctacaacgcagcctttgcaggcctcaccacactctgtctggtgaagaccttcactgcagctgtgcgggcagagctgatccgggcctttgggctggacagactgccgctgcccgtctccggtttcccccaggcatctaggaagacccagcaccagtgacctccagctgggggtgggaaggaaaaaactggacactgccatctgctgcctaggcctggagggaagcccaaggctacttggacctcaggacctggaatctgagagggtgggtggcagaggggagcagagccatctgcactattgcataatctgagccagagtttgggaccaggacctcctgcttttccatacttaactgtggcctcagcatggggtagggctgggtgactgggtctagcccctgatcccaaatctgtttacacatcaatctgcctcactgctgttctgggccatccccatagccatgtttacatgatttgatgtgcaatagggtggggtaggggcagggaaaggactgggccagggcaggctcgggagatagattgtctcccttgcctctggcccagcagagcctaagcactgtgctatcctggaggggctttggaccacctgaaagaccaaggggatagggaggaggaggcttcagccatcagcaataaagttgatcccagggtttgctttgttttttt

SEQ ID NO: 11481 - protein, 484 aa, Homo sapiens
MVNVKALCEPEVSNCWMNVITGTGSVSSPLLVLPQPGPETSLMTGEPVDDEDATVNKIALELCTFTLAIALGAVLLLPFSIISNEVLLSLPRNYYIQWLNGSLIHGLWNLVFLFSNLSLIFLMPFAYFFTESEGFAGSRKGVLGRVYETVVTLMLLTLLVLGMVWVASAIVDKNKANRESLYDFWEYYLPYLYSCISFLGVLLLLVCTPLGLARMFSVTGKLLVKPRLLEDLEEQLYCSAFEEAALTRRICNPTSCWLPLDMELLHRQVLALQTQRVLLEKRRKASAWQRNLGYPLAMLCLLVLTGLSVLIVAIHILELLIDEAAMPRVMQGTSLGQVSFSKLGSFGAVIQVVLIFYLMVSSVVGFYSSPLFRSLRPRWHDTAMTQIIGNCVCLLVLSSALPVFSRTLGLTRFDLLGDFGRFNWLGNFYIVFLYNAAFAGLTTLCLVKTFTAAVRAELIRAFGLDRLPLPVSGFPQASRKTQHQ

SEQ ID NO: 11482 - DNA, 2574 bp, Homo sapiens
  CDS (16)..(2037)
tatattatcctgtacatgcaaatcactgaggagcagattaaagtatggacagccaacccccaacaatttgtagaagatgaagatgatgatacattctcctatactgttagaatagcagctcaagacttgttgctggctgtggccacagatttccagaatgaaagtgcagcagccctggctgctgcagccactcgacatttacaagaagctgagcaaaccaaaaacagtggcactgagcactggtggaagatccatgaggcatgcatgcttgccctaggctcagtgaaggccatcatcactgacagtgtgaaaaatggcaggattcattttgacatgcatgggttcctgaccaatgtcatccttgcagacctcaacctctcagtgtctcctttcctcttgggccgggcactttgggctgccagtcggttcactgttgctatgtcccctgaactgatccagcagttcctacaggcaacagttagtggtcttcacgagacacagcccccatcagttcgaatttctgcagtgagagccatctggggttattgtgaccaactgaaagtctcagagagtacccacgtgctccagcccttcctccccagcatccttgatggcttaattcacctagcagcccagttcagctcagaggtcctcaacctggtgatggagaccctgtgcatcgtttgtacagtagaccccgaattcacagcaagcatggaaagcaaaatctgccccttcaccatcgccattttcctaaagtacagtaatgatcccgtcgtcgcctcactggctcaggacatcttcaaggagctgtcccagattgaagcctgtcagggcccaatgcaaatgaggctgattcccactctggtcagcataatgcaggccccagcagacaagattcctgcagggctttgtgcgacagccattgatatcctgacaacagtagtacgaaatacaaagcctcccctttcccagcttctcatctgccaagctttccctgctgtggcacagtgtacccttcacacagatgacaatgccaccatgcagaatggcggagagtgcttgcgggcctatgtgtcagtgaccctggaacaagtagcccagtggcatgatgagcagggccacaatggactgtggtatgtgatgcaagtggtgagccagctcctggacccccgcacctcagagttcactgcggcctttgtgggccgccttgtttccaccctcatctccaaggcagggcgggaactcggggagaatctagaccagattcttcgtgccatcctcagtaagatgcagcaggcagagacgctcagtgtcatgcagtccctgatcatggtgttcgctcatctggtgcacactcagctagaacctctcttggagttcctgtgtagcctcccaggacctactggcaaacctgctctagagtttgtgatggctgagtggacaagccgacagcacctgttctatggacagtatgaaggcaaagtcagctctgtggcactctgtaagctgctccagcatggcatcaatgcagatgacaaacggctacaggatatccgtgtgaagggagaggagatctacagcatggatgagggcatccgcacccgctctaagtcagccaaaaacccagaacgctggacaaacattcctttgctggtcaagatcctaaagctgatcatcaacgagctctccaacgtcatggaggctaatgccgctccccaggccactcctgcagagtggagtcaagatgactccaatgatatgtgggaggaccaggaggaggaagaggaggaggaggaggatggtttagctggccaacttttatctgacattcttgctacaagtaaatatgaggaggattactacgaggatgatgaggaagatgaccctgatgccctgaaggatcctctctatcagattgatctgcaggcatatctcacagatttcctctgccagtttgctcagcagccctgctacataatgttttcaggccaccttaatgacaatgagaggcgagttctacagaccatcggcatctaaaaaggggagcctttctacatttgctccttctgggccagccgcaaaccattttgcagccctcactggccttgagatgcactttcttctcaacctaaagtggcatcttgacccttggcccttggcctcggcagtgacactgatgacaattcagaccaggctcaccggtgccgtcacttaggaatgctggaacaaaggacatttctcaaagttcccctgaagacatgccatctctagaaccttttttctccccgactctacccccacctctgttcctagagccctctgctggcgagtccagaaacattattgcccagaaggattatgtgtttatggattattttgccccgcctcaggagcgcaggaagtcactaccatttatattctaaaacagacctatctatgttcataggacttctgatgtgttcagataggaatcctcatgagagatcattatgctttgtgccctggaccactgctgctctgggttctcaggaggaacaggcaagagcagcttcattctaagcctttccagtg

SEQ ID NO: 11483 - protein, 674 aa, Homo sapiens [sequence omitted]

SEQ ID NO: 11484 - DNA, 2279 bp, Homo sapiens
atgtaaacatgtcgaaaaacctatcaacaacagttccttagtttcaccacttcaaaaaatttattctagtgtcaaatcccacattttaaataaatacagaaatgattttgatgattctccatttctcccacaagaacaaaaagcacaaataagggaaaaaccgtgtgaatgtaatgagcatggcaaagcctttagagtgtcttcaagccttgctaaccatcaagtaatccacactgcagataacccttacaaatgtaatgaatgtgacaaggtcttcagtaacagttcaaaccttgtacaacatcaaagaattcatactggagagaagccttacaagtgtcatgaatgtggcaagctcttcaatcgaatttcactccttgcacgacatcagagaatacatactggagagaaaccttacaaatgtcatgagtgtggcaaagtcttcactcaaaattctcaccttgcaaatcatcacagaatccacactggagagaaaccttacaaatgtaatgagtgtggcaaggtcttcaacagaaatgcacaccttgcacgacatcagaaaattcatagtggagagaaaccttacaaatgtaaggaatgtggcaaagcattttcagggggttcaggccttactgctcatcttgtaattcacactggagagaaactttacaaatgtaataaatgcggcaaggtcttcaatcgaaatgcacaccttaccagacatcaaagaaaccatactggagagaaaccttatgaatgtaaagaatgtggcaaggtcttcaggcacaagttttgtctaaccaatcatcatagaatgcacacgggagagcaaccttacaaatgtaatgaatttgggaggccgaggcgggtggatcatgaggtcaggagatcgagaccatcctggctaacaaggtgaaaccccatctctactaaaaatacaaaaaattagccgggcgcggtggcgggcgcctgtagtcccagctactcgggaggctgaggcaggagaatggcgtgaacccgggaagcggagcttgcagtgagccgagattgcgccactgcagtccgcagtccggcctgggcgacagagcgagactccgtctcaaaaaaaaaaaaacaaacaaacaaacaaaaaaaaacaaatgtaatgaatgtggcaaagtcttcagttacaattcacaccttgcacaacatcagagaatacatactggagagaaaccttacaaatgcagtgactgtggcaaggtatttagtcgacttccgtgccttacacgacatcaaagagttcacactggagagagaccttacaaatgtaatgaatgtggcaaagcatttagagactgttcaggccttactgcccatctactaattcacactggagagaaaccttacaaatgtaaagaatgtgccaaggtcttcaggcatagattatccctaagcaatcatcagagatttcataccggagagaaaccttacagatgtgatgaatgtggcagggacttcactcgaaattcaaaccttgcaaatcatcacagaatccatactggagagaaaccttacaaatgcagtgaatgtcacaaagtctttagtcacaattcacaccttgcacgacataggcaaattcatactggagagaagtcttacaaatgcaatgaatgtggcaaggtcttcagccacaagttatacctaaaaaaacatgagagaattcatactggggagaaaccgtacagatgtcatgaatgtggtaaggacttcactcgaaattcaaacctggcaaatcatcacagaatccatactggagagaaaccgtacagatgaaatgtgtgtggtaagatctttagtaataattcacaccttgcacagcatgagagaattcattcatgagagagttcttacaaactgagtatggcaaactcttcatgctaagttctagcattaatcaacatcagagattccatactaaagagaaatcatagcaatgtatgtgaatcaggtctcttgaggcctgccaaatgactagatatcaaaacatacatcttggatgaaaccatacagatggattatgtatgctgaggctattattcaaggaccattactatggaacatgataagatttacacaagcgataattcagtctctagttctccaatatttatgatactgcatgctgcagaaaagtcacagctccaaatacgttgaatctcatgacgcgatgcatgtcgaaggtccaagggcatgtggaaatggtcagttatattcaggcaattaaaaaacctaattat

SEQ ID NO: 11485 - DNA, 1929 bp, Homo sapiens
  CDS (14)..(427)
ccttccggtcaccatggcgaccaggcgccttggggtcggggagacgctgggggccctcaacgcggccctggggccaggcggtccggtgtggaccaaggagacgcgcacccgccacctgcgttcccgagactttctggcaccgcaccgcgcgctgcaggcgcgcttcgatgacggccaggttccggagcatttgctccatgccctcgcctgcctgcagggccccggtgtggccccggtgctgcgctgcgcgccgacccccgcgggtctgtctctccaactgcagcggtccgccgtcttcgagcgcgtcctcagcgccgtggccgcctatgccacgcccgcctcgcctgcctcgctgggccagcgcgtcttactacactgcccagcactgcgcagctccccctgcgcgctcacggggtgtgcgtgcgcctagtgccagctgtgcgggatccgcacatgctgaccttcctgcagcaactgcgggtggactggcccgctgcctcggagagagcttcctcccacaccctgaggagccacgcccttgaagaacttacctctgctaatgacgggaggacactgtcccctggcatcctaggcagactgtgtctgaaggagctggtggaagaacagggccgcacagctggctatgaccccaacctggacaactgtctggtgactgaggatctcctctctgtgctggctgagctgcaagaggctctatggcattggcccgaggacagccacccaggcctggttagtgactcccagccctgtaggttctcccaaaccaagtatactgtacttccacagttatgattgtcctcccttaggctggggcctcagatactggtacaggcggctgcctggttgtacatgttgttagctgtgaggaggagttccagcaacagaagttggacctgctttggcggaagttggttgacaaggctccactcagacagaagcacctcatctgtggccctgtgaaagtagctggtgcacctggcactctgatgactgcccctgagtactacgagttccggcatacccaggtgtgcaaggcctcagcactgaagcatggtggggatctggcacaagacccagcctggacagagatctttggtgttctctctgtggccaccatcaagtttgagatgctgagcacagccccacagagtcagctcttcctggctctggctgacagcagtatctccacgaagggcacaaagagtggcacctttgtcatgtataattgtgcccgtcttgccacactctttgagagttacaagtgtagtatggaacaaggtctgtaccccacttttcctcctgtgagcagtctggacttctcactgctacatgatgaggtgagtgtccctcctggtagctggcacaaggaggcctggacttcccctcccagcacctttctccccaacagggtgagtggttgttgctcttcaacagtatcctcccctttccggatctgctgagccggacagcagtgctggactgcacagccccggggctccacattgctgtacgcacagagatggtgaggcatagacaaccaggacactctacactctattctttattctggcctggggcacaagagcaaagagatgggccagtgactcagtctctgtctctagatatgcaagttcctggtacagctcagcatggatttcagctcctactacaaccgggtacacatcctgggggagcctcgaccacacctctttggtcaaatgttcgtccgcctgcagcttctgagagctgtgcgtgaggtgctccatactggcctggctatgctgggtctccctccactgagccacatttaaggccacagaggctccaatacctgggaatgttcacaaagtcatcaactggaaaaaaagcaaaaacccacggccaaaataaattggtactgtttgttac

SEQ ID NO: 11486 - protein, 138 aa, Homo sapiens
MATRRLGVGETLGALNAALGPGGPVWTKETRTRHLRSRDFLAPHRALQARFDDGQVPEHLLHALACLQGPGVAPVLRCAPTPAGLSLQLQRSAVFERVLSAVAAYATPASPASLGQRVLLHCPALRSSPCALTGCACA

SEQ ID NO: 11487 - DNA, 2961 bp, Homo sapiens
  CDS (1831)..(2565)
aatatttatatttcctctgtcttttaaaactgaacaccgaggtgggttttgtggtgggtggtgaacggacaggtttgggcctcgatcccccacccgaccctagcacccacaggtgggggtgccccctctgctgatgcgcctcctccctcagcaccatggacctgctggactggggcagcctcatcgacagcaggaccaagctgtccaagcacttggtagtccccaacgcacaggtaacacctccgctcctcagtgaggcccagctcagcagggcgctgcgctaagaagggaattcagcctgccacgtgtgtctcttgttgcctaccctgggaacttaacatgaccaaaatcactgcacactatggccccacagaccccctgtggtccagggggaagaagacaagcccactagtgtccacagagtgcttggcgggacagagacccacgcggagccttaagacaccacaaggagagggggtctgggggccttccccaagtcatctgtcttgtgcatcaggtcaccccaaacttcagaggcctgaaacggcagcagccactctgcttctgcctcatggttctggggttgacagggctcagctgggcagtcctcccctggggtctcctgggtagctgtactcacagagtggtggcgctgggacctgggggaggcacccattcacatgtctgggagttggtgctggctgtggcttgggctttttcccaacatggcagctgggctctaagggccagtgtcccctgagacgtgagagccaggcagaagctgggtgaccttttcctgcctcgcctcagaagtcacacggtgtcttttctggcaagttctgtttgttagaagcatgtcaccaggccagcctgtatacagcggggagaggaatgagactcatctgcctgtgggaggggggcccaggacctggcagactgcttgaaaccacagcttaaactgggattcaaagaaagaacagaagcaccttcagaaaacatcctgcagaggcagctttccatgacacatctagccccagtccactaagggcccagcctcaaacttagagcccccgacccagagcctcggggcgcagtgcgtacagtgtggctgtgcaccaaggccaccagctgttggagactttagcatggtgtagcaagggatagagtggtactgtttgtgcccagtgaggcaaggctgctggggccagcaaaggggtgagcgggaggccctgcgggatgggtccccacggcctctgagcaccagcaacttgaaggcctcatcctggtggttgccctggtccctggctacgtgtcagcacgtgctgcacaactgccctgtctgcctgtagccaggggtcttcctcctgggccctctgcctgctccgggtggagcccttctgtttgacgattgggtgatcagtgttcacttgttcaatgtcacatgggagttgcagggggctctcccacaacggtggggcctctgtgggaactggggagtacacacttcggagtgcaggcctggactgagcctggggcccactgacatgggcactgagctccctcgtggtacccctaggccccgcatagggcagtgcactggctgcgttggaggttcaggggcactgtgctgcttgtccaggtggccctccctcccagccctgcacggacgggtgagagggttcctgtgggctgggaatactgagagaggtttagcctgggcctcagggtggcactttcccgcccttgctgtggcctgaccgcgtgttgcacccccagacaggacagctggagcccctgctgtcccggttcactgaggaggaggagctacagatgaccaggatgctacagcggatggatgtcctggccaagaaagccacagagatgggcgtgcggctgatggtggatgccgagcagacctacttccagccggccatcagccgcctgacgctggagatgcagcggaagttcaatgtggagaagccgctcatcttcaacacataccagtgctacctcaaggatgcctatgacaatgtgaccctggacgtggagctggctcgccgtgagggctggtgttttggggccaagctggtgcggggcgcatacctggcccaggagcgagcccgtgcggcagagatcggctatgaggaccccatcaaccccacgtacgaggccaccaacgccatgtaccacaggtgcctggactacgtgttggaggagctgaagcacaacgccaaggccaaggtgatggtggcctcccacaatgaggacacagtgcgcttcgcactgcgcgggatggaggagctgggcctgcatcctgctgaccaccaggtgtactttggacagctgctaggcatgtgtgaccagatcagcttcccgctgggccaggccggctaccccgtgtacaagtacgtgccctatggccccgtgatggaggtgctgccctacttgtcccgccgtgccctggagaacagcagcctcatgaagggcacccatcgggagcggcagttgctgtggctggagctcttgaggcggctccgaactggcaacctcttccatcgccctgcctagcacccgccagcacaccctcagcctccagcaccccccgcccccgcccaggccatcaccacagctgcagccaaccccatcctcacacagattcaccttttttcaccccacacttgcagagctgctggaggtgaggtcaggtgcctcccagccctgcccagagtatgggcactcaggtgtgggccgaacctgatacctgcctgggacagccactggaaacttttgggaactctcctcgaatgtgtgggcccaaggcccccacctctgtgacccccatgtccttggacctagaggattgtccaccttctgccaaggccagcccacacagcccgagccccttggggagcagtggccgggctggggaggcctgcctggtcgataaaccactgttcctgc

SEQ ID NO: 11488 - protein, 245 aa, Homo sapiens
MTRMLQRMDVLAKKATEMGVRLMVDAEQTYFQPAISRLTLEMQRKFNVEKPLIFNTYQCYLKDAYDNVTLDVELARREGWCFGAKLVRGAYLAQERARAAEIGYEDPINPTYEATNAMYHRCLDYVLEELKHNAKAKVMVASHNEDTVRFALRGMEELGLHPADHQVYFGQLLGMCDQISFPLGQAGYPVYKYVPYGPVMEVLPYLSRRALENSSLMKGTHRERQLLWLELLRRLRTGNLFHRPA

SEQ ID NO: 11489 - DNA, 2755 bp, Homo sapiens
  CDS (37)..(1917)
caaataaacccagcaaaggaactagcagagctggtgatgtttatggcacagattagtcactgctacccagagtacctaagtaattttcctcaagaggtgaaagatcttctctcctgcaatcataccgtattggatccagatctgcgaatgacattttgcaaagctttgatcttgctgagaaataagaatctcatcaatccatcaagcctgctagaactcttctttgaactttttcgttgccatgataaacttctgcgaaagactttatacacacatattgtgactgatatcaagaatataaatgcaaaacacaagaacaataaagtgaatgtagtattgcaaaatttcatgtacaccatgttaagagatagcaatgcaaccgcagccaagatgtctttagatgtaatgattgaactctacagaaggaacatctggaatgatgcaaaaactgtcaatgttatcacaactgcatgtttctctaaggtcaccaagatattagttgccgctttgacattctttcttgggaaagatgaagatgaaaaacaggacagtgactccgaatctgaggatgatggaccaacagcaagagacctgctagtacaatatgctacagggaagaaaagttccaaaaacaagaaaaagttggaaaaggcaatgaaagtgctcaagaaacaaaaaaagaagaaaaaaccagaggtgtttaacttttcagccattctcttgattcatgatccccaagattttgcggaaaaactactaaagcagcttgagtgctgtaaggagaggtttgaagtgaagatgatgctcatgaaccttatctccagattggtgggaattcatgagcttttcctcttcaatttctatccctttttgcaaaggtttctgcagccccaccaaagagaagtaaccaagatccttctgtttgctgcacaagcatctcatcacctagtacccccagagattattcaatcattgcttatgactgtggcaaacaattttgttaccgacaagaactctggagaagtcatgacagtaggaatcaatgctataaaggagataacagctcgatgtcctctggccatgactgaagaacttctccaagacctggctcagtataaaacacacaaggataagaatgtaatgatgtctgctagaactttgattcacctcttccgaacactgaatcctcagatgctgcagaagaaattccggggtaagcctacagaggcctccatagaagcaagagtacaagaatatggagaattagatgctaaagattacattccaggagcagaagttctggaagttgagaaagaagagaatgctgaaaatgatgaagatggatgggaaagtaccagtctcagtgaggaggaggatgctgatggtgaatggattgatgtgcaacactcttccgatgaagaacagcaagaaatctccaagaagctgaacagcatgcccatggaggagcggaaggccaaagctgcagccatcagcactagccgagttttaactcaggaagacttccagaaaatccgcatggcccaaatgagaaaagaacttgatgctgcccccgggaaatgccagaagaggaaatacattgaaatagacagtgatgaagagcccaggggtgaattactttctcttcgggacattgaacgccttcataaaaagccaaagtctgacaaagagacaagactagcaactgcaatggctggaaagacagaccgaaaagaatttgtgaggaagaaaaccaaaacaaatccattttccagttcgacaaataaagagaagaaaaaacagaagaactttatgatgatgcggtatagccagaatgtccggtcaaaaaataagcgttccttccgagaaaaacagttggcactacgagatgcacttttgaaaaagagaaaaagaatgaagtaacttcctggcaagttttccattcctagaagaatgctaagtttgtgtccttgctctgaaaattggtaaatcaagcatgtttgtttacattaaaaagtccagacacactgtattgtgaaaactgctgaacatgtggcagcaattttgtgtttttattttggagacggctaatggtaggaatgttaatgtaaatagtggtggtaatgtaaaatcatttcatttatcattcatgcaaaaaaaagtatgtattgagtgcctattcattgtcactgtagatgcaaaacgaatgagctgtaaccccttcactcaaggcattgacagcttagctgtgagggtggacacacatatgtgtatttacagtgcagtgtaaatagttctgtagtagaggttaactccatatttctgtgaggtcactgaggccttatggactaactctgtgaggataggagttatatattcttataagacaaaacaaaacaggacaatgttacaagagtaagaggttcttacttgtacataggctttcctgctgaaaacaggcccctgctgtacagattttgggtacataatttagctcttttagtcagtccaagagatttaagtgaccccccccccccccgtgttttttttgtttttgtttttgttttgaatgccatgtaaaggctttttggttaagacctcacttttaaaactgccttaagtataaatagtacctttggaatatatttagttcatcatttgagctgccttcatactggtttcctcagccttccttcagcctgtaatattttcagcccactgtttaccttgtctcaataaaaggtttctaatgccaaat

SEQ ID NO: 11490 - protein, 627 aa, Homo sapiens
MFMAQISHCYPEYLSNFPQEVKDLLSCNHTVLDPDLRMTFCKALILLRNKNLINPSSLLELFFELFRCHDKLLRKTLYTHIVTDIKNINAKHKNNKVNVVLQNFMYTMLRDSNATAAKMSLDVMIELYRRNIWNDAKTVNVITTACFSKVTKILVAALTFFLGKDEDEKQDSDSESEDDGPTARDLLVQYATGKKSSKNKKKLEKAMKVLKKQKKKKKPEVFNFSAILLIHDPQDFAEKLLKQLECCKERFEVKMMLMNLISRLVGIHELFLFNFYPFLQRFLQPHQREVTKILLFAAQASHHLVPPEIIQSLLMTVANNFVTDKNSGEVMTVGINAIKEITARCPLAMTEELLQDLAQYKTHKDKNVMMSARTLIHLFRTLNPQMLQKKFRGKPTEASIEARVQEYGELDAKDYIPGAEVLEVEKEENAENDEDGWESTSLSEEEDADGEWIDVQHSSDEEQQEISKKLNSMPMEERKAKAAAISTSRVLTQEDFQKIRMAQMRKELDAAPGKCQKRKYIEIDSDEEPRGELLSLRDIERLHKKPKSDKETRLATAMAGKTDRKEFVRKKTKTNPFSSSTNKEKKKQKNFMMMRYSQNVRSKNKRSFREKQLALRDALLKKRKRMK

SEQ ID NO: 11491 - DNA, 2394 bp, Homo sapiens
  CDS (15)..(695)
ctcagtctgcggccatgggggcgtccgcgcggctgctgcgagcggtgatcatgggggccccgggctcgggcaagggcaccgtgtcgtcgcgcatcactacacacttcgagctgaagcacctctccagcggggacctgctccgggacaacatgctgcggggcacagaaattggcgtgttagccaaggctttcattgaccaagggaaactcatcccagatgatgtcatgactcggctggcccttcatgagctgaaaaatctcacccagtatagctggctgttggatggttttccaaggacacttccacaggcagaagccctagatagagcttatcagatcgacacagtgattaacctgaatgtgccctttgaggtcattaaacaacgccttactgctcgctggattcatcccgccagtggccgagtctataacattgaattcaaccctcccaaaactgtgggcattgatgacctgactggggagcctctcattcagcgtgaggatgataaaccagagacggttatcaagagactaaaggcttatgaagaccaaacaaagccagtcctggaatattaccagaaaaaaggggtgctggaaacattctccggaacagaaaccaacaagatttggccctatgtatatgctttcctacaaactaaagttccacaaagaagccagaaagcttcagttactccatgaggagaaatgtgtgtaactattaatagtaagatgggcaaacctcctagtccttgcatttagaagctgcttttcctaagacttctagtatgtatgaattctttgaaaattatattacttttatttctactgattttattttggatactaaggatgtgccaaatgattcggatactaagatgcatcgtttgaaatcatctagtgtgttgtatgcagttatcctcaaaaacatcagcgatgtctgaacctttaaaacatctgttagagcaaaattaaaagagcatttggtagtaatctaactttttgttcagttaataagtggttgataaagtttccatatttttctggaaaagttaaaaaaagttacatgtcatttggagaaaatacgtaatcagaaatttgtgcatagattgatgccaaaaaagacatttccagcattgtggaacatggtgagacactatataaaattccagaaagaaagcaactggatttacagatttattgtgagacacaaattcactgctgcccttacactaagaaatgtatatgttaaccatatatgctgtatttattttgtcgttaagcatactttcagtttactcagaattttcaatttgctataaagatgtatcaattagcatatagaaaaatattactttaagatgacttgtttcctttgaaaatacctgtgtactgagggttatgatttgtgtcaaaaattgacataagtgcttttacaagcaccaaagttgaatgaattttcaacaaaatgtaattaaagtctatgttttcagttatgactcaggttaagaaatgtgttttaggatctacttgctggtttttctttttgatccaaatgtgtgatctgccctgataaataacaagttatagtaccatctcccccgccaataaaaaagagaagaaaaaagagaaacccgtggcactatgtaaataaagtaagcatactttgttgttagtaaatagatgaggcatgcctgggaaatgctcccttggcataaatagcaatcaattataattagtaaacaggtgtaccaataaaaagaatttacatgataggttaacaaggaccaggaaagtgagtttcctgaaggagttctttgttcctgatcaaagaaattgatacctgttagcattcactgccaccatattttaaggagaaagaactctattggtgtcgtctgagcagccatttaaaaattggaatctaaaggatggttgctgatgtactgtgtggtctggtagaagtggggaaatatgagagatggaggaaaaacttgattatgtcttccatggcatatttactcttactttacttcgtgccaaatcaaatgaaacaagccgtcttacaagtcgttattgcctttaaaaatctgttccgtttttttcccaggtacttaaaatacaagtgccagtaagtggttcttatgtgttttggggggaaaattttatttcccttttcttctgatatttaaaaaattcatcgatctttcaagatgaaccaaggttttttaaaagaaatataggaaacacttcattctttataaaactttctataatgccttatttgaatgttaatcttatgtgctttctaaaaaatgttgtgaaataccaaacttatggattatcactaggttatcaagcatatattagtctttatcagaataaaatgaaatttcat

SEQ ID NO: 11492 - protein, 227 aa, Homo sapiens
MGASARLLRAVIMGAPGSGKGTVSSRITTHFELKHLSSGDLLRDNMLRGTEIGVLAKAFIDQGKLIPDDVMTRLALHELKNLTQYSWLLDGFPRTLPQAEALDRAYQIDTVINLNVPFEVIKQRLTARWIHPASGRVYNIEFNPPKTVGIDDLTGEPLIQREDDKPETVIKRLKAYEDQTKPVLEYYQKKGVLETFSGTETNKIWPYVYAFLQTKVPQRSQKASVTP

SEQ ID NO: 11493 - DNA, 2349 bp, Homo sapiens
  CDS (241)..(2262)
gctcttatcggttcccatcccagttgttgatcttatgcaagacgctgcacgaccccgcgcccgcttgtcgccacggcacttgaggcagccggagatactctgagttactcggagcccgacgcctgagggtgagatgaacgcgctggcctccctaaccgtccggacctgtgatcgcttctggcagaccgaaccggcgctcctgcccccggggtgacgcgcagcccccagccgcccagacacatggccccaggccaagcaccccatcaggctaccccgtggagggatgcccaccctttcttcctcctgtccccagtgatgggcctcctcagccgcgcctggagccgcctgaggggcctgggacctctagagccctggctggtggaagcagtaaaaggagcagctctggtagaagctggcctggagggagaagctaggactcctctggcaatcccccataccccttggggcagacgccctggagaggaggctgaagacagtggaggccctggagaggacagagaaacactggggctgaaaaccagcagttcccttcctgaagcctggggacttttggatgatgatgatggcatgtatggtgagcgagaggcaaccagtgtccctagagggcagggaagtcaatttgcagatggccagcgtgctcccctgtctcccagccttctgataaggacactgcaaggttctgataagaacccaggggaggagaaagccgaggaagagggagttgctgaagaggagggagttaacaagttctcttatccaccatcacaccgggagtgttgtccagccgtggaggaggaggacgatgaagaagctgtaaagaaagaagctcacagaacctctacttctgccttgtctccaggatccaagcccagcacttgggtgtcttgcccaggggaggaagagaatcaagccacggaggataaaagaacagaaagaagtaaaggagccaggaagacctccgtgtccccccgatcttcaggctccgaccccaggtcctgggagtatcgttcaggagaggcgtccgaggagaaggaggaaaaggcacacgaagaaactgggaaaggagaagctgccccagggccgcaatcctcagccccagcccagaggccccagctcaagtcctggtggtgccaacccagtgatgaagaggagagtgaggtcaagcctttgggggcagctgagaaggatggagaagctgagtgtcctccctgcatccccccaccaagtgccttcctgaaggcctgggtgtattggccaggagaggacacagaggaagaggaagatgaggaagaagatgaggacagtgactctggatcagatgaggaagagggagaagctgaggcttcctcttccactcctgctacaggtgtcttcttgaagtcctgggtctatcagccaggagaggacacagaggaggaggaagatgaggacagtgatacaggatcagccgaggatgaaagagaagctgagacttctgcttccacaccccctgcaagtgctttcttgaaggcctgggtgtatcggccaggagaggacacggaggaggaggaagatgaggatgtggatagtgaggataaggaagatgattcagaagcagccttaggagaagctgagtcagacccacatccctcccacccggaccagagtgcccacttcaggggctggggatatcgacctggaaaagagacagaggaagaggaagctgctgaggactggggagaagctgagccctgccccttccgagtggccatctatgtacctggagagaagccaccgcctccctgggctcctcctaggctgcccctccgactgcaaaggcggctcaagcgcccagaaacccctactcatgatccggaccctgagactcccctaaaggccagaaaggtgcgcttctccgagaaggtcactgtccatttcctggctgtctgggcagggccggcccaggccgcccgccagggcccctgggagcagcttgctcgggatcgcagccgcttcgcacgccgcatcgcccaggcccaggaggagctgagcccctgcctcacccctgctgcccgggccagagcctgggcacgcctcaggaacccacctttagcccccatccctgccctcacccagaccttgccttcctcctctgtcccttcgtccccagtccagaccacgcccttgagccaagctgtggctacaccttcccgctcctctgctgctgcagcggctgccctggacctcagtgggaggcgtggctgagaccaactggtttgcctataatttattaactatttattttttctaagtgtgggtttatataaggaataaagccttttgatttgt

SEQ ID NO: 11494 - protein, 674 aa, Homo sapiens
MAPGQAPHQATPWRDAHPFFLLSPVMGLLSRAWSRLRGLGPLEPWLVEAVKGAALVEAGLEGEARTPLAIPHTPWGRRPGEEAEDSGGPGEDRETLGLKTSSSLPEAWGLLDDDDGMYGEREATSVPRGQGSQFADGQRAPLSPSLLIRTLQGSDKNPGEEKAEEEGVAEEEGVNKFSYPPSHRECCPAVEEEDDEEAVKKEAHRTSTSALSPGSKPSTWVSCPGEEENQATEDKRTERSKGARKTSVSPRSSGSDPRSWEYRSGEASEEKEEKAHEETGKGEAAPGPQSSAPAQRPQLKSWWCQPSDEEESEVKPLGAAEKDGEAECPPCIPPPSAFLKAWVYWPGEDTEEEEDEEEDEDSDSGSDEEEGEAEASSSTPATGVFLKSWVYQPGEDTEEEEDEDSDTGSAEDEREAETSASTPPASAFLKAWVYRPGEDTEEEEDEDVDSEDKEDDSEAALGEAESDPHPSHPDQSAHFRGWGYRPGKETEEEEAAEDWGEAEPCPFRVAIYVPGEKPPPPWAPPRLPLRLQRRLKRPETPTHDPDPETPLKARKVRFSEKVTVHFLAVWAGPAQAARQGPWEQLARDRSRFARRIAQAQEELSPCLTPAARARAWARLRNPPLAPIPALTQTLPSSSVPSSPVQTTPLSQAVATPSRSSAAAAAALDLSGRRG

SEQ ID NO: 11495 - DNA, 3086 bp, Homo sapiens
taccaatgctgcaggtacattaatgaactcgagatggctctgtaagcctgactggcaataacgcacggtactgttcttgaaatacctaatggcttgaaattctagtctgtttgtgaaagatgggtactatcatgatttcctcttctattcctatattcttttctggattttttttaataattagtgatataagcattgtttttattgcagccatatccacttacccatcttaagatctgtagctgggattttctgacttgtaatgagcagggggattgctttttcactttgtgacactctttagagctttaatgcttcacagtatatggcctggtctcatccttgcgtgttccacttgaggccctttggtgtcttgccccattcttgtgtttataaaatgtttgagtatttctgatgagtgatgcttgccttagtctcatgaattcagatcccttcatgtcctttaagtatgctcctcaatgtgtaaacaggaacaactttatgatttgaaagctttaaaggagattcttctcccacccccaactttatttgcaatgggatttttcctaggagagttatgaaaagttgaaggcttctaagggaatactgtaaacatgacccacttatatttatcacagtgaaaggcaaaattattcactcagaagtaatataaattacctctttaaaaagtaaccagaatttgtcctttttggttttatacattcacaaacatatacatttttcttgagtctcaaggtattttatatttttagtcagaaaaaataatttttcatttcagttttccataaactgttacacaaaatataaacctaacgtgtatttttcaggactgcgtgatcgtgcactttgtgtggtaagaggtttgagtagtcctatatgtcacctagggaacagacattatagcttcctagcaaatgaatattcatgccttgtttttgatacctcctggcagcttccatgtcaccacttgttcatacctgcccagagctagttttagacatggcaaaatagaaatcatctgtaatttattagctaacaatgtaaaaccatcttttaaagccttcagactgtcaagacgacatgagcagctcaccatatgataaaaatacataaatttgacattccctcttccataaacctttgtttgtagatttaatgttgaacagtacttttccataaagttctagtcacttctgttggcctgagccaccagattatgatgttgccagaattcactcaatttgaataaagatgaacagtatttgttttcttgtttccatgaattatatcagtattctaaaacatcgcttcagaaagagaactgtttatttctgcaggcttcctgtccttttgtggtatggttttttggccttattttcactggcttttccttctccaaactttgaggcgtgatttcattcattgaagaatcaatacatattttgtttcaaaatgtttgaaacaaaagacatagatggtagacttttattaaaacatatatggatgtggaaagcacatatattaatgcagtcatcccttttcaggtgggaagagagcaaaccagttgattttttaattcatccttagtacacagagaatatacttttcctcaagtaatatacctgtttgaagctttaagagagatgtttttggtaactatttcattttcccaaagaagtttgctattcttgtgttaattgtgtatacctgattgttttttcctggaggtttttgttgttgttgtttagttttgggtttttttttttttaagaggggcaagtgttttctgaaatgatgcatattttaagactcgattcatattgccactgtgctatccttgaactaccaataatttttataaaatatctagtttttactacttttatataaactttactttccagatgaagagctgagcctgattcaaatggtttttctgctttatacttctttttagttcattggtttttatagtagaggttttctatttgtttttttttttttttactacatttatatgtctgatacatatacggctttggagacaatcaagtaacaactgaaaatgtgaaagtaaccatatctgacaaaattcccttgaatttttatcctttgcttgcaacatttaagactcaaagtcactggtatattggattaagttttttcctgttaatgcaattatagaaatacatcggagacacaacaaatgtggccattacaggtttcataaaattacactgacttggctgttacttgatcttaggaaacagcacagtttaagatattgtgaattctgacttatactttattaaatgctgtaaatctaaatagatcctgttggatgtgatgggtctagtccagtttatttaagttcatgtttcactgtttgcactttgcattgaacaatgggtttattcgctgatgtaaacggttcgagtgaagaattaatgcagtaagtatgacaacacatacacacttgcctctccccatctccagaagaggggagcagagtccgagcttatctaaatatgaatgtggccacaaagctgtggaaggtgacaaagcttaaacacctttgccctggctctgcattgtcacctagagagcaagaggtctatagaaacatcatgtcacatgaaacgattctctgctttttggttctgaacttgaagtccctaaactgcaaaatctaagagttgggtggttattaaaatgcttttaaagtcaactgtggcaccaattctaatgtaatccaacttgtgactgtttttttttgttttgttttgtttttgtgtgtgtgtgtgtggcactgggaaaagtggaaacaaacatgtattgaaatacatattggaaataaaaatggtttgagcgtcagtgatattctcccagaatgtacttatcttacctcggcatgtactgtagtcactcagtatttgtatatgttgctagaatttagattgtaaaatagtgaaattttaatgtgttcatttgtttttaatgtatatatgtcttgctcagattatttggtttaaataaaacaaccttgaggtttgtagcttttcctt

SEQ ID NO: 11496 - DNA, 3380 bp, Homo sapiens
  CDS (84)..(1934)
aagaaggcggcgggggaagatggcggtcctggggtagagtttgcaagctttctgactaggctagtcgagtaactattcgggtcatggcgtcaaactcaactaagtctttcctggcagatgccggctatggcgaacaggaactggatgccaactctgcccttatggaattggacaaaggcctaagatctggcaaacttggtgaacagtgtgaagcagttgttcgctttcccagactttttcagaagtatccattccctattcttatcaattctgcattcctaaagttagctgatgttttcagagttggaaataatttcctgaggctatgtgttcttaaagttacccaacaaagtgagaaacatttggagaagattctaaatgtggatgaatttgtgaagagaattttttctgtgattcatagtaatgatcctgtggcaagagccatcaccctccggatgttgggaagtctggcatcaataattcctgagaggaagaatgctcatcatagtattcgtcagagtttagattcacatgataatgtagaagttgaagctgctgtttttgctgctgcaaacttctctgcacagtcaaaggattttgctgtaggaatctgtaacaaaatcagtgaaatgattcaaggtttagcgacaccagtagacttgaagctaaaattgatacccattctacagcacatgcaccatgatgcaatcttggcttccagtgctcgtcagcttttacaacagctggtcacatcctatccgtccaccaaaatggtgattgtgtctttgcacactttcactctgcttgcagcgtcatctttggttgatacacctaagcagattcagcttctgttgcagtatttgaagaatgatcccaggaaggcagtaaagagacttgctattcaagatctgaaattacttgctaataaaacaccacatacttggagtagggagaatattcaggcactttgtgagtgtgccctccagactccttatgacagcttaaaactagggatgttgtctgtcctttccacactatcagggaccatcgccatcaaacattacttcagtatagttccaggaaatgtgagttcttctcccagatcttctgatttagtcaaattagcccaagagtgctgttaccataataacaggggcattgcagctcatggagttagagtcctaactaatataactgtttcttgtcaagaaaaggatcttttggcactggaacaagatgctgtctttggcctggaatccctactggtactttgtagtcaagatgatagtccaggtgctcaggccactttaaagattgctctaaactgtatggtgaagttggccaagggcaggccccatcttagccagtcagtagttgagaccttgttgactcaattgcacagtgctcaagacgctgcccggattttgatgtgccattgcctggcagccattgccatgcaactgccggtgctgggtgatgggatgcttggtgacctcatggagctgtacaaggtgattggacgatcagccacagacaagcaacaagaacttctggtgagtttggctactgtgatttttgttgcaagtcagaaggcattgtctgtggaaagtaaggcagtaattaagcagcagcttgaaagtgtctccaatggatggactgtataccgtattgccagacaggcttccagaatgggtaatcatgacatggccaaagagctttatcagagtttgctgactcaggttgcctcagaacatttctacttctggctaaatagtttgaaggagttttcacatgcagaacagtgtctcactgggttgcaagaggaaaattatagttcagcactttcttgcattgctgaatctttaaaattctatcacaaagggattgcttccttaacagcagctagtacaccactgaatcctttaagctttcagtgagaatttgtaaaactcaggattgaccttttacaagccttctctcaacttatctgtacttgtaatagcctgaagacaagcccaccacctgcaattgccacaacaattgccatgaccttaggaaatgacctccagaggtgtggtcgcatctccaatcagatgaaacagtccatggaagaatttcgaagccttgcttctcgatatggagatctttaccaggcatcttttgatgctgactcagcaactttgaggaatgttgaactacagcagcagagctgtttactgatatctcatgcaatagaagccctgattttggatccagaatcagcaagtttccaggaatatggatctactggaacagcccatgctgatagtgaatatgaaagaagaatgatgtctgtatataatcatgtcttggaggaggtagaatcactcaatcggaaatatacccctgtttcttatatgagatattttttccagaaactacagtctaccagcatcaagcttgctctgtcaccatcgccccggaatcctgcagagcccattgctgtccagaataaccagcagctggcgctaaaggtagagggagtggttcagcacggatctaaaccaggactcttccgcaaaattcagtctgtctgtctgaatgtttcttccacactgcagagtaaatctggacaagactacaagatacccattgacaacatgaccaatgagatggagcaaagggttgaacctcataatgattacttcagtactcaatttctgttgaactttgctatccttggaacacacaacattacagtggaatcttctgtgaaagatgccaatggtatagtatggaagactggtcccagaactaccatatttgtaaaatccctggaagacccttattcccagcaaattcgcttacaacagcagcaagcccagcagccattacagcagcagcagcaacgcaatgcctacacacggttttaaccatggaatgaatgcactgcagactctcaagagatcaatcaaattgccagaaacagtttggtttttcatatggaataagtattaaagttacagtgtagttcatttattcattgatttttgtaatgtaatattctggaaaaaattttgttttcttaaaaattttgtctgacagctgggcgtggttgctcacgcctgtaatcccagcactttgggaggctgaggtgggcggctcacgaggagatcaagaccatcctggctaacacagtgaaaccccgtctccactaaaaaatacaaaaaaattagccaagcatggtggcaggcgcctgtagtcccagctacttgggaggctgaggcaggagaatggtgtgaacctgggaggcggagcttgcagtgagccgagactgtgctccagcctgggcgacagagcgagactccgtctcaaaaaaataaataaatacattttgtttg

SEQ ID NO: 11497 - protein, 617 aa, Homo sapiens
MASNSTKSFLADAGYGEQELDANSALMELDKGLRSGKLGEQCEAVVRFPRLFQKYPFPILINSAFLKLADVFRVGNNFLRLCVLKVTQQSEKHLEKILNVDEFVKRIFSVIHSNDPVARAITLRMLGSLASIIPERKNAHHSIRQSLDSHDNVEVEAAVFAAANFSAQSKDFAVGICNKISEMIQGLATPVDLKLKLIPILQHMHHDAILASSARQLLQQLVTSYPSTKMVIVSLHTFTLLAASSLVDTPKQIQLLLQYLKNDPRKAVKRLAIQDLKLLANKTPHTWSRENIQALCECALQTPYDSLKLGMLSVLSTLSGTIAIKHYFSIVPGNVSSSPRSSDLVKLAQECCYHNNRGIAAHGVRVLTNITVSCQEKDLLALEQDAVFGLESLLVLCSQDDSPGAQATLKIALNCMVKLAKGRPHLSQSVVETLLTQLHSAQDAARILMCHCLAAIAMQLPVLGDGMLGDLMELYKVIGRSATDKQQELLVSLATVIFVASQKALSVESKAVIKQQLESVSNGWTVYRIARQASRMGNHDMAKELYQSLLTQVASEHFYFWLNSLKEFSHAEQCLTGLQEENYSSALSCIAESLKFYHKGIASLTAASTPLNPLSFQ

SEQ ID NO: 11498 - DNA, 2670 bp, Homo sapiens
  CDS (403)..(1647)
gctcgcaggcgggggtttccatggtgatggtcaacaagcctcaactgcctctgctacaactgccaagttccccgcgtcccaccctcctctaggtgctccaagggaccaccggggtgcctgatacgagagcgggagtgtagagactcggaggccgaggttgagaacaaaaacatgcacctggagtttccccggagccctctgcgtggttgagcttcggtggaatttcggggctcttggctgccagccgcgcttgcctggtagcaacagaaaccagtcctgctcgcctccgtggacatttcattaccatccagaagtgtctcccactgaaggcatccgtggttgtttttaagccacaaaaaagccacacccaagatcacctgacacccaccctgtcaagtgtccatgatgctgggccctgagggaggtgaaggctttgtggtcaagctccgtggcctgccctggtcctgctctgttgaggacgtgcagaacttcctctctgactgcacgattcatgatggggccgcaggtgtccatttcatctacactagagagggcaggcagagtggtgaggcttttgttgaacttggatcagaagatgatgtaaaaatggccctgaaaaaagacagggaaagcatgggacaccggtacattgaggtgttcaagtcccacagaaccgagatggattgggtgttgaagcacagtggtcccaacagtgccgacagcgccaacgatggcttcgtgcggcttcgaggactcccatttggatgcacaaaggaagaaattgttcagttcttctcagggttggaaattgtgccaaacgggatcacattgcctgtggaccccgaaggcaagattacaggggaagcgttcgtgcagtttgcctcgcaggagttagctgagaaggctctagggaaacacaaggagaggatagggcacaggtacattgaggtgtttaagagcagccaggaggaagttaggtcatactcagatccccctctgaagttcatgtccgtgcagcggccagggccctatgaccggcccgggactgccaggaggtacattggcatcgtgaagcaggcaggcctggaaaggatgaggcctggtgcctacagcacaggctacgggggctacgaggagtacagtggcctcagtgatggctacggcttcaccaccgacctgttcgggagagacctcagctactgtctctccggaatgtatgaccacagatacggcgacagtgagttcacagtgcagagcaccacaggccactgtgtccacatgaggggcctgccgtacaaagcgaccgagaacgacatttacaacttcttctctcctctcaaccctgtgagagtccatattgagattggcccagatggaagagtgacgggtgaagcagatgttgagtttgctactcatgaagaagctgtggcagctatgtccaaagacagggccaatatgcagcacagatatatagaactcttcttgaattcaacaacaggggccagcaatggggcgtatagcagccaggtgatgcaaggcatgggggtgtctgctgcccaggccacttacagtggcctggagagccagtcagtgagtggctgttacggggccggctacagtgggcagaacagcatgggtggctatgactagttttgttaggaacatttgagttacttcaatcattttcacaggcagccaacaagcaattaagagcagttataatagaggaagctgggggacccattttgcaccatgagtttgtgaaaaatctggattaaaaaattacctcttcagtgttttctcatgcaaaattttcttctagcatgtgataatgagtaaactaaaactattttcagctcttctcaattaacattttggtagtatacttcagagtgatgttatctaagtttaagtagtttaagtatgttaaatgtggatcttttacaccacatcacagtgaacacactggggagacgtgcttttttggaaaactcaaaggtgctagctccctgattcaaagaaatatttctcatgtttgttcattctagtttatattttcatttaaaatcctttaggttaagtttaagctttttaaaagttagttttgagaattgagacacaatactaatactgtaggaattggtgaggccttgacttaaaactttctttgtactgtgatttccttttgggtgtattttgctaagtgaaacttgttaaattttttgttaactaaatttttttcttaaaataaagactttttcacaatgactggcacagattactcagcaaaagatagcaaaacgggtggttgaagataattcattttaatcgtaatgtattttagtgtgaatttaaaaatttcatacatcaaatctatgatctcccttatattcttatgatgaggctaaataaaagtctaataaaaatgttaaatatgtgaatggtggaaatggtgactagcagcacacattctgggaagcatcaaatagacacacggccccagccacctgcaacttatgtgcactgttgtaaaccattcagaattttcctgctaggcccttgatgctggagtcacatctgttgatagctggagaactttagtttcaagtactacattgtgaaagcaattattttgtttctcgtttttataaaatgctgacttaaactttt

SEQ ID NO: 11499 - protein, 415 aa, Homo sapiens
MMLGPEGGEGFVVKLRGLPWSCSVEDVQNFLSDCTIHDGAAGVHFIYTREGRQSGEAFVELGSEDDVKMALKKDRESMGHRYIEVFKSHRTEMDWVLKHSGPNSADSANDGFVRLRGLPFGCTKEEIVQFFSGLEIVPNGITLPVDPEGKITGEAFVQFASQELAEKALGKHKERIGHRYIEVFKSSQEEVRSYSDPPLKFMSVQRPGPYDRPGTARRYIGIVKQAGLERMRPGAYSTGYGGYEEYSGLSDGYGFTTDLFGRDLSYCLSGMYDHRYGDSEFTVQSTTGHCVHMRGLPYKATENDIYNFFSPLNPVRVHIEIGPDGRVTGEADVEFATHEEAVAAMSKDRANMQHRYIELFLNSTTGASNGAYSSQVMQGMGVSAAQATYSGLESQSVSGCYGAGYSGQNSMGGYD

SEQ ID NO: 11500 - DNA, 2191 bp, Homo sapiens
  CDS (96)..(1418)
gttgttgcttgggcgcttctccgctgcgtgtaggtgaagggggcttcctgaccgaggaagacaatggtgtaaaattggttgatcctttgggtgaaatgttggcaccatcctgggaggaacatgccacctgtttagcaaatgctgaggaacaagatatgcagagagtgcttattgacatcagcgagaaagaagctgtgaatctgcaacaagatgcctttgtagttattggtagagataccaggcccagcagtgagaaactttcacaatctgtaatagatggtgtgactgttctaggaggtcaattccatgattatggcttgttaacaacaccccagctgcactacatggtgtattgtcgaaacccgggtggccgatatggaaaggcaactatagaaggttactaccagaaactctctaaggcttttgtggaactcaccaaacaggcttcttgcagtggagatgaatacagatcacttaaggttgactgtgcaaatggcataggggccctgaagctaagggaaatggaacactacttctcacagggcctgtcagttcagctgtttaatgatgggtccaagggcaaactcaatcatttatgtggagctgactttgtgaaaagtcatcagaaacctccacagggaatggaaattaagtccaatgaaagatgctgttcttttgatggagatgcagacagaattgtttattactaccatgatgcagatggccactttcatctcatagatggagacaagatagcaacgttaattagcagtttccttaaagagctcctggtggagattggagaaagtttgaatattggtgttgtacaaactgcatatgcaaatggaagttcaacacggtatcttgaagaagttatgaaggtacctgtctattgcactaagactggtgtaaaacatttgcaccacaaggctcaagagtttgacattggagtttattttgaagcaaatgggcatggcactgcactgtttagtacagctgttgaaatgaagataaaacaatcagcagaacaactggaagataagaaaagaaaagctgctaagatgcttgaaaacattattgacttgtttaaccaggcagctggtgatgctatttctgacatgctggtgattgaagcaatcttggctctgaagggcttgactgtacaacagtgggatgctctctatacagatcttccaaacagacaacttaaagttcaggttgcagacaggagagttattagcactaccgatgctgaaagacaagcagttacacccccaggattacaggaggcaatcaatgacctggtgaagaagtacaagctttctcgagcttttgtccggccctctggtacagaagatgtcgtccgagtatatgcagaagcagactcacaagtaagaaagtgcagatcaccttgcacatgaagtgagcttggcagtatttcagctggctggaggaattggagaaaggccccaaccaggtttctgaagataattttcatattcctgagaaactggactttttacaagtctttacaaaactgtcaataataatggcagtactaagagatttataatcataatgtttacaatgcagcctactggattgtctctagatctgtttttcttaaacactaacagaataattctttataaataggtaagccttacacttgttaaagaaatttacctctaatttcagtctcactaatgtaaaatactgggacttaagtatacaattcagtcactaactgtacagttttatgtggggaacaattcatgcaggctactggaaaattaaatcttattaccaactccttgtgatatctttgccatcaccatcacatgagcaagatgatgttttgcagcattccccattgctgatacaaatggagagggcagagaagactttatacaaccagtttttccattgcagagtcttaagaaagattattagatgacttacctatatgactaatgccatcaggaactcagaggtatgaatagggggttgtccatccctcttccatactgaggtggagatgctcatgcaatacttttaaggatgcatggtccagccttcagttattcttcactgctcttggtgaaggtatgtgggagaaaaactaattataatacgtttcccagcctctgatggagaaggaacaccattctgataccagaacatggttaat

SEQ ID NO: 11501 - protein, 441 aa, Homo sapiens
MLAPSWEEHATCLANAEEQDMQRVLIDISEKEAVNLQQDAFVVIGRDTRPSSEKLSQSVIDGVTVLGGQFHDYGLLTTPQLHYMVYCRNPGGRYGKATIEGYYQKLSKAFVELTKQASCSGDEYRSLKVDCANGIGALKLREMEHYFSQGLSVQLFNDGSKGKLNHLCGADFVKSHQKPPQGMEIKSNERCCSFDGDADRIVYYYHDADGHFHLIDGDKIATLISSFLKELLVEIGESLNIGVVQTAYANGSSTRYLEEVMKVPVYCTKTGVKHLHHKAQEFDIGVYFEANGHGTALFSTAVEMKIKQSAEQLEDKKRKAAKMLENIIDLFNQAAGDAISDMLVIEAILALKGLTVQQWDALYTDLPNRQLKVQVADRRVISTTDAERQAVTPPGLQEAINDLVKKYKLSRAFVRPSGTEDVVRVYAEADSQVRKCRSPCT

SEQ ID NO: 11502 - DNA, 1898 bp, Homo sapiens
  CDS (9)..(1718)
agcgcagtatggcgggcggggcccgggaggtgctcacactgcagttgggacattttgccggtttcgtgggcgcgcactggtggaaccagcaggatgctgcgctgggccgagcgaccgattccaaggagcccccgggagagctgtgccccgacgtcctgtatcgtacgggccggacgctgcacggccaggagacctacacgccgcgactcatcctcatggatctgaagggtagtttgagctccctaaaagaggaaggtggactctacagggacaaacagttggatgctgcaatagcatggcaggggaagctcaccacacacaaagaggaactctatcccaagaacccttatctccaagactttctgagtgcagagggagtgctgagtagtgatggtgtctggagggtcaaatccattcccaatggcaaaggttcctcaccactccccaccgctacaactccaaaaccacttatccctacagaggccagcatcagggtctggtcagacttcctcagagtccatctccatccccggagcatctgtatgattcagaagtacaaccacgatggggaagcaggtcggctggaggcttttggccaaggggaaagtgtcctaaaggaacccaagtaccaggaagagctggaggacaggctgcatttctacgtggaggaatgtgactacttgcagggcttccagatcctgtgtgacctgcacgatggcttctctggggtaggcgcgaaggcggcagagctgctacaagatgaatattcagggcggggaataataacctggggcctgctacctggtccctaccatcgtggggaggcccagagaaacatctatcgtctattaaacacagcttttggtctcgtgcacctgactgctcacagctctcttgtctgccccttgtccttgggtgggagcctgggcctgcgacccgagccacctgtcagcttcccttacctgcattatgatgccactctgcccttccactgcagtgccatcctggctacagccctggacacagtcactgttccttatcgcctgtgttcctctccagtttccatggttcatctggctgacatgctgagcttctgtgggaaaaaggtggtgacagcaggagcaatcatccctttccccttggctccaggccagtcccttcctgattccctggtgcagtttggaggagccaccccatggaccccactgtctgcatgtggggagccttctggaacacgttgctttgcccagtcagtggtgctgaggggtatagacagagcatgccacacaagccagctcaccccagggacacctccaccctctgcccttcatgcatgtaccactggggaagaaatcttggctcagtatttacaacagcagcagcctggagtcatgagttcttcccatctgctgctgactccctgcagggtggctcctccttacccccacctcttctcaagctgcagtccaccgggtatggttctggatggttcccccaagggagcagcagtggagagcatcccagtgtttggggcactgtgttcctcttcgtccctgcaccagaccctggaagccttggccagagacctcaccaaactcgacttgcggcgctgggccagcttcatggatgctggagtggagcacgatgacgtagcagagctgctgcaggagctacaaagcctggcccagtgctaccagggtggtgacagcctcgtggactaaagttcccagtgtgggagaaaggagctagtttgcaataaaaacagctggatgcaggagcccagtgtcttcatgcagaggagctcaatgtcgcgggactagctacaccaacatatgcactttttacatttagaaacactgtgattagaccacagaacaataaatatgtgccatcagacc

SEQ ID NO: 11503 - protein, 570 aa, Homo sapiens
MAGGAREVLTLQLGHFAGFVGAHWWNQQDAALGRATDSKEPPGELCPDVLYRTGRTLHGQETYTPRLILMDLKGSLSSLKEEGGLYRDKQLDAAIAWQGKLTTHKEELYPKNPYLQDFLSAEGVLSSDGVWRVKSIPNGKGSSPLPTATTPKPLIPTEASIRVWSDFLRVHLHPRSICMIQKYNHDGEAGRLEAFGQGESVLKEPKYQEELEDRLHFYVEECDYLQGFQILCDLHDGFSGVGAKAAELLQDEYSGRGIITWGLLPGPYHRGEAQRNIYRLLNTAFGLVHLTAHSSLVCPLSLGGSLGLRPEPPVSFPYLHYDATLPFHCSAILATALDTVTVPYRLCSSPVSMVHLADMLSFCGKKVVTAGAIIPFPLAPGQSLPDSLVQFGGATPWTPLSACGEPSGTRCFAQSVVLRGIDRACHTSQLTPGTPPPSALHACTTGEEILAQYLQQQQPGVMSSSHLLLTPCRVAPPYPHLFSSCSPPGMVLDGSPKGAAVESIPVFGALCSSSSLHQTLEALARDLTKLDLRRWASFMDAGVEHDDVAELLQELQSLAQCYQGGDSLVD

SEQ ID NO: 11504 - DNA, 2840 bp, Homo sapiens
  CDS (8)..(2176)
tcccaagatggcgtccatcatggaagggccgctgagcaaatggactaacgtgatgaagggctggcagtaccgttggttcgtgctggactacaatgcaggactgctctcctactacacgtccaaggacaaaatgatgagaggctctcgcagaggatgtgttagactcagaggagctgtgattggtatagacgatgaggacgacagcaccttcacaataactgttgatcagaaaaccttccatttccaggcccgtgatgctgatgagcgagagaagtggatccatgccttagaagaaacaattcttcgacatactctccagcttcaaggtttggattcaggatttgttcctagtgtccaagattttgataagaaacttacagaagctgatgcttacctacaaatcttgattgaacaattaaagctttttgatgacaagcttcaaaactgcaaagaagatgaacagagaaagaaaattgaaactctcaaagagacaacaaatagcatggtagaatcaattaaacactgcattgtgttgctgcagattgccaaaagtactattaatcccgtagatgcaatatatcaacctagtcctttggaacctgtgatcagcacaatgccttcccagactgtgttacctccagaacctgttcagttgtgtaagtcagagcagcgtccatcttccctaccagttggacctgtgttggctaccttgggacatcatcagactcctacaccaaatagtacaggcagtggccattcaccaccgagtagcagtctcacttctccaagccacgtgaacttgtctccaaatacagtcccagagttctcttactccagcagtgaagatgaattttatgatgctgatgaattccatcaaagtggctcatccccaaagcgcttaatagattcttctggatctgcctcagtcctgacacacagcagctcgggaaatagtctaaaacgcccagataccacagaatcacttaattcttccttgtccaatggaacaagtgatgctgacctgtttgattcacatgatgacagagatgatgatgcggaggcagggtctgtggaggagcacaagagcgttatcatgcatctcttgtcgcaggttagacttggaatggatcttactaaggtagttcttccaacgtttattcttgaaagaagatctcttttagaaatgtatgcagacttttttgcacatccggacctgtttgtgagcattagtgaccagaaggatcccaaggatcgaatggttcaggttgtgaaatggtacctctcagcctttcatgcgggaaggaaaggatcagttgccaaaaagccatacaatcccattttgggcgagatttttcagtgtcattggacattaccaaatgatactgaagagaacacagaactagtttcagaaggaccagttccctgggtttccaaaaacagtgtaacatttgtggctgagcaggtttcccatcatccacccatttcagccttttatgctgagtgttttaacaagaagatacaattcaatgctcatatctggaccaaatcaaaattccttgggatgtcaattggggtgcacaacatagggcagggctgtgtctcatgtctagactatgatgaacattacattctcacattccccaatggctatggaaggtctatcctcacagtgccctgggtggaattaggaggagaatgcaatattaattgttccaaaacaggctatagtgcaaatatcatcttccacactaaacccttctatgggggcaagaagcacagaattactgccgagattttttctccaaatgacaagaagtctttttgctcaattgaaggggaatggaatggtgtgatgtatgcaaaatatgcaacaggggaaaatacagtctttgtagataccaagaagttgcctataatcaagaagaaagtgaggaagttggaagatcagaacgagtatgaatcccgcagcctttggaaggatgtcactttcaacttaaaaatcagagacattgatgcagcaactgaagcaaagcacaggcttgaagaaagacaaagagcagaagcccgagaaaggaaggagaaggaaattcagtgggagacaaggttatttcatgaagatggagaatgctgggtttatgatgaaccattactgaaacgtcttggtgctgccaagcattaggttggaagatgcaaagtttatacctgatgatcagggcagtaggcataattcagcaacaaacaatcttcctttgggagaaacctgttcattccaatcttctaattacagtggttcctatctcagggatactggactttctgacgcagatgaacaattaaggggaaaagcttcccttttccctctgtggcagttacgattttgacttcagtcctgagaaaaacttcaggttttgaaaatcagatgatgtcttctccttttccaaacaccacacgttgaaagcatttataaatccaagtctgaaactctgcgctctagtactgctgttaagatacacaacttgtttcttagttcatataatctcgggatacacacacacacacatatatatatacacacacatacgtatacacacacatacatatataaatatacctgatgccagatttttttcataaatattctgcctactgtaaatatgggttcctctgagttgttttagaaaattagcgcaatgtattaaaatcaagtgttaggaaatttcatggtcttacctacaataacttttattttggaattgaactattattaaattgtatctaatcctggattacagtttaattaattattcttagtgcttaaggcttcataaagtaatttttcc

SEQ ID NO: 11505 - protein, 723 aa, Homo sapiens
MASIMEGPLSKWTNVMKGWQYRWFVLDYNAGLLSYYTSKDKMMRGSRRGCVRLRGAVIGIDDEDDSTFTITVDQKTFHFQARDADEREKWIHALEETILRHTLQLQGLDSGFVPSVQDFDKKLTEADAYLQILIEQLKLFDDKLQNCKEDEQRKKIETLKETTNSMVESIKHCIVLLQIAKSTINPVDAIYQPSPLEPVISTMPSQTVLPPEPVQLCKSEQRPSSLPVGPVLATLGHHQTPTPNSTGSGHSPPSSSLTSPSHVNLSPNTVPEFSYSSSEDEFYDADEFHQSGSSPKRLIDSSGSASVLTHSSSGNSLKRPDTTESLNSSLSNGTSDADLFDSHDDRDDDAEAGSVEEHKSVIMHLLSQVRLGMDLTKVVLPTFILERRSLLEMYADFFAHPDLFVSISDQKDPKDRMVQVVKWYLSAFHAGRKGSVAKKPYNPILGEIFQCHWTLPNDTEENTELVSEGPVPWVSKNSVTFVAEQVSHHPPISAFYAECFNKKIQFNAHIWTKSKFLGMSIGVHNIGQGCVSCLDYDEHYILTFPNGYGRSILTVPWVELGGECNINCSKTGYSANIIFHTKPFYGGKKHRITAEIFSPNDKKSFCSIEGEWNGVMYAKYATGENTVFVDTKKLPIIKKKVRKLEDQNEYESRSLWKDVTFNLKIRDIDAATEAKHRLEERQRAEARERKEKEIQWETRLFHEDGECWVYDEPLLKRLGAAKH

SEQ ID NO: 11506 - DNA, 2121 bp, Homo sapiens
agaaaaaatgaatgtcataataaaatataaaacttacgtaaagaaaataaagtcattgtccaccttaatagctaaggtccacaagggtaacttatgcagcatttattttttttgaaagtcaaaattgaatttatttctttcacatggctggtttgctgcaatatgaagtttcagaatgggctgaagtaagttgattgagggatttgagttgaatgacattttcaagttcatttaaatatgataaaaattcattggtggtaaataacatctgtctttcctggaaaaaaaaaagttgtgtattttcatgattcagttaaaacaaaaaatgagcctgtgaatcccaggcctttttagtcctccataacatttgaacagtttgacttgtcagcaaagaaatacacttatcaaattttaaaccaatgggagcctgaaagtgttacagtgtactgcttctttgacaaaattctgtttaacaactaccctaacataatttataaatcaattaagataaaaccatttttttctgagtatttaggaatttgtgtcctcaaaatactgtgacatgaaagataggaaagaaattacctggttgccagacatgcacgattatctttcctcatttcagctggattttccaaagtcagtagattggataaagcagcatctcattcactgaggtcacaagataggtaggaaacttctttaatgtgaattttgcatattttaacaattcagttagaaaaacagaaaccacttgatggattataagtgtaaagtgttttaacatagggaattagacatcaaaagggtgggtgaggaaggtgtctgcggccccaaagtgggtggatctcaggagctggcccaggcactgctgtgactcttgagaacatccagaaggctgtgctgttggcgtgcagcactgacagtgtgtctcagggagctgtccccagctgtcggctgttaatagctccaaagccagtgccttgcaagagattttgaaactgctgtgaaactcatgtcctctgcccgcctacacttctgtctgcagtggcctctgaggaaagatggtctctccttttctcatggtcaactctcaacttagaaccagagacagaaggagtttgtgggaagtgtggtttctggtctacctgcactgcagaggacattctagaaagagaagtgagttgacagtctagcataattgtgaaacaaacactgagatgtacagttcaaaccacgtgaagtggaagcctcagaattttcctcactttcattaaagattctttgatggaaaaatttagaagcattggctctagatggtaagcaagtcatttttttccaaccaaaataaaaaatacatatactaagcttctggggccccaggacttaacacagtttccttccttccttcccttcttccttccctcccgtagtagttgcttaataaatacttaatttggcacttatttggggccggctttttgccaggctactacatgcctgggcatagtgttctaagagtgaaccaaaagaataagcttcctgccctcagggagtttatgttttgttatttggcatataaaaagaacttggtgtgttaaaagaagggaaatagctgtgtgaaaggaatgaggcaaggaaaaaggggaatgtctaaatataaatctccgtttggaccagcctcctgtttatccagttttccttactaagtaactgaatttcattttcttttcttaattgacagactaccagaaaattgctagttttctaaagagaaactactgatttgagtgatgatctgtgtgtaatggctccaaaaaggagccgttctcttggtggcagcagttggattcagagcttgggcatcctgatcatcaggacagacatttacaggatatgtatagaattactgccccaaatagagggcaaagcactagacagaagggtgagatccaaggggaatttggaatctatatttcatcagaatgcactcaaagcaaaaacagtaagtatgctccatataaagaaatgtttcttaaaatgtttttaatttaaccctacccatcccttggcaaatctttttcttttaaatcaaataggaataaagaagaaaatcttcct

SEQ ID NO: 11507 - DNA, 3630 bp, Homo sapiens
  CDS (230)..(2821)
agaacgcacaggagttccatttttacaggtaataccctgctttcagcgtgatggtttattttgtctacatgaaaatggttgtataactttacgtgttcgaagatcttataataacatttttaccacttcaaatgaggaaccagatccagatccagttcaggagcttacctatgatttacgaagccagtgtgatgcaatcagggtgacaaaaaccgtccgtcccttcagtatggtgtgctgtcctgtcaatgagaatgcagccgccctcgtagtgagtgatggcagggtcatgatatgggaactcaagtctgcagtttgtaatcgaaattcacggaacagtagttctggtgtgtcacctttatattcaccagtgtctttctgtggaattcctgtaggagtgctacagaataaactcccagacctttccttagataacatgattgggcaaagtgcaattgctggggaagaacatcccagaggttcaattctgcgggaagtgcacctcaagttcctgctgacgggactgctttcaggactgcccgcaccacagtttgctattcgtatgtgtccaccgttgaccacaaaaaacatcaagatgtatcagccactgctggctgttggtacaagtaatggttctgtcctggtgtaccatctcaccagtggtctgctacacaaagagttaagcatccactcatgtgaagtcaagggtattgaatggacaagtttgactagttttctttcttttgctacctcaacaccaaacaatatgggattagtgagaaatgaacttcaactggttgatcttccaacaggtaggagcattgcttttcgtggtgaaagaggcaatgatgaatctgccatcgaaatgattaaagtatctcatttgaagcagtatttggcagtcgtattcagagataaacccctggagctatgggatgttaggacttgtacccttcttagagagatgtccaaaaacttccctacaataactgctttggagtggtcaccatctcacaacttgaagagcctgagaaagaagcaacttgcaactcgagaggccatggcccgccagaccgtagtctcagacacagagctgagtattgttgaatcatctgtgatcagcttgctgcaggaggcagaaagtaaatctgaacttagtcagaacatctctgcccggggacattttgtatttaccgatattgatggccaagtgtatcatctcactgttgaaggaaactcagtaaaagacagtgctcggattccaccagatggaagtatgggtagtattacctgcatcgcttggaaaggtgatacattagtgcttggagatatggatggaaatttaaatttctgggacttgaaaggcagagtatccagaggaatacccacacaccgaagttgggtgaggaagattcgttttgctcctggtaaaggaaatcaaaaattaatagcaatgtacaatgatggagctgaagtgtgggatactaaagaggttcagatggtgagcagtttaagaagtggcagaaatgtgacctttcgtatattggatgtggactggtgtacgtcagataaagtgatcttggcctcagatgatgggtgcatcagagtcctagagatgtctatgaagtctgcgtgctttagaatggatgaacaagagttaaccgagcctgtgtggtgcccctatctccttgttccaagggcctctcttgccttgaaagccttcttattacaccagccttggaatggacagtattctttggacatttctcatgttgactatccagaaaatgaagaaataaagaatctcctccaagaacagttgaattcattgtctaatgacataaagaaactgttgcttgatccagaattcactctcttgcagaggtgcctgcttgtttcaaggctctatggtgatgaatcggagctgcacttctggactgtcgctgcccactacctgcacagcttatcccaggaaaagtcagccagcacaacagctcctaaagaagctgctcctcgagacaaactgagcaacccactggatatatgctataacgtgctctgtgaaaatgcctactttcagaaatttcagctagaaagggttaatctacaggaagtgaaacggtcaacttatgatcatacaaggaaatgtacagaccagctactgctcttgggtcaaacagacagagctgtgcagttgctgttggaaacaagtgcagataaccagcattattactgtgattcactgaaagcctgtttagtcactactgtcacctcgtcaggcccctctcagagcaccattaagttggtggcaacgaatatgattgccaatggcaaattggcagagggcgttcagttgctctgcctgatagataaggctgcagacgcctgccgctacctgcagacatacggcgagtggaatcgggctgcatggctggcaaaagtccgtttgaatcctgaggagtgtgccgatgttttaaggcggtgggttgaccacctttgttctccacaagtcaatcagaaatcaaaggctctcctggttctcctctctctgggctgcttttttagcgtggcagagacgcttcacagcatgagatactttgatagagcagccttatttgtggaagcttgcctcaagtatggagcatttgaagtcactgaggacacagagaaactcatcactgctatatatgcagattatgcccggagtttgaagaacctcggttttaagcagggagcagttctctttgcttcaaaagccggagcagctggcaaagacttattgaatgagcttgagtcccccaaggaagaacccattgaagagtgacagcttaataaatgccagggaatctgacctggaaggcagatgggagggggctggtctggctgtggccaccgtcacagtccaggatgaagaggagtacagggtcctgtgagctgtttgaccactgttctaagactatgtgtgcccaaaagcacataagcatctatgttgagagtaagtttgtatcctgcgttggtctcagaaagaacgtgaatgcttaagattttgaaagtacataatattttatactttgggagagagctttaagagtccctggaaatactttttaatttttttaacttaaaattcaagagactgaatcacttttctcattgattaaatgtaaagattattgagaaacctatagtaaatgaaatttgtgagatgttttctcaaatatatgctgtgcctgtacttatatacagtctttcaagagagatacaaacaaggcagaaacatttaaactagtattaaaggtagtttaccaaagcattttttgttttcttaccttgaaaacacagaaccgttaattccttggtttaagcagttgctaagttttgtaattttaggctcagaggaccataggaggttttaagatttatgtttagtccgataggtgaggtctttgatattttgaattttaactccttttatgatacatcacagtaacctcatttttgaagtctttctttgtactttaatgttctctctgttctaatagttgaagtatgagatgtaactattataaactgttgctgaaaacataaatgtctgtaacttacaaacatgataaataaattaaaaattcc

SEQ ID NO: 11508 - protein, 864 aa, Homo sapiens
MVCCPVNENAAALVVSDGRVMIWELKSAVCNRNSRNSSSGVSPLYSPVSFCGIPVGVLQNKLPDLSLDNMIGQSAIAGEEHPRGSILREVHLKFLLTGLLSGLPAPQFAIRMCPPLTTKNIKMYQPLLAVGTSNGSVLVYHLTSGLLHKELSIHSCEVKGIEWTSLTSFLSFATSTPNNMGLVRNELQLVDLPTGRSIAFRGERGNDESAIEMIKVSHLKQYLAVVFRDKPLELWDVRTCTLLREMSKNFPTITALEWSPSHNLKSLRKKQLATREAMARQTVVSDTELSIVESSVISLLQEAESKSELSQNISARGHFVFTDIDGQVYHLTVEGNSVKDSARIPPDGSMGSITCIAWKGDTLVLGDMDGNLNFWDLKGRVSRGIPTHRSWVRKIRFAPGKGNQKLIAMYNDGAEVWDTKEVQMVSSLRSGRNVTFRILDVDWCTSDKVILASDDGCIRVLEMSMKSACFRMDEQELTEPVWCPYLLVPRASLALKAFLLHQPWNGQYSLDISHVDYPENEEIKNLLQEQLNSLSNDIKKLLLDPEFTLLQRCLLVSRLYGDESELHFWTVAAHYLHSLSQEKSASTTAPKEAAPRDKLSNPLDICYNVLCENAYFQKFQLERVNLQEVKRSTYDHTRKCTDQLLLLGQTDRAVQLLLETSADNQHYYCDSLKACLVTTVTSSGPSQSTIKLVATNMIANGKLAEGVQLLCLIDKAADACRYLQTYGEWNRAAWLAKVRLNPEECADVLRRWVDHLCSPQVNQKSKALLVLLSLGCFFSVAETLHSMRYFDRAALFVEACLKYGAFEVTEDTEKLITAIYADYARSLKNLGFKQGAVLFASKAGAAGKDLLNELESPKEEPIEE

SEQ ID NO: 11509 - DNA, 1792 bp, Homo sapiens
  CDS (276)..(1790)
atagcattgtaactcagaatggtgaagtatgctggaaaacaatcacagactgtgtgagctacacagagtcagagcagggtctggattactggggaagcgtgaggctgctgggccctgtgtgtgaggctgtccattcacatttcttatctctgaccaaggggcaatttgaaattcgatatgcaccgtggttccagtggacaagttttccagagttatttcctgaaatatttgatgccttggaaagtctacaatctcccgctatttctcttagcttaatgaaactgacatcgtgtctagaacgagccttgggtgatgtatttttactgattgggaaggaatgcccctttcttttaagagatctgctttcatctgaggagcttgctcaagtcttcagtcagtctgtgatgaatgtgctaaaagtcttcgttggctctccgtgtggtctcaacctgcgtaacgtcttatggcatgggtttgcgtcacctgaagaaattcctccaaaatactgttcaatgatgatactgttgacggcaggattgggtcagttactgaagagttaccttcaaaacactaaacttacattggcacatcgctctttcatatctcttacaaacctcgaggatttgattgtttttcctgatgttacttatgaggtgctttcagtattagaagaagtgatgatgaaatctgcttttatattaaaaatcatgttaccatattgggaagttgcactggtcaagttcaagtcacacaggtttgctgactgcgccatattgttgctgacacaactggagactggacttaggaatgtttttgccacacttaacagatgtccaaaaagactcctgactgctgagtcaacagctctttataccacctttgatcaaatattggcaaaacacttgaatgatggtaaaatcaatcagcttcctcttttccttggagagcctgctatggaatttctctgggatttcctgaaccatcaggagggtccccgcataagagatcatttaagccacggggagatcaacttacatgaattttcaaaagaaacaactaatcagttgcttgcattttctcttgtactgctactcagattcgttgatgactgtctgctatcagtttttaaggaaaaatcagccgtagaattgttgattagtcttgcagaaggctatagttctcgctgtcatccggtttttcagcttaaaaaacaggtgctgagctgtgaggagagcatcagggtttgggctctgctgcctttccccgaagaactcactcggcaagccgtcagattagaagataattctgaaacaaatgcctgccactctttgattacaaaaatgacggatgagctgtatcaccatatgcctgagaatcgttgtgtgttaaaggacttggatcgtcttcctactgagacaccaaccagcgatacgccgctagccctggctcccagaaagccgcagccttgcaggtgcagaaggagagtgaggcccagtatcagactactgtcccctgtgctcagcctgatactgttactcattgcgctggagttggtcaacattcatgctgtttgtgggaagaatgcgcatgagtatcagcagtacctaaagtttgtaaagtcgatcttgcagtacacggagaacctggtggcttacaccagttacgaaaagaacaagtggaatgaaactatcaatcttacacatacagctttgttgaaaatgtggacttttagtgagaagaaacaaatgttaatacatttagccaagaaatccacaagtaaagtactcttatg

SEQ ID NO: 11510 - protein, 505 aa, Homo sapiens
MKLTSCLERALGDVFLLIGKECPFLLRDLLSSEELAQVFSQSVMNVLKVFVGSPCGLNLRNVLWHGFASPEEIPPKYCSMMILLTAGLGQLLKSYLQNTKLTLAHRSFISLTNLEDLIVFPDVTYEVLSVLEEVMMKSAFILKIMLPYWEVALVKFKSHRFADCAILLLTQLETGLRNVFATLNRCPKRLLTAESTALYTTFDQILAKHLNDGKINQLPLFLGEPAMEFLWDFLNHQEGPRIRDHLSHGEINLHEFSKETTNQLLAFSLVLLLRFVDDCLLSVFKEKSAVELLISLAEGYSSRCHPVFQLKKQVLSCEESIRVWALLPFPEELTRQAVRLEDNSETNACHSLITKMTDELYHHMPENRCVLKDLDRLPTETPTSDTPLALAPRKPQPCRCRRRVRPSIRLLSPVLSLILLLIALELVNIHAVCGKNAHEYQQYLKFVKSILQYTENLVAYTSYEKNKWNETINLTHTALLKMWTFSEKKQMLIHLAKKSTSKVLL

SEQ ID NO: 11511 - DNA, 2543 bp, Homo sapiens
  CDS (488)..(853)
agtcccgggagcccggcctcgtgcgccgcgctttgagcctctaggccatgaaactgcctcaccaagcactatgcaattgagtgcccaccagaagacacccctccagtcaacccacagaccccagaaagagtacccagaggagcctgagcacactccaccctatctgttctctgaaattcaatcaaatgagtcactctacttctctggaagcagaaagaggctggaagtttttctccagcagcagactgctcgacaaacactgcgccaagagctcctcagcagaagctcctcgcatcagatcctctgtgctgggaatcctcccctcttgagcacactctgtgctcctcttccagttacggtgcatgtgaagcaatggtatgggaaaattgtttgcagaaggatgaaaaggctttattgccaaactcttaaggtattttgttaataaaatcattttcataatggaaaagactcagaaaattcccctcgcatgacatataacatccaacaaggggctgaaccaagaaaaaatactgcagctgctgctaatggcaacactgagcaagcacctggcctgtgccaggcactgtcctgtgcagtctgtgtttgcactcattttatcctcaagagccagatgagcatctccaccagacagcacctgcagaggcttgggcagtttattttaccgtctctgagtaaaatagggataataagtaacagtacccatacacaggtggcagagacgctagggaacttgcccaaggtcacagagcttccaagtggaggagcagggacacatatgctcacaatgatggcactaaggcacatgttgcctggatggagaccagcccacagatgagagttccaggacagagggaacatggatggatcaagtgaagtgacagaacatttggaaaactctaccgagatatatacggccccccagtaaaattaaagagataaagagaactacattaagtgagacaataaggcaactctacttcttgcaggaaaaaaataattgtggttatagaacactactggttctgaggtgaatagcagtcacagagccatcaaaatatgaccccactcactgaagtaatacaaagtgctagtgtagctatcccgggaagacgtggaaggccgagcaaggaccatggcacaagaggccacgctgtacctagtatggtatgcagtggccaagaggacccccctgattccacctagtgttcatgcccacgtgtgatctcctgccccgtgagctgggcctagccactcacttctgacagacagaagccaacaaaagcaacaggatgtcacttctaagtttaggctataaacacactcagacttccatctaggctcacctcttgctcactctgatgaaagccagctgccatgctgtcagctggggagaggcccatgtggcaggaactgaggaagtctttggccacagcctgcaaggaagtgaatcctgacacaagctcactagagtgagctgggaagtagatacccttcagtcaagctttcagatgaggccacaatcctagccaacattttcatttccacccatgagaaaccttgagccagaagacccaagctaagctacacctggattcctgacccacagataccatgataacagacattattttaagctgctatgttaggagtaattagttatttaggaataaggtaactaatacatttatattaatgggaagtcagcagagaacatttaaatggataaactgagaaatggctgtgtaagtgtgtgatctggaaacaggagaaaaatgcagccctgaagaaaggagttaagagaggaaggaggagctactatgtctcattttaaatcacgtgggtggcattatttgacttctttttaagtacacggaagtgttactttcttaaatgaaaatgaaggtaacagcagcagtaaactaatttccagtagatgaaatgtgactttgtaatcccaggaaaagggaagaatttgcaccaagaagttactgttacctcagaatggcaagagcatggatggctcttatcatcatctttatacttcttttacatttcctcattttttaaaagttttgtgtacatattacatttaggaaatccaatatatagtattaaaacagaaaaagtaaagaagcaggctgggcttggtgcccactactcaatttgactggcttaaaaaaataattttttaaacgacatgtacggacagacataatacttgcttctgagcctcccagtctttcaaaaccacattagggaataagcagtatttgcatggttccagtgatatctgggagtaagtgaaagtaatgaaaacacagaagtaaacacaaagtaattatagttcacctttatacacacgttaacagaaatcatctgatcccctttgctgctaagtgagttgaaaagcgaaagcgtctgaatcccaccagcatcgctggatgtgtcatccactgagccttcatctcccatgaacttgacttttaaccaatttgctagaattctacagatttaaaaaaaac

SEQ ID NO: 11512 - protein, 122 aa, Homo sapiens
MTYNIQQGAEPRKNTAAAANGNTEQAPGLCQALSCAVCVCTHFILKSQMSISTRQHLQRLGQFILPSLSKIGIISNSTHTQVAETLGNLPKVTELPSGGAGTHMLTMMALRHMLPGWRPAHR

SEQ ID NO: 11513 - DNA, 2589 bp, Homo sapiens
  CDS (143)..(2266)
agcaacatggccgccgcctgagaggagagccgggccgccgccgtctctgcagcccgcgggtaactgggccgttgccgccgtccgcgctcggcccccgcggagagatcgagctgaaggactgcgcggctggctctcctctagtatggccaatgaagaggatgacccagttgtacaggagatcgatgtgtacttggccaagagtctggcggaaaagctgtatctatttcagtaccctgtgcgtccagcctcgatgacctacgatgacattccgcacctctcagccaagatcaagcccaagcagcagaaggtagagcttgagatggccatcgacaccctgaaccccaactattgccgcagcaaaggggagcagattgcgctgaacgtggacggggcctgcgccgacgagaccagcacgtattcctcgaagctgatggacaagcagaccttctgctcttcccagaccaccagtaacacatcccgttatgccgctgcactctacaggcaaggtgagctccacctgacacctttacatggcatcctgcagctgcggcccagcttctcctacctggataaggctgacgccaagcaccgggagagggaggcggccaacgaggcaggggactcttcacaggatgaggcggaagacgatgttaagcagatcacggtgcggttctcccggccggagtcagagcaggcccgccagcgccgtgtgcagtcctatgagttcctgcagaagaagcacgcagaggagccctgggtccacctgcattactatggcctgagggacagtcgctctgagcatgagcgtcagtacctgctgtgccccggctcaagcggggtggagaacacggagctcgtcaagtcacccagtgagtacctgatgatgctgatgccacccagccaggaggaggagaaagacaagcctgtggcccccagcaacgtcctgtcgatggcccagctgcgcacgctgcccctggccgatcagatcaagatcctgatgaagaatgtgaaggtcatgccttttgccaacttgatgagcctcctgggcccctccatcgattccgtggctgttctgcggggcatccagaaggtggcgatgttggtccaagggaactgggtggtgaagagtgacatcctataccccaaggactcgtccagccctcacagcggcgtgcctgctgaggtgctctgcaggggccgagacttcgttatgtggaagttcacgcagagccgctgggtggttaggaaagaggtggcaaccgtgaccaaactctgcgccgaggatgtgaaggacttcctggagcacatggccgtggtgaggatcaacaaaggctgggagttcattctgccttatgatggggagttcatcaagaagcacccggatgtggtccagcggcagcacatgctgtggacgggtatccaggccaaactggaaaaagtctataatcttgtaaaggaaaccatgccaaagaagccggatgcacaatcagggcctgccgggctggtctgtggggaccagcggatccaagtagccaaaaccaaggcccagcagaaccacgcgttgctggagcgggagctgcagcggcggaaggagcagctgcgggtgcctgcggtcccgcccggtgtgcggatcaaggaggagcccgtgagcgaggagggcgaggaggacgaggagcaggaggcggaggaggagcccatggacacttcccccagcggcctccacagcaagctggccaacgggctgcctctcgggcgggctgcgggcacagacagcttcaacgggcacccgccccagggctgcgccagcacccctgtggctcgggaactgaaggccttcgtggaggccacctttcagagacagtttgtgctcacgctgagcgaactcaagcgcctcttcaatctgcacttggccagcctgccccccggccacacactcttcagcggcatctcggaccgcatgctacaggacacggtgctggccgccggttgcaagcagatactggtgccttttcccccccagactgctgcttccccggatgagcagaaggtgtttgccctctgggagtctggagacatgagtgatcagcatcgacaggttttgcttgaaattttttccaaaaattaccgggtacgccgaaacatgatccagtctcggttgactcaagagtgtggagaagatctcagtaaacaggaggtggataaagtactaaaggactgctgtgtaagctatggtggcatgtggtaccttaaagggacagtacagtcttgacaatagtagcaaactactaacccagcaaatctaagcccaaggaagaagggcggaaccagaagtagggcctcgacttgcttcagacgacacagagcaagaggaactgaccatctcatgacctgtggcattgcacggtgcagtggacagaagggattatcctcagccagtcgcagggtcagcttaagttagttagatcactcccagaagagaccagctgggaccttctttgcagtacaatttgaaattcctgatgtattttgcttattatttggtttcattcccataataaagagagtgtatactgacatgggcaggatgat

SEQ ID NO: 11514 - protein, 708 aa, Homo sapiens
MANEEDDPVVQEIDVYLAKSLAEKLYLFQYPVRPASMTYDDIPHLSAKIKPKQQKVELEMAIDTLNPNYCRSKGEQIALNVDGACADETSTYSSKLMDKQTFCSSQTTSNTSRYAAALYRQGELHLTPLHGILQLRPSFSYLDKADAKHREREAANEAGDSSQDEAEDDVKQITVRFSRPESEQARQRRVQSYEFLQKKHAEEPWVHLHYYGLRDSRSEHERQYLLCPGSSGVENTELVKSPSEYLMMLMPPSQEEEKDKPVAPSNVLSMAQLRTLPLADQIKILMKNVKVMPFANLMSLLGPSIDSVAVLRGIQKVAMLVQGNWVVKSDILYPKDSSSPHSGVPAEVLCRGRDFVMWKFTQSRWVVRKEVATVTKLCAEDVKDFLEHMAVVRINKGWEFILPYDGEFIKKHPDVVQRQHMLWTGIQAKLEKVYNLVKETMPKKPDAQSGPAGLVCGDQRIQVAKTKAQQNHALLERELQRRKEQLRVPAVPPGVRIKEEPVSEEGEEDEEQEAEEEPMDTSPSGLHSKLANGLPLGRAAGTDSFNGHPPQGCASTPVARELKAFVEATFQRQFVLTLSELKRLFNLHLASLPPGHTLFSGISDRMLQDTVLAAGCKQILVPFPPQTAASPDEQKVFALWESGDMSDQHRQVLLEIFSKNYRVRRNMIQSRLTQECGEDLSKQEVDKVLKDCCVSYGGMWYLKGTVQS

SEQ ID NO: 11515 - DNA, 2482 bp, Homo sapiens
  CDS (9)..(416)
cactggagatggagctgcgcacctgcggcctcccctacatcaacctcgagttcctcaaggcccacaccatgtaccaagtggggctgatggagacggaccagcacatcgagttcttctggggggccctggagatgttcacccaggaggagctgtgcaagttcatcaagtttgcctgcaaccaggagcgcatcccgttcacctgcccctgcaaagatgggggtcccgacactgcccatgtgcccccgtaccccatgaagatcgcccccccagatggcacagcaggttccccagactctcgctacatccgcgtggagacctgcatgttcatgatcaagcttccccagtactcctctctggaaatcatgctggagaaacttcgttgtgccattcactaccgtgaagaccccctcagtggctgatgggagggagccccagaattaggctgtcactgaggcacccactctgctggcttgggaagccaccactgcggcccgtccctccagggccctgcgtgaggagttggcaacattttgcttttccaaactttcgtccacattccagggcctcctggaagacttaaccttttgtctttgtacgtttcgtgatgggttggttcttttgctgcctgtttgtggtctatttgtaggatagtttagttcccagacagtttgtgtctaatttgatcttcttggacattgtccctcatggccaccagattctaatgccataaggccccagctggttccccatcacagaaccacccagcaggaagccgggggtacaatgacctcggccacacagagcgctcgtgctttcagcagagcgcctccacagacaagcctgtggccagccctgccctccagcctcgagctggagttgctccagaggcagccccagcaggcctccctccacatagaggtggctgggccaattgcccaaacacgtgagacacacagggagctttatgtgttcatcttcctgctttagaacttgctcccggtcttggtttttctgaggaaaagcccacagtggttcccctgcccctcccatacctccctatctgccgtctgtctctttgggccctggtctgacagttttcatctgaggcctcctcgggagcaggagacttaagggttcatcccgaccttagttcacagagcctagctgggtgcatcccagccgcagggggtgagaagacacccagagatgggggacaatgctcaggtgggggcctcctccgagactctggttgagaggaaagcacatgattcaagcctaccccacaaaaaaggagcacaaaatgctcagaaatggcccttcctccctgcagtgacgtaggacaagggaaagggccacacccattttcaaaagagtggactgaggtgctctgctcaatttggggtctgctttagtgacccagacactcaagtccagatggagactccaggggggtccttctgcccctctggccagccccacccagcactccccatcaccccatgtaagtgtgtatgccagggctgagctgcctccaggctcacccactgcatctttgccccaaataggtctttgtccagtggtactttgttcatgagcagcacaggccatcttgttggacactgtcactttgggccttgccaggtctcacagaatcacatcgctgtatttattgtataatattgtgaatattggaagttttgagtgagtgctgtctagaaggttttggagtgtggatgctggtccaagaaagaagatgtgccctggcctgctggaaagattgtgaattctagagatagagccgttagcatccatctcctccctgtaactcttaggaaatgcatcaaggaccattatagaaaggatcccctgacctaaggatgaaatcgacctagggttaatcatgacagctgcatcagttgtattggatgcaagtcaactctggaggtgagtgcccgcaagcagttcccctgctttgaaagaagatggtcagcccgctgcctccccagcggccacagctcctttgagtgtggggggtcacagccaggatgtattcctgacaataaggatccttttattttcatttctgcataatgaaagagcctttcgatttattagaagtggtttttcctccctacatctttaaattcttggttctctttagtcctcatcccttgaatggacttgtcagctacctccccaggaggagttcagaagcttctgttggccatcacttgagtagatgacaagctgtaaggtatctgctgctaacgtggctgcctctccgagagcacattgaggtccagacagatccaaaccttggccctaaaaaatgtgtgctgtaaagttacttgatgtatatttattataattatttatggttgcatttaacaaacttttcattcaatctgatgctatttacaccatgctgtgtaaaggaagctcactaaaggaaaaaagtcacaccaataaataaccttcatct

SEQ ID NO: 11516 - protein, 136 aa, Homo sapiens
MELRTCGLPYINLEFLKAHTMYQVGLMETDQHIEFFWGALEMFTQEELCKFIKFACNQERIPFTCPCKDGGPDTAHVPPYPMKIAPPDGTAGSPDSRYIRVETCMFMIKLPQYSSLEIMLEKLRCAIHYREDPLSG

SEQ ID NO: 11517 - DNA, 2149 bp, Homo sapiens
  CDS (200)..(1045)
agcgccttcgctctttggctccctgagttagtccggttgtttgcgatcgccgcggccggggctgcgaaccgaagggctcgctccgcgccgcctgggtctctacctcatccgtaggtgtggccctgatggtgtggcaggctctggactcctaaagctctggagcgaatttaagattttattcatgtgcatggcatagaagatgaattcttccacttccaccatgagtgaagagcctgacgctctatcggtagttaaccagttacgggatctagcagcagatccgttaaacagaagagccatcgtccaggatcagggatgtctgcctggccttattttatttatggaccatcccaaccctccagtcgtccactccgctttgcttgctcttcgatacttggcagaatgccgtgcaaacagagaaaagatgaaaggagaactgggtatgatgttgagcttacaaaatgttatacagaaaactacaactccaggagaaacaaaacttctggcctctgaaatctatgacattcttcagtcctccaatatggcagatggtgatagttttaatgagatgaattcacgtcgaaggaaagctcaattttttctgggaactacaaacaaacgtgccaaaacagtggttttgcatatagatggccttgatgatacgtctcggagaaatctatgtgaagaggctttgttaaaaattaaaggtgttattagctttacttttcaaatggctgttcaaaggtgtgtggtgcgaatccgttcagatttgaaagctgaggctttggcatcagcaatagcatcaaccaaggttatgaaagctcagcaagttgtgaaaagtgaaagtggagaagagatgttggtcccattccaagatactcctgtggaagttgaacagaacacagagctacctgactacctgcctgaggatgagagtcccacaaaggaacaggacaaagcggtgtcccgggtcggctcacacccagaaggtggagctagctggcttagcacagctgcaaactttttatccagatcattttattggtgacttcacttttgggctcaaggactgtgtgaaccaacaaggggccagttttccattgttgtggtgaactgtcaagtgcaatttgcaataagttatcatgaaaagtttttagattacacgatcgcatatgctgcatttcacattttattggacattttaccccactgagtggtaaaaaggacagaggctacagatggagttgctttgtttatgaaagtattttggtttgttttctttcatttaattgcctcatatttaaaaaccatgggtccactgttaaaaccacatgtgtatgtgcagctttacattttattttacgtgaagcatgtgattaggaaaactcattttcttttcaagcctcaggacctacctgaagagaagttttcttgtagctcaagttgtgcatgaattactgaatattttactgtgcttttcttcatgaagggtacatgctttgtactcttcactgaaagctgaaaacatttcttgttaccctcttttgtgcctttttattttgccaaccgtgtttatagaaaggacattactaatgacattttgcagattaaaaacattcatttgaacacagtagtcccctagaaaaacaactctacaaaaattttgcagccttattcattataattttgataaaattaacacaaaatcagtcaagaaggaaacatgtatattagtgaagtgtttttggagactgtttgaatgtgaccaaatgtggttctagttgacttcttttcactttggcttatatcaattcttgagagttaatgtgatcatgatattgcaaacaactataaatggtctctaggccttactttgtgattatacgttatctccggctagaaaaaaataatggtagtaaagaaactgacaaactgaaaataagaaaacaaaaatcaaatgcctataataccataatgccagtttggtatagagtccaactttaaaacatgaattgctcgacagagttctattcagtaggtgtttccttgtattgtcttttgtgaatttattatgaaaatgctgcgttgtgttgaatgaaaaagacccaaattactgcttatgaagaaataaagccagcattgatcactt

SEQ ID NO: 11518 - protein, 282 aa, Homo sapiens
MNSSTSTMSEEPDALSVVNQLRDLAADPLNRRAIVQDQGCLPGLILFMDHPNPPVVHSALLALRYLAECRANREKMKGELGMMLSLQNVIQKTTTPGETKLLASEIYDILQSSNMADGDSFNEMNSRRRKAQFFLGTTNKRAKTVVLHIDGLDDTSRRNLCEEALLKIKGVISFTFQMAVQRCVVRIRSDLKAEALASAIASTKVMKAQQVVKSESGEEMLVPFQDTPVEVEQNTELPDYLPEDESPTKEQDKAVSRVGSHPEGGASWLSTAANFLSRSFYW

SEQ ID NO: 11519 - DNA, 2422 bp, Homo sapiens
  CDS (64)..(1557)
gactatacaggacatgttcatcctggaacttacacaaataccttagaacgtctagtgaaggaaatggaagacacacaaaggctagatgaactgcagaagcaactacaagaagacataaggcaaggccgaggcattaaatccccaatcagaattggagaagaagacagtacagatgatgaggatggcctcttagaagagcacaaggaatttctaaagaaattttcagttacaattgatgctattcctgatcatcatccaggtgaagaaatatttaatttcctcaattctggaaaaattttcaatcagtataccttggatttaagagactctggttttattggacaaagtgctgtagaaaaacttattcttaaatcgggaaaaacagatcagatttttttgacaacacaaggtttccttacgtctgcttatcactatgtccagtgtcctgtccctgtgttaaagtggctgtttcggatgatgtcagttcatacagactgtattgtgtcagtgcagattttaagtacattgatggaaataacaattagaaatgataccttcagtgactcaccagtttggccatggatcccatcattgtctgatgtagcagctgtgtttttcaatatggggattgattttagatctttgtttcccctggagaatcttcagccagactttaatgaagactatctagtttctgaaacacagacaacatcaagggggaaagaaagtgaagattcatcttataagccaattttttcaacacttcctgaaaccaacattttaaatgtggttaagtttctaggcttgtgtacatctatacatccagaaggttaccaggatcgtgaaataatgttgctgattttaatgttatttaaaatgagtttggaaaaacagctgaaacagattcctttagtagactttcaaagcctcctgataaacctgatgaaaaacatcagagattggaacacaaaggtgcctgaactctgtctgggcataaatgaactctccagtcatccccacaacctcctgtggttggtacagctggtccctaattggacatcacgtggaaggcaactgagacagtgcctcagtctagtgattatttcaaagcttttggatgagaaacacgaagatgttcctaatgccagtaatctgcaggtatcagtcctacatcgctatcttgtgcagatgaagccttctgatttgttaaagaaaatggtcttgaagaaaaaggctgaacaaccagatggcattattgatgacagtcttcatttagaacttgaaaagcaggcatattacctgacctacattcttcttcatttagtcggtgaagttagttgttctcattctttttcttctggacaacggaaacactttgtgctactctgtggggctttggaaaagcatgttaaatgtgatattagggaagatgcaagacttttttacagaactaaggtgaaagacttggtcgccaggatacatggaaaatggcaggaaataatccagaactgtcggcctactcaggggcagcttcatgacttctgggtaccagattcttaataggagttgcagcagcaaaaatatgaaccaagagaaattcaataagagcctttcatagaggagtagaaaggattattacagaatccaatgaatgccaagaaaatgtacagcaaatgtgccacttgaatatctagtatgaagctggtaatgaagaaattgccatttctgaagcagatatgaaatatgatctgcttaattgttaaggcaactgacctttcaaaagtgcagagtcttattaaaagaggggaggggtagaagcagaataatagtcatatgtctaacctgccccagttaactcctcttgttaaattataagccagttatcttttttagatagtatttttgtcacttggataatcacaggaaatatataagaaaagagcttggactaacttgagaagttggacatggaaagcaagaccaagttccagttgggtttaattttccctcttggttattttcggacacaaagggaatgcttaaaactgagtttagtaataaaaagcataaatctcttctgtaacttttataaaccacagggaggtttcaatccatgcattttccttcattactcaagattataaatctgtttttaaaatacatctaaacaaacagttgagaaacaaaagtttggcatgttgtcagatccccttaagaggaagaggttaagctgtaaagtagtggccctgttttgatgccagaacattcatatgctgtttgttctggatttcttttaaatgcatgtattttaaatactggttaaatcttagaatcttggctatatcttagaattctggctcttggtaaccatattacagaagtctatattgtaaaagcctaaagatctggacaaggttccaac

SEQ ID NO: 11520 - protein, 498 aa, Homo sapiens
MEDTQRLDELQKQLQEDIRQGRGIKSPIRIGEEDSTDDEDGLLEEHKEFLKKFSVTIDAIPDHHPGEEIFNFLNSGKIFNQYTLDLRDSGFIGQSAVEKLILKSGKTDQIFLTTQGFLTSAYHYVQCPVPVLKWLFRMMSVHTDCIVSVQILSTLMEITIRNDTFSDSPVWPWIPSLSDVAAVFFNMGIDFRSLFPLENLQPDFNEDYLVSETQTTSRGKESEDSSYKPIFSTLPETNILNVVKFLGLCTSIHPEGYQDREIMLLILMLFKMSLEKQLKQIPLVDFQSLLINLMKNIRDWNTKVPELCLGINELSSHPHNLLWLVQLVPNWTSRGRQLRQCLSLVIISKLLDEKHEDVPNASNLQVSVLHRYLVQMKPSDLLKKMVLKKKAEQPDGIIDDSLHLELEKQAYYLTYILLHLVGEVSCSHSFSSGQRKHFVLLCGALEKHVKCDIREDARLFYRTKVKDLVARIHGKWQEIIQNCRPTQGQLHDFWVPDS

SEQ ID NO: 11521 - DNA, 2159 bp, Homo sapiens
  CDS (109)..(1713)
cgctgtgagggagtcgctgtgatccggggccccggaacccgagctggagctgaagcgcaggctgcggggcgcggagtcgggagtgcaggcctgagtgttccttccagcatgtcggagggggagtcccagacagtacttagcagtggctcagacccaaaggtagaatcctcatcttcagctcctggcctgacatcagtgtcacctcctgtgacctccacaacctcagctgcttccccagaggaagaagaagaaagtgaagatgagtctgagattttggaagagtcgccctgtgggcgctggcagaagaggcgagaagaggtgaatcaacggaatgtaccaggtattgacagtgcatacctggccatggatacagaggaaggtgtagaggttatgtggaatgaggtacagttctctgaacgcaagaactacaagctgcaggaggaaaaggttcgtgctgtgtttgataatctgattcaattggagcatcttaacattgttaagtttcacaaatattgggctgacattaaagagaacaaggccagggtcatttttatcacagaatacatgtcatctgggagtctgaagcaatttctgaagaagaccaaaaagaaccacaagacgatgaatgaaaaggcatggaagcgttggtgcacacaaatcctctctgccctaagctacctgcactcctgtgacccccccatcatccatgggaacctgacctgtgacaccatcttcatccagcacaacggactcatcaagattggctctgtggctcctgacactatcaacaatcatgtgaagacttgtcgagaagagcagaagaatctacacttctttgcaccagagtatggagaagtcactaatgtgacaacagcagtggacatctactcctttggcatgtgtgcactggagatggcagtgctggagattcagggcaatggagagtcctcatatgtgccacaggaagccatcagcagtgccatccagcttctagaagacccattacagagggagttcattcaaaagtgcctgcagtctgagcctgctcgcagaccaacagccagagaacttctgttccacccagcattgtttgaagtgccctcgctcaaactccttgcggcccactgcattgtgggacaccaacacatgatcccagagaacgctctagaggagatcaccaaaaacatggatactagtgccgtactggctgaaatccctgcaggaccaggaagagaaccagttcagactttgtactctcagtcaccagctctggaattagataaattccttgaagatgtcaggaatgggatctatcctctgacagcctttgggctgcctcggccccagcagccacagcaggaggaggtgacatcacctgtcgtgcccccctctgtcaagactccgacacctgaaccagctgaggtggagactcgcaaggtggtgctgatgcagtgcaacattgagtcggtggaggagggagtcaaacaccacctgacacttctgctgaagttggaggacaaactgagccggcacctgagctgtgacctgatgccaaatgagaatatccccgagttggcggctgagctggtgcagctgggcttcattagtgaggctgaccagagccggttgacttctctgctagaagagaccttgaacaagttcaattttgccaggaacagtaccctcaactcagccgctgtcaccgtctcctcttagagctcactcgggccaggccctgatctgcgctgtggctgtccctggacgtgctgcagccctcctgtcccttccccccagtcagtattaccctgtgaagccccttccctcctttattattcaggagggctgggggggctccctggttctgagcatcatcctttcccctcccctctcttcctcccctctgcactttgtttacttgttttgcacagacgtgggcctgggccttctcagcagccgccttctagttgggggctagtcgctgatctgccggctcccgcccagcctgtgtggaaaggaggcccacgggcactaggggagccgaattctacaatcccgctggggcggccggggcgggagagaaaggtggtgctgcagtggtggccctggggggccattcgattcgcctcagttgctgctgtaataaaagtctactttttgct

SEQ ID NO: 11522 - protein, 535 aa, Homo sapiens [sequence omitted]

SEQ ID NO: 11523 - DNA, 2835 bp, Homo sapiens
atctgctgatgagtccaggccccggtccattctcctcgcgctgcaaggatgctcctgggatttcggagaggccgcaggagtcatttcaaacagggtctcgctctgtcgcccaggctagagtgcagtggtgcgatcatagctcactgcatcctcgaactcctgggctcaagcgatcttcccaccccagcctcccgaggagctgagactacaggcgcgcgccactactcccggctaattgttcaatatttttgtggaaacagggatcttgctatgttcctatggtggtcttgagctccttagcctcctaaagtgttggtatcacaggcgtgagccactgtgcccggcgttaacaatcttctgccccagggtcggccacagttggacaggagcaccctgcctcccctgtagcattcgtccccgtgcccggagttaactcctggacgacgtacacctgctgcactgctggatatagccattcttcatttttccctcctccacccaccatgtacaccccatcagcaagtcccatccgatatacccactacatacatctgccagctgttcccatctccacccacaccccggcctccagcatctgtctggactgctgcggcagatcctcactggtttctctgcttccactctcgcccttcccctaggtccattctccacgtagcagccaaggggattcttatatttatttattatttaatttagttttagagacagggtcttgtcctgatgcccaggctggagtacagtggcatgatcatagctcactgtggcttcaacctcttgggctcaagtgatcctcctgcctcaggctcctgagtagctgggactacaggtgtgcaccaccacacctaggtattttttatttattttattttttgcctcacactctgccaagtctcaatgcctggctaattttaaaaattattttgtagaggccacgtgaggtggctctcacctgtaatccagcactttgggaggctgaggcaggcggatcatttgaggtcaggagttcaagattagcctggccaacatggtgaaaacccatctctactaaaaatacaaaaattagcgggcgtggtggtgggcacctgtaatcccagctacacgggaggttgaggtgggataatcgcttaaacccgagaggcagaggttgcagtgagccaagattgtgccactgcactccagcctgggcgacaaagctagactctgcctcaaaaaaacataattttttttttttggtagagatggggtctgggtatgctgcccaggctggtcttaaaccttggctcaagcaatcctctcaccttggcctccagagtgttgggattacaggtgtgagccactgcatctggcttgagtttttatttaaagccccaaacattaatgagtccctgctgtgtgctgatacccacaactgacagcttatggccacacggtctgtaggatagacaagcccataaataattctgtacacaatggtaaaacaagaactgctgttgatgtgtgtaccagaagggcagtgacatcagcctggagagttggcctgggcctggcagggagtaaggaaagaattctgggtgcagaagacagcaaataccaaggcctaaaaaagaatgaattatttgctgtttgggaaatggaagcccacgctgagtgctgaagcacagggactctgcgcaggaagaggaggggaagcaagaaatgaatttgggtccttgtgatggcagtggctgctgccatcacgctgtgtggctagggctgcacacttcatggagccggtggaagccccgtccctcatgagttgggactggagccgcaaaccgctgctgcagacccaggccttctgctctatggagcaggcaggagccccaccctcttgggcagggctacagccacccaaactgcagctgtggatccgagcctctctgctcctgggggagccgggaacaggcagagtttgcccttccagatgcagctgcagccgcgcaggcaggagccagggacaagtgggagccctgcctcttccaagttggcggggtgggagctcccaggtgcagctgtggctgcccccccaggcacaggacgagggcatctctgtagcctgcaccatcggccatcccaggaaggacagcccccttcaccctccatccctgcaggctcaggggtgtctgcttccactgcctggcctctctccactccagcaactgctctgatcttggaggggagtcggagccaagacctgcagccatgaatggcagcaggaggaagggggtggggtccccagtaaggccccaccctcaggccagggagggcctgaattctgggggctgggctgccagtccctctgaccagagtggaaactcgtggagccttttctgggcctgccaatggcccaatcagcacacacttcttccccgctgaggtccataaaaaccctaggctcagccagagcagcgcagagaatagccagaggatgaagatggtagagacgaggggacaggatgaccagctgcagagagcagtaccctctctgctgatagctggagacggtggggtgaccagctacagagaggagtaccttctccgctgaaagctacagagaccacctgccagcagagaggagctacactctgctgcgagcttcagagacctgcagagacattggaatgacttgcctgcggagaggagccactctctccagggcctcctctctgttgagagctgaatgattgagctcatgggacaatctgtctccagagaggagctacccactcctctgagctcttctaacactaaataaaactcctcttcacccttcag

SEQ ID NO: 11524 - DNA, 2229 bp, Homo sapiens
  CDS (122)..(1510)
agttaaaacagctgagcttctgaatgcctgcaagaagctgccctttgaaattaagaacttcgtgaagaaaacagaggctcttcggttgcagtatcgctacttagacttgcgtagtttccaaatgcagtataacctgcgactgaggtcccagatggtcatgaaaatgcgggaatatctctgtaatctgcatgggtttgtggatatagaaacccccacattgtttaagaggaccccagggggtgccaaagagtttttagtaccatccagggaacctggaaagttttgttctctccctcagagtcctcaacagtttaagcaacttctgatggttggcggtttagacagatattttcaggttgcccgatgttatcgagatgaaggttcaagaccagacagacagcctgagtttactcagattgacatagagatgtcatttgtagaccagactgggatccagagtttaattgagggtttgctccagtattcctggcccaatgacaaagatcctgtggttgttccttttcctactatgacttttgctgaggtgctggccacctatggaactgataaacctgacactcgctttggaatgaagattatagatatcagtgatgtgtttagaaacacagagattggatttcttcaagatgcacttagtaagccccatggaactgtgaaagccatatgtatccctgaaggagcaaaatacttaaaaaggaaagacattgaatccattagaaactttgcagctgaccattttaatcaggaaatcttacctgtattccttaacgccaatagaaactggaattctccagttgctaatttcataatggagtcacaaagactggaattaatcagactaatggagacccaagaggaagatgtggtcctactaactgctggagagcacaataaagcatgctctttgttaggaaaattacgactggaatgtgctgaccttctagaaacaagaggagtggtgctccgtgaccccactctgttctctttcctttgggtggtagatttcccactcttcctgcccaaggaggaaagtcccagagagctggaatcggcccaccacccatttactgctccccaccccagtgacatacatctcctgtacactgagcccaaaaaggcccgtagccaacactatgacttggttttaaatggcaatgaaataggaggtggttcaattcgaattcacaatgcagagctgcagcgttatatcctggcaaccttactaaaggaggatgtgaaaatgctctcccatctgctccaggctttagattatggggcaccccctcatggaggaattgccttagggttagacagactgatatgccttgtcactggatctccaagcatcagagatgtcatagccttcccaaagtccttccggggacatgacctcatgagcaataccccagattctgtccctcctgaggaactgaagccctatcatatccgagtctccaagccaacagactccaaagcagaaagagctcattgaatcatgcataccatgcagaaagttgagcttttaggttttgtcctctttgcttccccaaggctaaagtcagatctagagttctgccacaggtctaacaatcaagtctttagatggaaggaatccaggcaacattcttcaccacaacgaagaaacagataaaagatacccaattttgacttgatttcatgcatcatttggattttttttggttaggactttttttgaagttcctttttacttaggtgtgaaagatggttctttgttgaaataatatagtggtttagtgttttcaaatcatgtttctcatacccagatagtagattattcacttaggacagaggtaatcaaattatgtgtgaaatgtaggaaaatgcttgcccctgtaaactagtgagttgatggagcatttgcttcatcatcctcatcaagagaatcatataaattaagctttataatgacatttcaaccatcaacataatatagtgaggagtagcataatattttttaataatgcagaaaacatcactgaaatgagagtcacaaatttttcttcagtgtttcagcctgagtaagttacataaacctcgcttagcctcccttcctgctaatgtgtaaaatacatacttgccctggctacctcaccgggctgttattgctggaatcagaggagataacatatatggaagataaagtgaataaaagtactttgaaaaact

SEQ ID NO: 11525 - protein, 463 aa, Homo sapiens
MQYNLRLRSQMVMKMREYLCNLHGFVDIETPTLFKRTPGGAKEFLVPSREPGKFCSLPQSPQQFKQLLMVGGLDRYFQVARCYRDEGSRPDRQPEFTQIDIEMSFVDQTGIQSLIEGLLQYSWPNDKDPVVVPFPTMTFAEVLATYGTDKPDTRFGMKIIDISDVFRNTEIGFLQDALSKPHGTVKAICIPEGAKYLKRKDIESIRNFAADHFNQEILPVFLNANRNWNSPVANFIMESQRLELIRLMETQEEDVVLLTAGEHNKACSLLGKLRLECADLLETRGVVLRDPTLFSFLWVVDFPLFLPKEESPRELESAHHPFTAPHPSDIHLLYTEPKKARSQHYDLVLNGNEIGGGSIRIHNAELQRYILATLLKEDVKMLSHLLQALDYGAPPHGGIALGLDRLICLVTGSPSIRDVIAFPKSFRGHDLMSNTPDSVPPEELKPYHIRVSKPTDSKAERAH

SEQ ID NO: 11526 - DNA, 1913 bp, Homo sapiens
  CDS (17)..(772)
acgcctcgtgaccatcatgctggccaacaatgagactggcattgtcatgcctgtccctgaaatcagtcagcgcattaaagccctgaaccaggaacgggtggcagctgggctacctcccatcctcgtgcacacggatgctgcacaggccttggggaagcagcgcgtggatgtggaggacctgggcgtggacttccttacaatcgtggggcacaagttttatggtcccaggattggcgcactttatatacgaggacttggtgaatttacccctctctaccctatgctatttggaggtggacaagaacggaatttcaggccagggacagagaacaccccaatgattgctggccttgggaaggccgcggagctggtgacccagaactgcgaggcttatgaggcccacatgagggacgtccgcgactacctggaagagaggctggaagctgaattcggtcagaagagaatccatctgaatagccagtttccaggcacccagcggcttcccaatacctgtaacttttccatccggggaccccggcttcaaggccacgtggtgcttgcgcagtgccgagtgctgatggccagtgtgggggccgcgtgccactcggaccacggggaccagccgtccccagtgctgctgagctacggtgtccccttcgacgtggccaggaacgcgctccggctcagcgtgggccgcagcaccaccagggccgaggtggacctcgtcgtgcaggacctgaagcaggccgtggcgcagctggaggaccaggcctagcactggggccgccttccccaccccgcttctgggaagcccgtggcagggcacagggttgtccctccagttccctcctgagggctgtgccaggatgactgtctcatgccccctctgcattttgtcctggagtgccagcgagtgtgcacccccagtttccttccctggaaccctgcagagctcacagggcccaggacaccaacgccgcataggaccgcccacatgggaacgcccacatgggaccgcccacataggaccgcccacataggaccgcccacataggaccgcccacatgggaccgcccacatagaaccgcccacataggaccgcccacatgggaccgcccacatgggaccgcccacatgggaccgcccacatgggaccgcccacatagaaccgtcctccagtggtgaagcggaaacacttagctttatccaccctccccactgggaactgggcacgcctgttgtgagtgccctttcctggaaggtgtttttatctggaagatagaatccaagtatttataactcattgtcagccaaatgctatcatgaacgtaggaaacttgatttttttgttttgatcatggcctctacatgcacctttccagagtggtctcttctcgggccctttttagtccctttccaaagctgcccccaccaccctgctcctctggcctcagtgcacagtggcccccagcctcggccaggcctgctctgctcagcgcccaccgcccaccacccctcctgcttccccgagcctgaccctgttccgcccactggcaatcagggctgcgcacttccctgtccacggtccccaggccttcctgtcttgtcccttttgatcattaactcagggtttcagctccaacctcgctgagttggtgcagctccgggccattcctggggtgggaatcggatcatccctgactcagcttataccttaattttatttgtagaggattcttttctcaaaatgctctggcatttggacacacatcacatgtcgatatttgcataggagtcattttcagtggaataacatttttaatgtgtggttttacggttcaaggaactacatgatgattttgaggaaacacttgccagaaactaaattaacgaataaaagatttcagtgcccg

SEQ ID NO: 11527 - protein, 252 aa, Homo sapiens
MLANNETGIVMPVPEISQRIKALNQERVAAGLPPILVHTDAAQALGKQRVDVEDLGVDFLTIVGHKFYGPRIGALYIRGLGEFTPLYPMLFGGGQERNFRPGTENTPMIAGLGKAAELVTQNCEAYEAHMRDVRDYLEERLEAEFGQKRIHLNSQFPGTQRLPNTCNFSIRGPRLQGHVVLAQCRVLMASVGAACHSDHGDQPSPVLLSYGVPFDVARNALRLSVGRSTTRAEVDLVVQDLKQAVAQLEDQA

SEQ ID NO: 11528 - DNA, 3345 bp, Homo sapiens
  CDS (141)..(626)
gaaattatcggagggaggtagtagaagatatcaacaaattattgaaatatctggatttggaagaggaagcagacacaactaaagcatttgacctgagacagaatcattccattttaaaaatagaaaaggtcctcaagagaatgagagaaataaaaaatgaacttctccaagcacaaaacccttctgaattgtacctgagctccaaaacagaattgcagggtttaattggacagttggatgaggtaagtcttgaaaaaaacccctgcatccgggaagccaggagaagagcagtgatcgaggtgcaaactctgatcacatatattgacttgaaggaggcccttgagaaaagaaagctgtttgcttgtgaggagcacccatcccataaagccgtctggaacgtccttggaaacttgtctgagatccagggagaagttctttcatttgatggaaatcgaaccgataagaactacatccggctggaagagctgctcaccaagcagctgctagccctggatgctgttgatccgcagggagaagagaagtgtaaggctgccaggaaacaagctgtgaggcttgcgcagaatattctcagctatctcgacctgaaatctgatgaatgggagtactgaaataccagagatctcacttttgatactgttttgcacttcatatgtgcttctatgtatagagagctttcagttcattgatttatacgtgcatatttcagtctcagtatttatgattgaagcaaattctattcagtatctgctgcttttgatgttgcaagacaaatatcattacagcacgttaacttttccattcggatcattatctgtatgatgtggtgtggtttgtttggtttgtccttttttttgcgtttttaatcagaaaacgaaatagaggcagcttttgtagattttaaatgggttgtgcaagcattaaaatgcaggtctttcagaatctagaactaggcataaccttacataatactaggaattatgagaaaggggaaatttttggttaaataagagtaaggttcaaacacaagcagtacatgttctgtttcattatgctcgatagaaggcttttttttcacttataaggcctgattggtcctacccagcttaacggggtggggtttttttgtttgttcagacagtctgttcttttgtaaacatttttagttggaaaaacagcatctgcattttccccatcctctacgttttagagaggaatcttgtttttgtgtgcaacataagaaaattatgaaaactaatagccaaaaaacctttgagattgcattaaagagaagggataaaggaccagcaataataccttgtaagttgcttttgtttgtaaaatctgagcttatagttttccttagtgagtaaattcataaggatgggaacatttaaattaagttaatgggcctttaaaaaaaaaaaaggaaacactcatacctgtagttggaggatgaatactggagacgggttaccaatgtcaggttatactaaaactaaatcagaaagtctgaatgtagcacataatggttctcttctgttgtccaaggctgtaaaatggacagccttgtcacacctccccggtgctgttttacaacgtgagggtagacgctgtcagtaacccagagggaccaggccttcctaggttttctaggcagtcagctgttaaccactcacttagtaaatgtcataactacacctgctccaggaccaatcagtgaaacctgctcggaattaaaggcttcctctgggtgcctgctgaacaactgagctcatgtcatgggcatgtggtggtttctctgttgcctgaaagagccattaaagtcagtcgtgcgtgaagcatctctcttctaaaggatgtgtatttccataaatgctttctgaggatccggtacaaaatgatttcccaaagttctgaagtgccttgagaacatgtgggtccgagtgttataacagactcctcccccgggtcaccttttgcctggtcatcctgttagagtacatctttggaaatccagggtaatattctctttcagagatgctcattgtgtaactctgtgtagggagatagtcactttaaacagctcaaagtagctagctaaaggagtagccttaaatacctaaaagatgacagaagcatagcccttaacaaatcttcagcttgtctctcagtatttcccaatcatgaaaatcccttgctatgtctttcctactagaaatgttctagaatcgctggacggtggggtcagagggcagtcggtatttaggccgtgagcttcccatactactgcaggtccaactcctggcaaccgcgggctcaaggcaggtcattggaatccacgttttggccacagtagttgtaggattgcttttctgtatcataattttagaatgctcttaaaatcttgaggaagagtttttattttttatttatttttgagatggagtctctgttgcccaggctgcagtgcagtggtgccatctcagctcactgcaacctccacctcccaggttcaagcgattctcctgcctcagccacctgagtagctgggagtacaggcatgtggcaccatgcctggctaatttttgtatttttaatagagttgagatttcaccatgatggtcaggctggtctcgaactcctgacctcgtgatccgcccgcctcggccccccaaagtgctgggattaacgggtgtgagccacggcgcccagcccaggaagagtttttaaattagagctctgtttaattataccactgggaaatcatggttacgcttcaggcatattcttccccagagtactacttacattttaaatttcattttgtaaagttaaatgtcagcattccctttaaaagtgtccattgttctttgaaagtagacgtttcagtcattcttttcaaacaagtgtttgtgtaccttttgccaagctgtgggcatcgtgtgtgggtacagggtgctcagctcttccaccgtcattttgaattgttcacatgggtaattggtcatggaaatgatcagattgaccttgattgactgtcaggcatggctttgtttctggtttcaatctgttctcgttccttgtaccggattattctactcctgcaatgaaccctgttgacaccggatttagctcttgtcggccttcgtggggagctgtttgtgttaatatgagctactgcatgtaattcttaaactgggcttgtcacattgtattgtatttttgtgatctgtaatgaaaagaatctgtactgcaagtaaaacctactccccaaaaatgtgtggctttgggtctgcattaaacgctgtagtccatgttcatgcc

SEQ ID NO: 11529 - protein, 162 aa, Homo sapiens [sequence omitted]

SEQ ID NO: 11530 - DNA, 3887 bp, Homo sapiens
  CDS (62)..(916)
gcaaacatactttaataagttaaagaaaataacaaaaacagtacagcaaagatactgggcaatgaaagaaagaaacatacaatttcaaaggtataacaaactgaggcattctgtaatatacattcaggctatttttaggggaaagaaagctagaagacatttaaaaatgatgcatatagccgcaactctcattcagaggagatttagaactctaatgatgagaagaagattcctctctctcaagaaaactgctattttgattcagagaaaatatcgggcacatctttgtacaaagcatcacttacagttccttcaggtacaaaatgcagttattaaaatccagtcatcatacagaagatggatgataaggaaaaggatgcgagagatgcacagggctgctactttcatccagtctactttcagaatgcacagattacatatgagatatcaggctttgaaacaggcctccgttgtgatccaacagcaataccaagcaaatagagctgcaaaactgcagaggcagcattatctcagacaaagacactctgctgtgatccttcaggctgcattcaggggtatgaaaactagaagacatttgaagagtatgcattcctctgcaacccttattcagagtaggtttagatcattactggtgaggagaagattcatttccctcaaaaaagctactatttttgttcagaggaaatatcgagccaccatttgtgccaaacataaattgtaccaattcttgcacttaagaaaggcagccattacaatacagtcatcttacagaagactgatggtaaagaagaagttacaagaaatgcaaagggctgcagttctcattcaggctactttcaggatgcacagaaaaaaaaatatattacatttcagacttggaaacatgcttcaattctaattcagcaacattatcgaacatatagagctgcaaaattgcaaagagaaaattatatcagacaatggcattctgctgtggttattcaggctgcatataaaggaatgaaagcaagacaacttttaagggaaaaacacaaagcttctattgtaatacaaggcacctacagaatgtataggcagtattgtttctaccaaaagcttcagtgggctacaaaaatcatacaagaaaaatatagagcaaataaaaagaaacagaaagtatttcaacacaatgaacttaagaaagagacttgtgttcaggcaggttttcaggacatgaacataaaaaaacagattcaggaacagcaccaggctgccattattattcagaagcattgtaaagcctttaaaataaggaagcattatctccacattagagcaacagtagtttctattcaaagaagatacagaaaactaactgcagtgcgtacccaagcagttatttgtatacagtcttattacagaggctttaaagtacgaaaggatattcaaaatatgcaccgggctgccacactaattcagtcattctatcgaatgcacagggccaaagttgattatgaaacaaagaaaactgcaattgtggttatacagaattattataggttgtatgttagagtaaaaacagaaagaaaaaactttttagcagttcagaaatctgtacgaactattcaggctgcttttagaggcatgaaagttagacaaaaattgaaaaatgtatcagaggaaaagatggcagccattgttaaccaatctgcactctgctgttacagaagtaaaactcagtatgaagctgttcaaagtgaaggtgttatgattcaagagtggtataaagcttctggccttgcttgttcacaggaagcagagtatcattctcaaagtagggctgcagtaacaattcaaaaagctttttgtagaatggtcacaagaaaactggaaacacagaaatgtgctgccctacggattcagttcttccttcagatggctgtgtatcggagaagatttgttcagcagaaaagagctgctatcactttacagcattattttaggacgtggcaaaccagaaaacagtttttactatatagaaaagcagcagtggttttacaaaatcactacagagcatttctgtctgcaaaacatcaaagacaagtctatttacagatcagaagcagtgttatcattattcaagctagaagtaaaggatttatacagaaacggaagtttcaggaaattaaaaatagcaccataaaaattcaggctatgtggaggagatatagagccaagaaatatttatgtaaagtgaaagctgcctgcaagattcaagcctggtatagatgttggagagcacacaaagaatatctagctatattaaaagctgttaaaattattcaaggttgcttctataccaaactagagagaacacggtttttgaatgtgagagcatcagcaattatcattcagagaaaatggagagctatacttcctgcaaagatagctcatgaacacttcttaatgataaaaagacatcgagctgcttgtttgatccaagcacattatagaggatataaaggaaggcaggtctttcttcggcagaaatctgctgctttgatcatacaaaaatatatacgagccagggaggctggaaagcatgaaaggataaaatatattgaatttaaaaaatctacagttatcctacaagcactggtgcgtggttggctagtacgaaaaagatttttagaacagagagccaaaattcgacttcttcacttcactgcagctgcatattatcacctgaatgctgttagaattcaaagagcctataaactttacctggctgtgaagaatgctaacaagcaggttaattcagtcatctgtattcagagatggtttcgagcaagattacaagaaaagagatttattcagaaatatcatagcatcaaaaagattgagcatgaaggtcaagaatgtctgagccagcgaaatagggctgcatcagtaatacagaaagcagtgcgccattttctcctccgtaaaaagcaggaaaaattcactagtggaatcattaaaattcaggcattatggagaggctattcttggaggaagaaaaatgattgtacaaaaattaaagctatacgactaagtcttcaagttgttaatagggagattcgagaagaaaacaaactctacaaaagaactgcacttgcacttcattaccttttgacatataagcacctttctgccattcttgaggccttaaaacacctagaggtagttactagattgtctccactttgttgtgagaacatggcccagagtggagcaatttctaaaatatttgttttgatccgaagttgtaatcgcagtattccttgtatggaagtcatcagatatgctgtgcaagtcttgcttaatgtatctaagtatgagaaaactacttcagcagtttatgatgtagaaaattgtatagatatactattggagcttttgcagatataccgagaaaagcctggtaataaagttgcagacaaaggcggaagcatttttacaaaaacttgttgtttgttggctattttactgaagacaacaaatagagcctctgatgtacgaagtaggtccaaagttgttgaccgtatttacagtctctacaaacttacagctcataaacataaaatgaatactgaaagaatactttacaagcaaaagaagaattcttctataagcattccttttatcccagaaacacctgtaaggaccagaatagtttcaagacttaagccagattgggttttgagaagagataacatggaagaaatcacaaatcccctgcaagctattcaaatggtgatggatacgcttggcattccttattagtaaatgtaaacattttcagtatgtatagtgtaaagaaatattaaagccaatcatgagtacgt

SEQ ID NO: 11531 - protein, 285 aa, Homo sapiens
MKERNIQFQRYNKLRHSVIYIQAIFRGKKARRHLKMMHIAATLIQRRFRTLMMRRRFLSLKKTAILIQRKYRAHLCTKHHLQFLQVQNAVIKIQSSYRRWMIRKRMREMHRAATFIQSTFRMHRLHMRYQALKQASVVIQQQYQANRAAKLQRQHYLRQRHSAVILQAAFRGMKTRRHLKSMHSSATLIQSRFRSLLVRRRFISLKKATIFVQRKYRATICAKHKLYQFLHLRKAAITIQSSYRRLMVKKKLQEMQRAAVLIQATFRMHRKKNILHFRLGNMLQF

SEQ ID NO: 11532 - DNA, 2453 bp, Homo sapiens
  CDS (876)..(2453)
tttatgatgaacgctggaaggaaaagcaggaacagggcttcacttggtggttaaattttatattaacccctgatgacttcactgtaaaaacaaatatttctgaagtaaatgctgctactcttcttttgggaatagagaatcaacataaaataagtgttcctagagcacctacaaaagaggaaatgtctctcagagcttatactgctcggtgtaggttaaacagactacgtcgtgcagcatgccgtttgtttacttctgaaaaaatggttaaagctattaaaaagcttgaaattgaaattgaagctaggcggttaattgttcgaaaagatagacacctatggaaagatgtgggagaacgtcagaaagtcctgaattggctgttgtcctacaatcctttgtggcttcgaattggtctagagacaacttatggagaactcatatctttggaagataacagtgatgtcacagggttggctatgtttattctgaatcgcctactttggaatcctgatatagcagctgagtatagacaccccactgttcctcacctgtatagagatggtcatgaagaagctttgtccaagtttacattgaaaaagttattgttgttggtctgttttcttgattatgctaaaatttccagactcattgatcatgatccttgtctcttctgtaaagatgccgaattcaaggctagtaaagaaatcctttaggctttttcacgagatttcctaagtggtgaaggtgacctttcccgtcgccttggcttattgggattacctgttaaccatgttcagacaccatttgatgaatttgattttgccgttacaaatcttgccgtagacttgcaatgtggagtgcgccttgtgcgaaccatggaacttctcacacagaactgggacctctcaaagaaactcaggattccggcaataagtcgtcttcaaaagatgcacaatgttgacattgttcttcaagttcttaaatcacgaggaattgaattaagtgatgagcatggaaatacaattctatctaaggatattgtggataggcacagagaaaaaactctcaggttgctttggaaaatagcgtttgcttttcaggtggatatttcccttaacttagatcaattaaaggaagaaattgcctttctaaaacacacaaagagtataaagaaaacaatatctctactatcatgccattctgatgatcttattaataagaaaaaaggcaaaagggatagtggttcctttgaacaatatagtgaaaacataaagttattgatggattgggtaaatgctgtttgtgccttctataataaaaaggtggagaattttacagtgtctttctcagacggccgtgtgttatgttacctgatccaccattaccatccttgctatgtgccattagacgctatatgtcagcgtactactcaaactgtggaatgtacgcaaactggttcagtggtattaaattcatcatctgaatctgatgacagttctctggatatgtcacttaaagcatttgatcatgaaaatacttcagagctatacaaagagctcctagaaaatgaaaagaaaaattttcacttggttaggtctgcagttagagaccttggtggaatacctgctatgattaatcattcagatatgtcaaatacaattccagatgaaaaggtggttattacctatttgtcatttctttgtgcaaggcttttggatcttcgtaaagaaataagagctgctcgactcatacaaacaacatggagaaaatataaactaaaaacagatctcaaacgccatcaggagagagagaaagctgcaagaattattcaattggctgtaatcaattttctagcaaaacaaagattgagaaaaagagttaatgcagcactcgtcattcagaaatattggcgaagagtcttagcacagagaaaattattaatgttaaaaaaggaaaagctggaaaaagttcaaaataaagcagcatcacttattcagggatattggagaagatattccactagacaaagatttctgaaattgaaatattattcaatcatcctgcaatctaggataagaatgataattgctgttacatcttataaacgatatctttgggctacagttacaattcagaggcattggcgtgcttatttaagaagaaaacaagatcaacaaagatatgaaatgctaaaatcatcaactcttataatccaatctatgttcagaaaatggaagcaacgtaaaatgcaatcacaagtaaaagctacagtaatattgcaaagagcttttagagaatggcatttaagaaaacaagctaaagaagaaaattctgctattatcatacaatcatggtatagaatgcataaagaattacggaagtatatttatattagatcttgtgttgttatcattcagaaaagatttcggtgctttcaagcccaaaagttatat

SEQ ID NO: 11533 - protein, 526 aa, Homo sapiens
MELLTQNWDLSKKLRIPAISRLQKMHNVDIVLQVLKSRGIELSDEHGNTILSKDIVDRHREKTLRLLWKIAFAFQVDISLNLDQLKEEIAFLKHTKSIKKTISLLSCHSDDLINKKKGKRDSGSFEQYSENIKLLMDWVNAVCAFYNKKVENFTVSFSDGRVLCYLIHHYHPCYVPLDAICQRTTQTVECTQTGSVVLNSSSESDDSSLDMSLKAFDHENTSELYKELLENEKKNFHLVRSAVRDLGGIPAMINHSDMSNTIPDEKVVITYLSFLCARLLDLRKEIRAARLIQTTWRKYKLKTDLKRHQEREKAARIIQLAVINFLAKQRLRKRVNAALVIQKYWRRVLAQRKLLMLKKEKLEKVQNKAASLIQGYWRRYSTRQRFLKLKYYSIILQSRIRMIIAVTSYKRYLWATVTIQRHWRAYLRRKQDQQRYEMLKSSTLIIQSMFRKWKQRKMQSQVKATVILQRAFREWHLRKQAKEENSAIIIQSWYRMHKELRKYIYIRSCVVIIQKRFRCFQAQKLY

SEQ ID NO: 11534 - DNA, 2448 bp, Homo sapiens
  CDS (96)..(1253)
gtcgttaggggagcgagtcgtgaccggttgggccacactcaacgtgggacgaagcttcgcctactgtttgactacgtgcgtgcagcctcccctcgatgtcggccctcgaaaagagcatgcacctcggccgccttccctctcgcccacctctacccggcagcgggggcagtcagagcggagccaagatgcgaatgggccctggaagaaagcgggacttttcccctgttccttggagtcagtattttgagtccatggaagatgtagaagtagagaatgaaactggcaaggatacttttcgagtctacaagagtggttcagagggtccagtcctgctccttctgcatggaggaggtcattctgccctttcttgggctgtgttcacggcagcgattattagtagagttcagtgtaggattgtagctttggatctgcgaagtcatggtgaaacaaaggtcaagaatcctgaagatctgtctgcagaaacaatggcaaaagacgttggcaatgtggttgaagccatgtatggggaccttcctcctccaattatgctgattggacatagcatgggtggtgctattgcagtccacacagcatcatccaacctggtaccaagcctcttgggtctgtgcatgattgatgttgtagaaggtacagctatggatgcacttaatagcatgcagaatttcttacggggtcgtcctaaaaccttcaagtctctggagaatgctattgaatggagtgtgaagagtggccagattcgaaatctggagtctgcccgtgtctcaatggttggccaagtcaaacagtgtgaaggaattacaagtccagaaggctcaaaatctatagtggaaggaatcatagaggaagaagaagaagatgaggaaggaagtgagtctataagcaagaggaaaaaggaagatgacatggagaccaagaaagaccatccatacacctggagaattgaactggcaaaaacagaaaaatactgggacggctggttccgaggcttatccaatctctctcttagttgtcccattcctaaattgctgctcttggctggtgttgatagattggataaagatctgaccattggccagatgcaagggaagttccagatgcaggtcctaccccagtgtggccatgcagtccatgaggatgcccctgacaaggtagctgaagctgttgccactttcctgatccggcacaggtttgcagaacccatcggtggattccagtgtgtgtttcctggctgttagtgacctgctgtccacccctcctcaacatcgagctctgttgtaaatacgtcgcaccagaggccactgtgatgccactgtctcctctccatcccgcccagccatgtgacactggctcccggtagacgggcaccccgagatgtaccaaccttttcatgtattctgccaaaagcattgttttccagggcccttgaccaacatcggcttccccagtccagggctcccctgctcctttcccttccctgtactggggtagctcctgcctgctctccctgcgttgcctagggtaaagcctccagatttgccatactgagcccctcttcctagcatcaggcgatacatctgagttcaaatgtcttcccaggctcagggacctccattccttgagattgtcttggcatggcccagccctgcctcatgggatggacaatgcatggggtggtctttatttttccctttcaaataaaacactagtcaggtaccgttttatcccagtcgtactcttccaggtttggaagacccagagaggccaagatcccatccttagccatagcgagcggtggtggtggatagcatcacaagaaacgagcctgaaaatcaggtccagccggtccaagcacatggcctcccatctgggagagcacactgtcccactcccacatgtctgggcacctgccctgggctgaggccaggctgctccaggggcctcctgcgccctcacctgccacagagcaacccaggttaaatacagcccatgcacaaagccacaggccaaagcctatggaattgtttttaatcatcaaatttaaccattttcataactggttcctggaggtgtgcagtgcccccttgcctcttcaaacctacagcttctctttgccatttgtggatttcacatcactccacacagaaacattacagcctggcatccccagtctttgccttcttccagctgcctcgacacagcactgtggcctgtccctattgcccaggcacgccatttccaagggcaggaaggggcagtgtcctgaagcccatcttttctgtgactgtcttaggtgatgtgtagccccctccacctttccactcaacaacctcccacccctgtcctgctgcatggtccggagtctgggacctactttgttttttgttatttatgaccttgtttaaagaaaataaatatctcccaaccttt

SEQ ID NO: 11535 - protein, 386 aa, Homo sapiens [sequence omitted]

SEQ ID NO: 11536 - DNA, 2341 bp, Homo sapiens
  CDS (72)..(1322)
ccaggcacagtgacattgtcgtcctttatgcccgaaccctgagagctttggacactagtgaacaggagcgcatgaaaagttccctactgaaggaacagatgctaaggaaacaggccgagttagaatcagcacagtgccgactccaactgcaggtcctcactgataagtgcactaggcttcaaaggcgtgttcaggacttgcaaaaacttacgtcacatcaaagtcagaatttacagcaacccaggggctcccaagcatgggtcctgagctgctcaccctccagccagggccagcacaagcacaagtaccacttccaaaagaccttcacagtatctcaggcaggaaactgccggatcatggcatactgtgatgctctgagctgcctggtgatatcacagccttctcctcaggcctcttttcttccaggctttggtgttaagatgttgagtactgccaacatgaagagcagtcagtacattccgatgcatggcaaacagatccgtggactggcgtttagcagttacctcagaggcttgctactctctgcttccctagacaacactattaaactgaccagcctggagacaaataccgtggtccagacttataatgctggacgtcctgtctggagctgttgctggtgtcttgatgagactaactacatctatgctggactagccaatggttcaattctggtatatgacgtgcgaaacacgagcagtcatgtgcaggagttagtagctcagaaagccagatgcccactggtctccctgtcatacatgcccagagttgcctcagctgcatttccatatggtggggtgctggctggaaccttggaggatgcttcattctgggaacagaaaatggacttttctcattggcctcatgtgctgcccttggagccagggggctgcatagactttcagacagagaacagctcccggcactgtcttgtgacctacaggcctgataaaaatcacaccaccatacgaagtgtgctgatggaaatgtcctaccgactggatgacactggaaatccaatctgctcctgccagcctgtacatacattttttggaggacctacttgcaaactattgaccaaaaatgccattttccaaagcccagagaatgatggcaacatcctggtgtgtactggggatgaagcagcaaattctgccctgctgtgggatgctgccagtggctcgttgctccaggacctacagaccgatcagcctgtgttggacatctgcccatttgaggtgaaccgtaacagctacttggctaccttaacagagaagatggtccacatctataagtgggagtgactgtggtctcgaaaccttgaaggcatgctgctggttagatgttgtttgctagcgcctagcagccccaagcaagatccctgtttattgtctgcagtctagaacattgggaatcatggtttgtttgcattagtatgattctaggaccctaggtcactgagacactacagattgtgtatctgttatgtccactaaaagagtaattgatgggtactttatctacattatccatttcttgggtttaaagccttcattaaccattattgtatgttggaaattcttattttctttattttctgtgtgactttctggaccttagagagtgtcctctcatcatctaggatgtgagtgggcatcaagcattttctggggaatatgacatcccatctgagttgtcctgtcacttaagtatccttgaagggactaaccatcgtcttggtactgatttgatgcaacgtagatgtaaaagagtattattcagttgaacacaagagggcactgtagaaccttgtgtccggtttatttctgaccttgaaggctgacaatcttttagtaacttgtctcatctccacacaagtgtgtgatagcacacctgggtgtgctttgtggcaataacacttgtgttccaggtgtgaagtgctgggacattggcaggcccagtgatggaagcagctagtgaacgattccctttgctaatgcctagtgcattaagttcattgctttgcgaaaggtaaggaaagaggccagttgtttgagcggtggggaagattttgttttttctagccagcttaggatctcaggattggttttatccaagctagtgctttgaagaacactatctcttgctaggaaaagatgagtgataggtcaaagcttttacttgagtctcccctagtgtcagagatcaggagaaaagacataagagaatttacaaaagctattcagactgctattgaaaacatgagaagaacttgtctcccattttgagagttcctatctaaataaagccaattcctcag

SEQ ID NO: 11537 - protein, 417 aa, Homo sapiens
MKSSLLKEQMLRKQAELESAQCRLQLQVLTDKCTRLQRRVQDLQKLTSHQSQNLQQPRGSQAWVLSCSPSSQGQHKHKYHFQKTFTVSQAGNCRIMAYCDALSCLVISQPSPQASFLPGFGVKMLSTANMKSSQYIPMHGKQIRGLAFSSYLRGLLLSASLDNTIKLTSLETNTVVQTYNAGRPVWSCCWCLDETNYIYAGLANGSILVYDVRNTSSHVQELVAQKARCPLVSLSYMPRVASAAFPYGGVLAGTLEDASFWEQKMDFSHWPHVLPLEPGGCIDFQTENSSRHCLVTYRPDKNHTTIRSVLMEMSYRLDDTGNPICSCQPVHTFFGGPTCKLLTKNAIFQSPENDGNILVCTGDEAANSALLWDAASGSLLQDLQTDQPVLDICPFEVNRNSYLATLTEKMVHIYKWE

SEQ ID NO: 11538 - DNA, 3019 bp, Homo sapiens
  CDS (46)..(1833)
aagcccatccagaggttcccacagttcatactcctgcttcaggacatgctgaagaacacccccaggggccatccggacaggctgtcgctgcagctggccctcacagagctggagacgctggctgagaagctgaacgagcagaagcggctggctgaccaggtggctgagatccagcagctgaccaagagcgtcagtgaccgcagcagcctcaacaagctgttgacctcaggccagcggcagctgctcctgtgtgagacgttgacggagaccgtgtacggtgaccgcgggcagctaattaagtccaaggagcgtcgggtcttcctgctcaacgacatgcttgtctgtgccaacatcaacttcaagggccagctggagatcagcagcctggtgcccctggggcccaagtatgtggtgaagtggaacacggcgctgccccaggtgcaggtggtggaggtgggccaggacggtggcacctatgacaaggacaatgtgctcatccagcactcaggcgccaagaaggcctctgcctcagggcaggctcagaataaggtgtacctcggccccccacgcctcttccaggagctgcaagacctgcagaaggacctggccgtggtggagcagatcacgcttctcatcagcacgctgcacggcacctaccagaacctgaacatgactgtggctcaagactggtgcctggccctgcagaggctgatgcgggtgaaggaggaagagatccactcggccaacaagtgccgtctcaggctcctgcttcctgggaaacccgacaagtccggccgccccattagcttcatggtggttttcatcacccccaaccccctgagcaagatttcctgggtcaacaggttacatttggccaaaatcggactccgggaggagaaccagccaggctggctatgcccggatgaggacaagaagagcaaagccccattctggtgcccgatcctggcctgctgcatccctgccttctcctcccgggcactcagcctgcagcttggggccctggtccacagtcctgtcaactgtcccctgctgggtttctcagcagtcagcacctcccttccacagggctacctctgggtcgggggcggacaggaaggcgcagggggccaggtggaaatcttttccttgaaccggccctcgccccgcaccgtcaagtccttcccactggcagcccctgtgctctgcatggagtatatcccggagctggaggaggaggcggagagcagagacgagagcccgacagttgctgacccctcggccacggtgcatccaaccatctgcctcgggctccaggatggcagcatcctcctctacagcagtgtggacactggcacccagtgcctggtgagctgcaggagcccaggtccgcagcctgtgctctgcctgcgacacagccccttccacctgctcgctggcctgcaggatgggacccttgctgcttaccctcggaccagcggaggtgtcctgtgggacctggagagccctcccgtgtgcctgactgtggggcccgggcctgtccgcaccctgttgagcctggaggatgccgtgtgggccagctgtgggccccgggtcactgtcctggaagccaccaccctgcagcctcagcaaagctccgaggcgcaccaggacgaggcagtgagcgtgacacacatggtgaaggcgggcagcggcgtctggatggccttctcctccggcacctccatccgcctcttccacactgagaccctggagcatctgcaagagatcaacatcgccaccaggaccaccttcctcctgccagacaggtcattaataaaatgttctccaagagcctgagctttttaaagttgtatatctccagatagatggcttgggccagaagcacttgtgtgtcaccagcctcctgatctgccagggtctgctctgggtgggcactgaccagggtgtcatcgtcctgctgcccgtgcctcggctggaaggcatccccaagatcacagggaaaggcatggtctcactcaatgggcactgtgggcctgtggccttcctggctgtggctaccagcatcctggcccctgacatcctgcggagtgaccaggaggaggctgaggggccccgggctgaggaggacaagccagacgggcaggcacacgagcccatgcccgacagccacgtgggccgagagctgacccgcaagaagggcatcctcttgcagtaccgcctgcgctccaccgcacacctcccgggcccgctgctctccatgcgggagccggcgcctgctgatggcgcagctttggagcacagcgaggaggacggctccatttacgagatggccgacgaccccgacgtctgggtgcgcagccggccctgcgcccgcgacgcccaccgcaaggagatttgctctgtggccatcatctccggcgggcagggctaccgcaactttggcagcgctctgggcagcagtgggaggcaggccccgtgtggggagacggacagcaccctcctcatctggcaggtgcccttgatgctatagcgcctcccctctcccctcagagggcacagctgcaggcctgaccaaggccacgcccggctctcgtgctctaggacctgcacgggacttgtggatgggcctggactctccagaaactacttgggccagagcaaaggaaaacctcttgttttaaaaaaatttttttcagagtgttttggggaggagttttagggcttggggagagggaggacacatctggaggaaatggccttctttttaaaagcaaaaaacacaaaacctcacaactgcctggcaagcccagtatcacttgtttgggccctagcgggactccaaggcagccacacgcccctcctggaagggtgtgtgcgtgtgagtgtgtgcgagtgtgtgggctggtgtgtgaatatctataaataagtatatatggtgtatattatatgtgtataaataaagtctgtacatattggagctctgggagatgctggaataaaagacaagagttacatctgg

SEQ ID NO: 11539 - protein, 596 aa, Homo sapiens
MLKNTPRGHPDRLSLQLALTELETLAEKLNEQKRLADQVAEIQQLTKSVSDRSSLNKLLTSGQRQLLLCETLTETVYGDRGQLIKSKERRVFLLNDMLVCANINFKGQLEISSLVPLGPKYVVKWNTALPQVQVVEVGQDGGTYDKDNVLIQHSGAKKASASGQAQNKVYLGPPRLFQELQDLQKDLAVVEQITLLISTLHGTYQNLNMTVAQDWCLALQRLMRVKEEEIHSANKCRLRLLLPGKPDKSGRPISFMVVFITPNPLSKISWVNRLHLAKIGLREENQPGWLCPDEDKKSKAPFWCPILACCIPAFSSRALSLQLGALVHSPVNCPLLGFSAVSTSLPQGYLWVGGGQEGAGGQVEIFSLNRPSPRTVKSFPLAAPVLCMEYIPELEEEAESRDESPTVADPSATVHPTICLGLQDGSILLYSSVDTGTQCLVSCRSPGPQPVLCLRHSPFHLLAGLQDGTLAAYPRTSGGVLWDLESPPVCLTVGPGPVRTLLSLEDAVWASCGPRVTVLEATTLQPQQSSEAHQDEAVSVTHMVKAGSGVWMAFSSGTSIRLFHTETLEHLQEINIATRTTFLLPDRSLIKCSPRA

SEQ ID NO: 11540 - DNA, 2555 bp, Homo sapiens
ttactgaaagaccttttggaccacccctaaatggagcatcttgatagatggcaaatccagtgtttcttaaacttgtccatgctgcccagagcccactgccttttatcagatgtgagacttcactgccacagtgtcatcccacagtttccttccctggacatttgataaagggaaaatcatttcttgtcctttaaggcagggactattattttttcacttttccacataccccacaacacctaacattgatttactcgtagtaggagtttcatactgttgaactctctaaaggccatttgttccagggcctagctgggcttgtgaaggacaacagagtcatttcctaaggaccccaaaagacagcatgaaggaaaaaataataataaactgctgttcacagtgccttgagtgtaccaccgtactttctgctatgccttgtccattccaatctggacagtctctgtgcccctcctttccactcaagtgttatccagcactcaagttctggctcaaggcccaacatctccgtggggacctcagccatcccagggcattgtgaccccttcctctaagtccccggcacactcgctgattggtaccctctcattcgacgaagcatatgccattgtggcttacttgtcatttctttaggtcttgccttcccaagtagatcatgagccactataagaactagctcccatagtcccagcccctgggcctggtacatggcaatgcttagtgattggtgattgaggataatggtggtaaaggatgtaccagacagtcatctcctgaagagatgccgaacaacctgtccttgttttatgtattttctctttctttcctgtccagttttattcctctcatagtaactgctaaaaaaatgtcagttcctgtcactcttccaccccttttctccctctcccctgcattgtggtctgggccttggtccactagcaactccccttaggtgttgcttaatctgcctcatggccaaagccaatcccattcctgtcccccgctacccaagggactcccagtctgtatgcacaaggcgggatgtgaagtctggatgtgcaagaaacccagctgtaagaaacagcttccctcggcttggcatggtggctcatgcctataatcccagcactttgagaggtcaaagtgggagaatcacttgagcccaggagttcaggactagcctgggcaacatggcaagatcccacctctacaaaaaaagaaaaaattcagagtctcaaatgtcccttcatctccttactctcgacctgtctccctagttctctgccgccttttcctctcccctggatctgacactcaattgtctgcatgcacttttcaactgaaagagactccaatgccatccttctgatgaaatttttgctttggatactactgcagaaaaaatgctatcttgtattctggtccatggtggggaagaccctgtcgtagaacctggcaactcaagtggagggaggggccagaacattgttcttatgctatttacagtgagacaacaggattgatgcagaactttcttttttttttttttttttttgagacagagtttcattcttgttgcccagggctggagtgcagtggcatgatctcagctcactgcaacctccaccccccaggttcaagcagttcttcctcagcctccggagtagctgggattacaggcgtgcgccaccacgcccagctaatttttgtatttttggtagagacggggtttcaccagtgttggccaggctggtctcgaactcctgacctcaggtgatccacccacctcggcctcccaaagtgctgggattacaggcatgaaccaccgtgcccggccgtgatgcgcaactttctaataacatacttttgaaagtgcccagacatacatccctcctctggtaccacagtggccatcagttgccagagaacatgaaattatccagccctcagctctgcagcaggattctgaggagtaaagcaggcctgtaaagtactctaaagtacttcagggaggtaatgccacaaagcgaagaacacctcttggaggcagagcccctcagccctatccaggccagcagtgtccacttgaaatctgaaagcagcctccctcaccaaaccagcaagatggaaaacctccctgggttggcaagtggccctgggaagtacatgccccatctctgtcaggatagcagtggagaggtttcgtgccagtgccagctccacccacccagatggtactcaagactccaagcctgtcaatggggtggaaactttctggcattttctgtcagaagggtgagttagcactgaaccatctcatgtgtcttttcactgagtaacagcccatatccattccatgaaatgagtgactgctttgttgaatcagatagtaacaaacatttatttgtagtctggttgtgtcatatcatggttgaattgcaaacaggttggatagaagagtcagcaaaaatcaacaaaagcattctgtaaaaaacttttctagaattacaataaatggcattgtatattttatttat

SEQ ID NO: 11541 - DNA, 2481 bp, Homo sapiens
  CDS (176)..(1033)
aaatggaaaattagaagataatccttcctctggcagtcccccaaggactactttgttggggaccatattttcacctgtcttcaactttttttcaccagcaaataaaaatggaacgtcaggatcagattctccaggacaggctgtggaagctgaagaaatagtaaaacaacttgatatggaacaggtggatgagatcactaccagtactactacatcaactaatggagcagcttactcaaatcaagcagttcaagtgagaccatcactaaacaatggtttagaagaagcagaagaaacagttaatcgtgatatcccaccccttacagcaccagtaactccagatagtggttattcatcagcccacgcggaggccacctatgaagaagactgggaagtatttgacccctattatttcatcaaacatgtcccgccactgacagaagaacaactaaataggaaacctgctcttccgttgaaaacaagaagcacaccggaattctccctagttttagacttggatgaaacactagtgcattgtagtctaaatgagctagaagatgcagcacttacttttccagtccttttccaagatgtcgtttatcaggtttatgtgagattaagaccatttttcagggaattcctggaacgaatgtctcagatgtatgagatcattctttttactgcttctaagaaggtgtatgcagacaagttactgaacatactagaccctaaaaagcaactggtcaggcaccggcttttccgtgaacattgtgtttgtgtacaaggaaactatataaaggacttaaatattcttggaagagatctttcaaaaactataataattgacaactcaccacaagcctttgcatatcagctttctaatggaatccctatagaaagttggtttatggataaaaatgacaatgaactcctaaaattgattccattcctggagaagcttgtagaactgaatgaagatgttcgaccacacatcagagacagatttcgcttgcatgatttgctgcccccagattaagtacaaagacttgtcaaatcactgaagggggagagaatgcaggacccttttggactaagacaaaaacattgccattactgttgaaattttgcatttttgtaccccgtcctgctttacttatctttggtgcccaataataattaagggttacagaaagagactttatctatctcagatcgaatacatatagtaggtaggctaaaacagaagagtctttagaactagtgcaactccagtgaaattttttatgtacaggacatctgcagtttataaagaattctgtttctgccaccagcagtttgacctgtagtcacacaggattttatgataataacagagatgaaaatggacttttattttctctctgtttggtgctctaagtgggtttgtagccacttttctgttactttatgattctcatttcaacaggaatggccagtaaaagttgttttatttttcctgttaaggtttataacctttttacatttttgacctgtattagattagaatttcattatgcattccttttagttgaggcgcttcatagttttctggagatagtcaatttttagttttttattatacatttgaatggccgttttcctgctttgtctgcctgcacattgtatatttgtttaaaaatattctctacttttagtctatgtaagtttcatttagaaagacatgcatttatattttgtttctgtaatatgctactgtaggtgaaatcttttcaaaaatcaagagactgggtagataagaatatatgaatgactaatatacaaaagatttaaaccattgtgatggcgtatattctcaaatggtaatatcttgcaatggcacacagatttaatggataaaggtatacctcagacttcactgtgctcacaaatctttgaggagaaagtttggtcacctgtttggcttgatttagttactgctgcctttggttttctccaggaatgaagtattcagcacagtgactcagtatttttagttattttgcatgggctggtagtacctctgttatgctctcagttacaatcaatttaaaactgtataacagtcttggtacctaacagtagctatgcataatcctgtggcacagtacactcccaagccaccaatgcagttaatatgctctcatagtggtttttctatgctatatgaaaatagtcttcaagccttggttctctaatgcagctaccacaagaggttgatatttttatagtggcgtgtaatctccttttcgggaggctttttatggaaggtagaatttgtaaaagttcgtatgctttgcctctcaactgcattaacatgccacaggctcagactgtttttgtgtaaaggatgtcaaagaacggcactttttctaaagagaagtttgatattttgtatgcttgttaagaaagtacagtattggaaattaaaggtggacaactgat

SEQ ID NO: 11542 - protein, 286 aa, Homo sapiens [sequence omitted]

SEQ ID NO: 11543 - DNA, 2738 bp, Homo sapiens
  CDS (181)..(2082)
gtaaaagaaaaccctgaagaggaggaggaggaggaagaagaggaagaagaagatgaagaaagtgaagaagaggaggaagaggagggagaaagtgaaggcagtgaaggtgatgaggaagatgaaaaggtgtcagatgagaaggattcagggaagacattagataaaaagccaagtaaagaaatgagctcagattctgaatatgactctgatgatgatcggactaaagaagaaagggcttatgacaaagcaaaacggaggattgagaaacggcgacttgaacatagtaaaaatgtaaacaccgaaaagctaagagcccctattatctgcgtacttgggcatgtggacacagggaagacaaaaattctagataagctccgtcacacacatgtacaagacggtgaagcaggtggtatcacacaacaaattggggccaccaatgttcctcttgaagctattaatgaacagactaagatgattgaaaattttgatagagagaatgtacggattccaggaatgctaattattgatactcctgggcatgaatctttcagtaatctgagaaatagaggaagctctctttgtgacattgccattttagttgttgatattatgcatggtttggagccccagacaattgagtctatcaaccttctcaaatctaaaaaatgtcccttcattgttgcactcaataagattgataggttatatgattggaaaaagagtcctgactctgatgtggctgctactttaaagaagcagaaaaagaatacaaaagatgaatttgaggagcgagcaaaggctattattgtagaatttgcacagcagggtttgaatgctgctttgttttatgagaataaagatccccgcacttttgtgtctttggtacctacctctgcacatactggtgatggcatgggaagtctgatctaccttcttgtagagttaactcagaccatgttgagcaagagacttgcacactgtgaagagctgagagcacaggtgatggaggttaaagctctcccggggatgggcaccactatagatgtcatcttgatcaatgggcgtttgaaggaaggagatacaatcattgttcctggagtagaagggcccattgtaactcagattcgaggcctcctgttacctcctcctatgaaggaattacgagtgaagaaccagtatgaaaagcataaagaagtagaagcagctcagggggtaaagattcttggaaaagacctggagaaaacattggctggtttacccctccttgtggcttataaagaagatgaaatccctgttcttaaagatgaattgatccatgagttaaagcagacactaaatgctatcaaattagaagaaaaaggagtctatgtccaggcatctacgctgggttctttggaagctctactggaatttctgaaaacatcagaagtgccctatgcaggaattaacattggcccagtgcataaaaaagatgttatgaaggcttcagtgatgttggaacatgaccctcagtatgcagtaattttggccttcgatgtgagaattgaacgagatgcacaagaaatggctgatagtttaggagttagaatttttagtgcagaaattatttatcatttatttgatgcctttacaaaatatagacaagactacaagaaacagaaacaagaagaatttaagcacatagcagtatttccctgcaagataaaaatcctccctcagtacatttttaattctcgagatccgatagtgatgggggtgacggtggaagcaggtcaggtgaaacaggggacacccatgtgtgtcccaagcaaaaattttgttgacatcggaatagtaacaagtattgaaataaaccataaacaagtggatgttgcaaaaaaaggacaagaagtttgtgtaaaaatagaacctatccctggtgagtcacccaaaatgtttggaagacattttgaagctacagatattcttgttagtaagatcagccggcagtccattgatgcactcaaagactggttcagagatgaaatgcagaagagtgactggcagcttattgtggagctgaagaaagtatttgaaatcatctaattttttcacatggagcaggaactggagtaaatgcaatactgtgttgtaatatcccaacaaaaatcagacaaaaaatggaacagacgtatttggacactgatggacttaagtatggaaggaagaaaaataggtgtataaaatgttttccatgagaaaccaagaaacttacactggtttgacagtggtcagttacatgtccccacagttccaatgtgcctgttcactcacctctcccttccccaacccttctctacttggctgctgttttaaagtttgcccttccccaaatttggatttttattacagatctaaagctctttcgattttatactgattaaatcagtactgcagtatttgattaaccaagcttctgcagattttgtgattcttgggacttttttgacgtaagaaatacttctttatttatgcatattcttcccacagtgatttttccagcattcttctgccatatgcctttagggcttttataaaatagaaaattaggcattctgatatttctttagctgctttgtgtgaaaccatggtgtaaaagcacagctggctgctttttactgcttgtgtagtcacgagtccattgtaatcatcacaattctaaaccaaactaccaataaagaaaacagacatccaccagt

SEQ ID NO: 11544 - protein, 634 aa, Homo sapiens [sequence omitted]

SEQ ID NO: 11545 - DNA, 2684 bp, Homo sapiens
  CDS (334)..(1074)
aataacctggagccggcggcgtaggttggctctttagggcttcaccccgaagctccaccttcgctcccgtctttctggaaacaccgctttgatctcggcggtgcgggacaggtacctcccggctgctgcgggtgccctggatccagtcggctgcaccaggcgagcgagacccttccctggtggaggctcagagttccggcagggtgcatccggcctgtgtgtggcgcgaggcagggaagccggtacccgggtcctggccccagcgctgacgttttctctcccctttcttctctcttcgcggttgcggcgtcgcagacgctagtgtgagcccccatggcagatacgaccccgagcggcccccaaggggcgggcgctgtgcaattcatgatgaccaataaactggacacggcaatgtggctttctcgcttgttcacagtttactgctctgctctgtttgttctgcctcttcttgggttgcatgaagcagcaagcttttaccaacgtgctttgctggcaaatgctcttaccagtgctctgaggctgcatcaaagattaccacacttccagttaagcagagcattcctggcccaggctttgttagaggacagctgccactacctgttgtattcactcatctttgtaaattcctatccagttacaatgagtatcttcccagtcttgttattctctttgcttcatgctgccacatatacgaaaaaggtccttgacgcaaggggctcaaatagtttacctctgctgagatctgtcttggacaaattaagtgctaatcaacaaaatattctgaaattcattgcttgcaatgaaatattcctgatgcctgcgacagtttttatgctttttagtggtcaaggaagtttgctccaaccttttatatactatagatttcttacccttcgatattcgtctcgaagaaacccatattgtcggaccttatttaatgaactgaggattgttgttgaacacataataatgaaacctgcttgcccactgtttgtgagaagactttgtctccagagcattgcctttataagcagattggcaccaacagttccatagtttaacatctagttaagctacaaatatagtataagcattattagcagctggtacttctgctaggggttgtaaattccaggtgttacactgacctcaatccaatttacataatttacataaatgcatctcggtggaaaaataatcattttcttggcatgttaaatcaagcttaaaaagttttgagaaaattttactgtgctgtgttgctaatggttaaagaagtctgtatctagtgataaatataccagtttttttaaaaagatgctgttgtgcctatatcatgaagtacattaatttctcatgtaaaaaaaatagctctaaaatttgtttcaacctaattggtaacctgagtttatatctggcatgaattcattatggtgatacacatatgtgaattcagtacattttgagacagtattctaccattcagtaattttggttaatgattttaacacttctcagtgtatttaatttcaaattgtttttttaattggttttatgctgctttgttaggacagatgtgttttgaatgtaccattataagaagaattctatgtatcttaaactatgatcttctaaaattttatttccgtaagtacttctgtggccttgagtattttttaaaaggctcaactgtaagcctcttagccagttggataaatatttggggtcacctagccattgaaagcagaaagcagtagtgacacagctttcccttcaaagagccattgagaaacatttctcaaacaggaaatccttcttttactaatgtggacatatagattattcgtattatagtttgtagaactacctagttcagaatcttgactgccagttttcttggtttcttaggcttgaattttcatagacaattgcaacagtttagatgccttttgaaaggaatgtaatgaagattcagcatctgactatatgtgtgtctatcctgaaataataatggagagtatactgtagattacatgtttacccatcaaatctgacttaaaaggttaaatggaaggttttataggtaaggtaattgattgggaatggggtagggggaggagttgtgggggaataatgtgcatttcagtctcaacgcatagataaatttaggggaattggatgcattattcaactttgatttgggttgtaaaatgtgttaaatcctgttcattgaactcccatcaactcttatgaaattcatgctgatcttcattaccgttgcatgattggaaatgtttaaaacattgtacagttttagtatagagaaatgtaatggtttttgtgaccagtttctgtctgcatgtaatttggatttctcaaatacattcattagtaatttatcagtaacattagttttatttttgttcatctccttatctataaaaaggggatattcttaggataaatacatgaaaaattatacttgatagcttaactataatcagctatttttgtatttttgtaatatttgtccactaagctggagaagcagcctcatacagttgattttgtgtatgtggctagtcttattgtcactatgtaagtaatccaatggttttagaaactaaactttctagagcaataaaatgactataatgttaagt

SEQ ID NO: 11546 - protein, 247 aa, Homo sapiens
MADTTPSGPQGAGAVQFMMTNKLDTAMWLSRLFTVYCSALFVLPLLGLHEAASFYQRALLANALTSALRLHQRLPHFQLSRAFLAQALLEDSCHYLLYSLIFVNSYPVTMSIFPVLLFSLLHAATYTKKVLDARGSNSLPLLRSVLDKLSANQQNILKFIACNEIFLMPATVFMLFSGQGSLLQPFIYYRFLTLRYSSRRNPYCRTLFNELRIVVEHIIMKPACPLFVRRLCLQSIAFISRLAPTVP

SEQ ID NO: 11547 - DNA, 2690 bp, Homo sapiens
  CDS (174)..(1700)
tccatggactcttaccgaagggttatccccatctgtgctctatatgtgatttgccagttcattctaataaggagtggagtcaacatatcaatggagcaagtcacagtcgtcgatgccagcttcttcttgaaatctacccagaatggaatcctgacaatgatacaggacacacaatgggtgatccattcatgttgcagcagtctacaaatccagcaccaggaattctgggacctccacctccctcatttcatcttgggggaccagcagttggaccaagaggaaatctgggtgctggaaatggaaacctgcaaggacctagacacatgcagaaaggcagagtggaaactagcagagttgttcacatcatggattttcaacgagggaaaaacttgagataccagctattacagctggtagaaccatttggagtcatttcaaatcatctgattctaaataaaattaatgaggcatttattgaaatggcaaccacagaggatgctcaggccgcagtggattattacacaaccacaccagcgttagtatttggcaagccagtgagagttcatttatcccagaagtataaaagaataaagaaacctgaaggaaagccagatcagaagtttgatcaaaagcaagagcttggacgtgtgatacatctcagcaatttgccgcattctggctattctgatagtgctgttctcaagcttgctgagccttatgggaaaataaagaattacatattgatgaggatgaaaagtcaggcttttattgagatggagacaagagaagatgcaatggcaatggtagaccattgtttgaaaaaagccctttggtttcaggggagatgtgtgaaggttgacctgtctgagaaatataaaaaactggttctgaggatcccaaacagaggcattgatttactgaaaaaagataaatcccgaaaaagatcttactctccagatggcaaagaatctccaagtgataagaaatccaaaactgatggttcccagaagactgagagttcaaccgaaggtaaagaacaagaagagaagtccggtgaagatggtgagaaagacacaaaggatgaccagacagagcaggaacctaatatgcttcttgaatctgaagatgagctacttgtagatgaagaagaagcagcagcactgctagaaagtggcagttcagtgggagacgagaccgatcttgctaatttaggtgatgtggcttctgatgggaaaaaggaaccatcagataaagctgtgaaaaaagatggaagtgcttcagcagcagcaaagaaaaagcttaaaaaggtggacaagatcgaggaacttgatcaagaaaacgaagcagcgttggaaaatggaattaaaaatgaggaaaacacagaaccaggtgctgaatcttctgagaacgctgatgatcccaacaaagatacaagtgaaaacgcagatggtcaaagtgatgagaacaaggacgactatacaatcccagatgagtatagaattggaccatatcagcccaatgttcctgttggtatagactatgtgatacctaaaacagggttttactgtaagctgtgttcactcttttatacaaatgaagaagttgcaaagaatactcattgcagcagccttcctcattatcagaaattaaagaaatttctgaataaattggcagaagaacgcagacagaagaaggaaacttaagatgtgcaaggagatttaatgatttcaaagaaaataatggttctttgtttttaatgttaaccttttttaaatacaatactgatagttagaagaaaactattgtactcttttgttttagtggagaaataatagatgtctgttcatgtgttaagtgttatagcaaaaaaaatacacatatggttaagttaatgaatagtttttgttttatcagaatggcaacagacagaagtactttgtagagattgacttcctaagctacttaagacaacttgcaccactaagaaaaaaatgtagaaccatttggaaaaatgaaatttagtagttccaagtttcaaagaaatgtcaacattttattccattcaataaagaacaaaaccaatagtgtttttattactttcatctgaaacattccatgttttaatctgagccttgcagactttcatttggagtttgaacccgttttggttgcatttcatttttggagaacttaattaacgtgagattggcaattgaaatgcaggtgcagttttctgttaatgtcatgctgttgtttaggtaataagaaatattaagtaattggctttagattttgtaatttttttccctgagttcctgctagatttcgtattctagtagtcaatgtattttcagtgaaatgcaaaaatattcccattatctttgaccagtattaatttttgagatcttactgcttgtcacttgaatcccgtgattgtcatacatctctggtataagcaacatttgatttttgaagtgtgtagaccatctcttcatattttcaagatgtaattttacatttctgcatttttaaaacagtttggccataatcctagatgcacgcttctaattcatgtacctgcacatgtgacctttgtgaacagaaatttgcatgtataatttgtgtttacttgtaactttctggttatatactgcttatatctgtggattcaagttactgaagtgaatacc

SEQ ID NO: 11548 - protein, 509 aa, Homo sapiens
MGDPFMLQQSTNPAPGILGPPPPSFHLGGPAVGPRGNLGAGNGNLQGPRHMQKGRVETSRVVHIMDFQRGKNLRYQLLQLVEPFGVISNHLILNKINEAFIEMATTEDAQAAVDYYTTTPALVFGKPVRVHLSQKYKRIKKPEGKPDQKFDQKQELGRVIHLSNLPHSGYSDSAVLKLAEPYGKIKNYILMRMKSQAFIEMETREDAMAMVDHCLKKALWFQGRCVKVDLSEKYKKLVLRIPNRGIDLLKKDKSRKRSYSPDGKESPSDKKSKTDGSQKTESSTEGKEQEEKSGEDGEKDTKDDQTEQEPNMLLESEDELLVDEEEAAALLESGSSVGDETDLANLGDVASDGKKEPSDKAVKKDGSASAAAKKKLKKVDKIEELDQENEAALENGIKNEENTEPGAESSENADDPNKDTSENADGQSDENKDDYTIPDEYRIGPYQPNVPVGIDYVIPKTGFYCKLCSLFYTNEEVAKNTHCSSLPHYQKLKKFLNKLAEERRQKKET

SEQ ID NO: 11549 - DNA, 2518 bp, Homo sapiens
  CDS (214)..(1536)
agggcctgcggagaccgtccgcctggctcgccgagctcgcccgctgtccgccagcccgcgggagggaggagagaagcgaagcgtttccgcggttggctactcagtgtcttggtctcaagttgcctcattgcggctggcgttcccaatacagacgcatcgtttcttttttaatactccctaagaaagggaataaccttcaagctggcgggagcaatggttcacataaagaaaggcgagctgacccaggaggagaaggagctactggaagtcatcgggaaaggtactgtccaagaagctggaacattattatccagcaagaatgttcgtgtcaactgtttggacgagaatggaatgactcctctaatgcatgcagcatataaaggaaaactcgatatgtgcaaattactactgcgacatggagccgatgtaaattgtcatcagcatgaacatggatacacagccctcatgtttgctgcactttctggtaataaagacatcacatgggtaatgttagaagctggtgctgagacagatgttgtcaactctgtgggaagaacagcagctcagatggcagcctttgtggatcaacatgattgtgtgaccataatcaacaatttctttcctcgagagagactggattattacactaagccccagggactggataaagagccaaaactgcccccaaagttggcaggcccgctgcacaaaattatcaccacaacgaatcttcatcctgtcaagatcgtgatgcttgtaaatgagaatcctctgctgacagaagaagcagccctgaataaatgctacagagtgatggatttgatttgtgagaaatgtatgaagcaaagagacatgaatgaagtattggctatgaagatgcattacataagctgtatctttcagaaatgcattaacttcttaaaagatggagagaataaactggacaccttgatcaaaagcttgttaaaaggccgagcttctgatggctttccagtgtatcaagaaaagatcattagagaaagtatcagaaaatttccttactgtgaagctacactcctccagcagctggttcgaagcattgctcctgttgaaattggttctgatcccactgcattctccgtccttacccaagccatcactggccaggtgggttttgtggatgtggaattttgcactacctgtggagaaaagggagcaagtaaaagatgttcagtttgcaaaatggtaatatattgtgctcaaacctgccagagaacacactggtttactcataagaaaatctgtaagaatctgaaggacatttacgaaaagcaacagttggaggctgccaaagaaaagagacaagaggaaaaccacggcaaacttgatgtcaattctaactgtgttaatgaagagcaaccagaggctgaagtaggtatctctcaaaaggattccaatcctgaagattccggggaaggaaagaaagaatctcttgaaagcgaagctgagttggaaggcttacaggatgctcctgcagggccacaggtgtctgaggagtaaaagccagagcaagtgccagtgtggatggtcctcaccctgcaagaagctggaaaactcctaggaatgcattgtcctcaccttgttatacctgcgtggcaccatggcaggattccacatttcatagaatacaggttttcaagcaaacccctgttgaccatgccctaatttcctattgatttctgttgtataattgaatggatattcctatggaaaattttttgtttcaaaatacaggaaaaacattcctattacctttctgaggctggctttccagcaattgtttcaaaggaaaatagatccccttaaagaaaaaatacaggctttagggaacaaagggacaagcagaacaggtgtggaagagagattttcaggaagggaaaaatttatagctacagagggtagttagaaaaatcataacttatatgtgaataaaatacatataagcagcatttacggtagtggcattctacttattaagatgcaatgaaatgaagaaaggctttatgttcaaggacctttgccatagttcagctaattgtagttttatatagaaatgatcctgaacactctgaacttgacgtagtcctgcggtgatattctatctgcagtatttgtacctccagaatggcagatccctcagcgggaacaaaggcatattgacgattctctcagcgtatgcattaaaaaaggtacttcctgaaacttttgattcaataatgactaaacatactatgtacacaattactgtaaggctaattcacgtgccatacgccacctgaaagcctgagttatcttgctataagcttttcatggagcacttcctttccagaaactgatttgtaactcatttagagaatgtcctggcgtcggtttttagcatatgtggtatttaaacagagctagaatgtgatgtctgaagataatgctgcatttctgggtttcttgtgtggattttaaaataaattgtgcctacaaatat

SEQ ID NO: 11550 - protein, 441 aa, Homo sapiens [sequence omitted]

SEQ ID NO: 11551 - DNA, 1831 bp, Homo sapiens
  CDS (72)..(410)
gcgagtggttaaaagacagttggtgtcggttcgccttctcgggtcggattccgcggtcccaacccttccccatggccgaccctgaggagttgcaggtttcttcgccgcccccgccgcctccctcttctccctcctcttcagacgcctctgcagcatcttccccgggcggcccagtgagtttgggctggccagttccgagcaggagcagcggcccaacggtggaccagctggaggaagtggagctgcagatcggagacgcagccttttcattaaccaaacttcttgaagccacatctgcagtatcagctcaagtggaagaacttgccttcaaatgtacagaaaatgcacgtttccttaaaacgtggcgggacctcttgaaagaaggctatgattctttgaaacctgatgactgatttggcatacttcgttgtttaataatgactgcaataattcatacttcttatgtcatattttgtacatgtaccacacatataggatgacctctgtccagcagttctgtatatactcagaatgaaatttttcttggttttcttggtttttgtgaaagcagaataccgatgctatttttgttgcggaccagtacttgtttgtccttaaatactttatgcctctgaactttcatagaatcctttatgaaagttaacttcatcaatagacggttaatattaatagagccacagtgctaccagtagcaaactaggtagaccattatttgttttgcaacaagatgctaagcatggcagactttgaagttgcgtttcatcttaaggaccaagggaggtaactttaaggttgccagtggtggatccagctccgttaggctaagttgtctacagctaatgattgtgtctttattctatatccccagcacctaaaacagggtcacacaacattcactaaatgtttgttgaataaaagagttaacaaacataattgaaagctttttttcttcctatatttagcatgaagactgtcattgtttctctaggaaatgtatgaatctgaacttttttgacttgaagaaaaacattctttttttacagagatttggactttgatgataggttttaaaaatatatgataaatattttttgtacttgtttgatttttttttaaagactttacttcagaaagggaaagactgtttagaaagaatgcatattttttccctatttatttctgtggttactgcttttgcagtttaacagtgtttgtatttgatatttgtatatgtttgattgctatctttaaagtgccttatcagatttatggctctgtgctattactttttgagctttgcaagttgtgtacataataattctaaagaagttactttgtttgcaatgcatcaaatttaaatgatgtgatttttttcttttccctttcggattcccgacgctgtggttgctgtaaggggtcctccctgcgccacacggccgtcgccatggtgaagctgagcaaagaggccaagcagagactacagcagctcttcaaggggagccagtttgccattcgctggggctttatccctcttgtgatttacctgggatttaagaggggtgcagatcccggaatgcctgaaccaactgttttgagcctactttggggataaaggattatttggtcttctggatttggaggcaatcagcggacagcatggaagatgtgtgctctggctcggataagagatgggacatcattcagtcactagttggatggcacaaggctcttcacagacgcatctgtagcagagtggatcttgtactaacttatgatagaatgtatcagaataaatgtttttaacagtgtt

SEQ ID NO: 11552 - protein, 113 aa, Homo sapiens
MADPEELQVSSPPPPPPSSPSSSDASAASSPGGPVSLGWPVPSRSSGPTVDQLEEVELQIGDAAFSLTKLLEATSAVSAQVEELAFKCTENARFLKTWRDLLKEGYDSLKPDD

SEQ ID NO: 11553 - DNA, 3458 bp, Homo sapiens
  CDS (47)..(2764)
tatatccacttcatctgtcacccagctgggcagccagctcagtgctatgcaaatcaacagctatggttcaggcatggctcctccaagccagggaccccctggccctctgtcagccacatcattgcagactcctccacgacctccacagccgtccattttgcagcctggatctcaagttcttccaccaccacccaccacactcaatggtcctggtgcctcacctttgcctctaccaatgtacagaccagatgggctctctgggcctcctcctccaaatgcccagtaccagcccccacctcttccaggccagaccttgggtgctggatatcctccgcagcaggccaactctggtccccagatggcaggcgcacaactgtcttacccaggaggcttccctggaggtcctgcacagatggctggtccgccacagccccagaagaagctggatcctgactctatccctagcccaatccaggtgattgagaatgatagagccagcagaggaggacaagtttatgccaccaacaccagaggccagatccctcccctggtcactacagattgcatgatacaagaccaaggaaatgccagtcctcgattcatccgttgtacaacatactgttttccatgcacgtcagatatggctaagcaagctcagattccattagctgctgtcatcaagccctttgccaccattccttcaaatgagagtcccctttacttggtaaatcacggcgagagtggaccagtcagatgcaacaggtgcaaggcctacatgtgcccatttatgcagttcatcgaaggaggaaggagatatcagtgtggattttgcaactgtgtgaatgatgttccaccattctatttccaacatctggaccacattggaagaagactggaccactatgagaaaccagagttatctctaggatcttatgaatatgttgccactttggattattgcagaaagagtaagcctcccaacccaccagcctttatcttcatgattgatgtttcatatagtaacataaagaatggacttgtcaagctcatatgtgaagaactgaagaccatgctggaaaaaattccaaaggaagagcaagaagagacgtctgcaattcgagtgggttttatcacatataacaaagttctccatttctttaatgtgaagagtaatctggcccagcctcagatgatggtggtgactgatgttggagaagtctttgttcctttgttggatggtttccttgtcaactatcaagaatcccaatctgtgattcataatttgttggaccagattccagacatgtttgcagactctaatgaaaatgagactgtctttgctcctgtcatccaggctggcatggaagcactaaaggcagcagactgtcctgggaagctgttcatcttccattcttccttgccaactgctgaagcaccagggaagctcaaaaacagagatgacaaaaaactggttaatacagacaaagagaagatacttttccagccccaaacaaatgtctatgactcattggccaaggactgcgtggctcacggctgctctgtgacactcttcctctttcctagtcagtatgtggacgtggcctcgctggggctggttcctcagctcactggaggaaccctttacaaatacaacaatttccagatgcacttggatagacaacaatttttgaacgacctcagaaatgatattgaaaagaaaataggctttgatgctattatgagggttcgtaccagcacaggtttcagagccactgatttctttggtggaatcttgatgaacaacaccaccgatgtagaaatggctgccatcgattgtgacaaggcagtgaccgtggagttcaagcacgatgacaaactcagtgaagacagtggagccttaatccagtgtgctgtgctttacacgacaatcagtggtcaaagaagacttcggattcacaatcttggcttaaactgcagctctcagctagctgatctttataagagctgtgagacagatgctcttatcaacttctttgccaagtcagcttttaaagcagttctccaccagcctttgaaggtcatccgggaaattctagttaatcagactgcccatatgttggcatgttaccggaagaattgtgcaagtccttctgcagcaagccagcttattctaccagattccatgaaagtattgccagtgtacatgaattgcttgttgaaaaactgtgtactactcagcagaccagagatctcaactgatgaacgagcataccagagacagctggtcatgaccatgggtgtggctgactctcagcttttcttctacccacaacttctgcccatacacacgttagatgtcaagagtacaatgttacctgctgccgttcgttgctctgagtcccgtctttcagaagaaggaatattcttactggctaatggtctacacatgttcctgtggttgggagtaagcagcccaccagaactgatccaaggaatatttaatgtgccatcttttgcacatatcaacacagatatgacattgctgcctgaagtgggaaacccatactctcaacaactcagaatgataatgggtattatccaacaaaagaggccatattcaataaagctcacaattgtaaagcagcgagaacaaccagaaatggttttccgacagttcctggtagaagacaaaggactttacggaggctcttcttatgtggatttcctttgttgtgttcacaaggagatctgtcagctgcttaattaattgaaacttctctgtcattgatgttgcatttccaaggagataatctccttcttggtgcctaattttctagatgataataggctagttttgatttcttgctcattttcagaataactttccaggaagagatggcatttagaacttcagctttggtgctcaggtataaagccaattaaggtacaattgtaccataaagggaacaatctgtttctgattgcacagtttctaatttttaaaactgatgtggtttgcatttcataaaaggcaaagtttacagaaccataaacattctcaattttctttatgctagacatataaattatttttcaaactgtatagatttggggtaaaaagttgtctcagttcctctcccaattgcaatgagaaaaaaaagcttaatttttacattatacttaattttctaaaaccatgtaactccattgaacacatttttcaacttaaggtctgcatagcagacttttaataaccttgggatttatctggtagaacaatatgtgttctacatttttttcataattatatattgtgtatgttaaaactattttccagttgttttgtctgtaaaactgtctttatcaatatgcttaatggttctttgtacaattttgaaagtttctacctgtatataatggatgttaaccagtatcaataaatcacttcgtataatctt

SEQ ID NO: 11554 - protein, 906 aa, Homo sapiens [sequence omitted]

SEQ ID NO: 11555 - DNA, 2428 bp, Homo sapiens
  CDS (199)..(2013)
ttgaaaccagttgacaacacttactacaaagaggcagaaaaagaaaatcttgtggaacaatccattccgtcaaatgcttgttcttccctggaagttgaggcagccatatcaagaaaaactccagcccagcctcagagaagatctcttaggctttctgctcagaaggatttggaacagaaagaaaagcatcatgtaaaaatgaaagccaagagatgtgccactcctgtaatcatcgatgaaattctaccctctaagaaaatgaaagtttctaacaacaaaaagaagccagaggaagaaggcagtgctcatcaagatactgctgaaaagaatgcatcttccccagagaaagccaagggtagacatactgtgccttgtatgccacctgcaaagcagaagtttctaaaaagtactgaggagcaagagctggagaagagtatgaaaatgcagcaagaggtggtggagatgcggaaaaagaatgaagaattcaagaaacttgctctggctggaatagggcaacctgtgaagaaatcagtgagccaggtcaccaaatcagttgacttccacttccgcacagatgagcgaatcaaacaacatcctaagaaccaggaggaatataaggaagtgaactttacatctgaactacgaaagcatccttcatctcctgcccgagtgactaagggatgtaccattgttaagcctttcaacctgtcccaaggaaagaaaagaacatttgatgaaacagtttctacatatgtgccccttgcacagcaagttgaagacttccataaacgaacccctaacagatatcatttgaggagcaagaaggatgatattaacctgttaccctccaaatcttctgtgaccaagatttgcagagacccacagactcctgtactgcaaaccaaacaccgtgcacgggctgtgacctgcaaaagtacagcagagctggaggctgaggagctcgagaaattgcaacaatacaaattcaaagcacgtgaacttgatcccagaatacttgaaggtgggcccatcttgcccaagaaaccacctgtgaaaccacccaccgagcctattggctttgatttggaaattgagaaaagaatccaggagcgagaatcaaagaagaaaacagaggatgaacactttgaatttcattccagaccttgccctactaagattttggaagatgttgtgggtgttcctgaaaagaaggtacttccaatcaccgtccccaagtcaccagcctttgcattgaagaacagaattcgaatgcccaccaaagaagatgaggaagaggacgaaccggtagtgataaaagctcaacctgtgccacattatggggtgccttttaagccccaaatcccagaggcaagaactgtggaaatatgccctttctcctttgattctcgagacaaagaacgtcagttacagaaggagaagaaaataaaagaactgcagaaaggggaggtgcccaagttcaaggcacttcccttgcctcattttgacaccattaacctgccagagaagaaggtaaagaatgtgacccagattgaacctttctgcttggagactgacagaagaggtgctctgaaggcacagacttggaagcaccagctggaagaagaactgagacagcagaaagaagcagcttgtttcaaggctcgtccaaacaccgtcatctctcaggagccctttgttcccaagaaagagaagaaatcagttgctgagggcctttctggttctctagttcaggaaccttttcagctggctactgagaagagagccaaagagcggcaggagctggagaagagaatggctgaggtagaagcccagcagttggaggaggccagactacaggaggaagagcagaaaaaagaggagctggccaggctacggagagaactggtgcataaggcaaatccaatacgcaagtaccagggtctggagataaagtcaagtgaccagcctctgactgtgcctgtatctcccaaattctccactcgattccactgctaaactcagctgtgagctgcggataccgcccggcaatgggacctgctcttaacctcaaacctaggaccgtcttgctttgtcattgggcatggagagaacccatttctccagacttttacctacccgtgcctgagaaagcatacttgacaactgtggactccagttttgttgagaattgttttcttacattactaaggctaataatgagatgtaactcatgaatgtctcgattagactccatgtagttacttcctttaaaccatcagccggccttttatatgggtcttcactctgactagaatttagtctctgtgtcagcacagtgtaatctctattgctattgccccttacgactctcaccctctccccactttttttaaaaattttaaccagaaaataaagatagttaaatcct

SEQ ID NO: 11556 - protein, 605 aa, Homo sapiens
MKAKRCATPVIIDEILPSKKMKVSNNKKKPEEEGSAHQDTAEKNASSPEKAKGRHTVPCMPPAKQKFLKSTEEQELEKSMKMQQEVVEMRKKNEEFKKLALAGIGQPVKKSVSQVTKSVDFHFRTDERIKQHPKNQEEYKEVNFTSELRKHPSSPARVTKGCTIVKPFNLSQGKKRTFDETVSTYVPLAQQVEDFHKRTPNRYHLRSKKDDINLLPSKSSVTKICRDPQTPVLQTKHRARAVTCKSTAELEAEELEKLQQYKFKARELDPRILEGGPILPKKPPVKPPTEPIGFDLEIEKRIQERESKKKTEDEHFEFHSRPCPTKILEDVVGVPEKKVLPITVPKSPAFALKNRIRMPTKEDEEEDEPVVIKAQPVPHYGVPFKPQIPEARTVEICPFSFDSRDKERQLQKEKKIKELQKGEVPKFKALPLPHFDTINLPEKKVKNVTQIEPFCLETDRRGALKAQTWKHQLEEELRQQKEAACFKARPNTVISQEPFVPKKEKKSVAEGLSGSLVQEPFQLATEKRAKERQELEKRMAEVEAQQLEEARLQEEEQKKEELARLRRELVHKANPIRKYQGLEIKSSDQPLTVPVSPKFSTRFHC

SEQ ID NO: 11557 - DNA, 2976 bp, Homo sapiens
  CDS (75)..(2636)
agcggctaggtggtgcacgggaaacgcgggcgtaggtgaccggcggctttctcagttttggtggagacgggcgcatgtgggcgctttgctcgctgctgcggtccgcggccggacgcaccatgtcgcagggacgcaccatatcgcaggcacccgcccgccgcgagcggccgcgcaaggacccgctgcggcacctgcgcacgcgagagaagcgcggaccgtcggggtgctccggcggcccaaacaccgtgtacctgcaggtggtggcagcgggtagccgggactcgggcgccgcgctctacgtcttctccgagttcaaccggtatctcttcaactgtggagaaggcgttcagagactcatgcaggagcacaagttaaaggttgctcgcctggacaacatattcctgacacgaatgcactggtctaatgttgggggcttaagtggaatgattcttactttaaaggaaaccgggcttccaaagtgtgtactttctggacctccacaactggaaaaatacctcgaagcaatcaaaatattttctggtccattgaaaggaatagaactggctatgcggccccactctgccccagaatacgaggatgaaaccatgacagtttaccagatccccatacacagtgaacagaggaggggaaagcaccaaccatggcagagtccagaaaggcctctcagcaggctcagtccagagcgatcttcagactccgagtcgaatgaaaatgagccacaccttccacatggtgttagccagagaagaggggtcagggactcttccctggtcgtagctttcatctgtaagcttcacttaaagagaggaaacttcttggtgctcaaagcaaaggagatgggcctcccagttgggacagctgccatcgctcccatcattgctgctgtcaaggacgggaaaagcatcactcatgaaggaagagagattttggctgaagagctgtgtactcctccagatcctggtgctgcttttgtggtggtagaatgtccagatgaaagcttcattcaacccatctgtgagaatgccacctttcagaggtaccaaggaaaggcagatgcccccgtggccttggtggttcacatggccccagcatctgtgcttgtggacagcaggtaccagcagtggatggagaggtttgggcctgacacccagcacttggtcctgaatgagaactgtgcctcagttcacaaccttcgcagccacaagattcaaacccagctcaacctcatccacccggacatcttccccctgctcaccagtttccgctgtaaggagggccccaccctcagtgtgcccatggttcagggtgaatgcctcctcaagtaccagctccgtcccaggagggagtggcagagggatgccattattacttgcaatcctgaggaattcatagttgaggcgctgcagcttcccaacttccagcagagcgtgcaggagtacaggaggagtgcgcaggacggcccagccccagcagagaaaagaagtcagtacccagaaatcatcttccttggaacagggtctgccatcccgatgaagattcgaaatgtcagtgccacacttgtcaacataagccccgacacgtctctgctactggactgtggtgagggcacatttgggcagctgtgccgtcattacggagaccaggtggacagggtcctgggcaccctggctgctgtgtttgtgtcccacctgcacgcagatcaccacacgggcttgccaagtatcttgctgcagagagaacgcgccttggcatctttgggaaagccgcttcaccctttgctggtggttgcccccaaccagctcaaagcctggctccagcagtactacaaccagtgccaggaggtcctgcaccacatcagtatgattcctgccaaatgccttcaggaaggggctgagatctccagtcctgcagtggaaagattgatcagttcgctgttgcgaacatgtgatttggaagagtttcagacctgtctggtgcggcactgcaagcatgcgtttggctgtgcgctggtgcacacctctggctggaaagtggtctattccggggacaccatgccctgcgaggctctggtccggatggggaaagatgccaccctcctgatacatgaagccaccctggaagatggtttggaagaggaagcagtggaaaagacacacagcacaacgtcccaagccatcagcgtggggatgcggatgaacgcggagttcattatgctgaaccacttcagccagcgctatgccaaggtccccctcttcagccccaacttcagcgagaaagtgggagttgcctttgaccacatgaaggtctgccttggagactttccaacaatgcccaagctgattcccccactgaaagccctgtttgctggcgacatcgaggagatggaggagcgcagggagaagcgggagctgcggcaggtgcgggcggccctcctgtccagggagctggcaggcggcctggaggatgggagcctcagcagaagcgggcccacacagaggagccacaggccaagaaggtcagagcccagtgaagatctgggagaccctgaactcagaaggctgtgtgtcttctgccccacgcacgcacccgtatctgccctccttgctggtagaagctgaagagcacggtcccccaggaggcagctcaggataggtggtatggagctgtgccgaggcttggggtcccacataagcactagtctatagatgcctcttaggactggtgcctggcacagctgcgggccaggaggctgccacacggaagcaagcagatgaactaatttcatttcaaggcagtttttaaagaagtcatggaaacagacggcggcacctttcctctaatccagcaaaatgattccctgcacaccagagacaagcagagtaacaggatcagtgggtctaagtgtccgagacttaacgaaaatagtatttcagctgcaataaagattgagtttgc

SEQ ID NO: 11558 - protein, 854 aa, Homo sapiens
MWALCSLLRSAAGRTMSQGRTISQAPARRERPRKDPLRHLRTREKRGPSGCSGGPNTVYLQVVAAGSRDSGAALYVFSEFNRYLFNCGEGVQRLMQEHKLKVARLDNIFLTRMHWSNVGGLSGMILTLKETGLPKCVLSGPPQLEKYLEAIKIFSGPLKGIELAMRPHSAPEYEDETMTVYQIPIHSEQRRGKHQPWQSPERPLSRLSPERSSDSESNENEPHLPHGVSQRRGVRDSSLVVAFICKLHLKRGNFLVLKAKEMGLPVGTAAIAPIIAAVKDGKSITHEGREILAEELCTPPDPGAAFVVVECPDESFIQPICENATFQRYQGKADAPVALVVHMAPASVLVDSRYQQWMERFGPDTQHLVLNENCASVHNLRSHKIQTQLNLIHPDIFPLLTSFRCKEGPTLSVPMVQGECLLKYQLRPRREWQRDAIITCNPEEFIVEALQLPNFQQSVQEYRRSAQDGPAPAEKRSQYPEIIFLGTGSAIPMKIRNVSATLVNISPDTSLLLDCGEGTFGQLCRHYGDQVDRVLGTLAAVFVSHLHADHHTGLPSILLQRERALASLGKPLHPLLVVAPNQLKAWLQQYYNQCQEVLHHISMIPAKCLQEGAEISSPAVERLISSLLRTCDLEEFQTCLVRHCKHAFGCALVHTSGWKVVYSGDTMPCEALVRMGKDATLLIHEATLEDGLEEEAVEKTHSTTSQAISVGMRMNAEFIMLNHFSQRYAKVPLFSPNFSEKVGVAFDHMKVCLGDFPTMPKLIPPLKALFAGDIEEMEERREKRELRQVRAALLSRELAGGLEDGSLSRSGPTQRSHRPRRSEPSEDLGDPELRRLCVFCPTHAPVSALLAGRS

SEQ ID NO: 11559 - DNA, 1389 bp, Homo sapiens
atctcccaggcgaccggctccgcagcaagatggcggacgagaaggacagggaagagagattggaacaattatcaggtcattaggatgctgtcctacggaaggagagctgcatgatctgattgcagaggtagaggaagaagaacctactggatacattcgattcgaaaaatttcttccggtgatgacagaaatactactagaaagaaaatacagaccaattccagaagatgtccttcttcgagcttttgaggttttagattcagctaaacgtgggtttcttactaaggacgagctgatcaagtatatgactgaagaagatggagtttcgctccgtcgcccaggctgaagtgcagtggcgtgatcttggctcgttgcaacctccacctcccgggttcaagagattctcctgcctcagcctcctgagcagctgggatgacaggcacacaccaccacgcctggctaatttctgtatttttagtagagacggggtttcaccatggtctggtgacctcctggtctcgaactcctgacctcaagtgatcctcccgcctcagcctcccaaagttctgggattacaggcatgagccaccgcacccggctgcttccttaactcttgatctcctctctgtatcttgctttgtctagctgttctcttctctccatattcatccaaacatttgcttagaagtacccagaagcatggcgttgaatgtggtacaccttgaacgaagggtgaagaaacgaggcagagtgacttagtagcaagtgacagcacacagtttaaattttaatattagcccatttacaaacaacagcttatataatagtcattcacatacctcaacactcaccatcccctccccactttttttctggagacagggtttcactgtcaccccagctggaatgcaggtggcatgatcacagctcactgtagcatcgacctcctggactcaaggggtcctcgcgcctcagcctcctgagtagctgggaccacaggtgcatgccaccacgcccagctaatgtttttttttattttttgtagagacagggtctggctatgttgcttaggctggtctcaaactcctgggttcaagcgatcctgccacctcagcctcccaaagtgttaggattacagatgtgagccactgtgcccagccaacattcaccccattcaagtgtgcaattcaatggattctagtatcttcacagtgctgtgcaactatcactcctatctacttacaaagcatttccatcatcttaaaaagaatccccatgtccaatagcagttccccttcccccaccgtcatcctcgggcaaccgctaatcttcctgtgtgtctgtggatttgcctcttcagggcatttcacataaacacaatcatacaat

SEQ ID NO: 11560 - DNA, 2372 bp, Homo sapiens
cgataatgactttgcacgattcactttgggatctcaaagtgcttccaaagcattcagatttacaaacaattcacaagacaggtcatctttgtaatacccatacttacaacgaattaacaagaggagtgacttaagattctccaggaacacagtggcagctattgatgatctgttttctatctgtttgatagagcatcatgagaaatcacaaaatacaatgctatttttctgatgtgtgctaataaagtcaaagaaagcaaatacatcttgacacttttgtccattttcattaaaaaaaaaaaaaagttcagggtgtttggaattttacacctcagcacaccttactggtatcaatggataaagcgggtaattgacagatccacccaaatgccactgcagtcagaagcagatctggacacacccttgtttacagtttcatattgggttgctatagttcccgtgctaaatcaccagctttcaggaacatgactgctcctggcagtggaaggtgctgaaacagaaattttaattaaaaactttatcaagtactcttcacagtgctgcttggcaccatagaaaatcagtacaatatatcgagccctactttggaggagctggatttctgagggagctgatccagttctaagtgtcttctcgaattaggagatagatgatctttgatggggatctcctccgtcaccacaggccagtcacagaaccaactagccacgtgctgccagacctcagtgggcccaagcaggagcaatctcttctatcccccatctcccccaggaccatcccccccattgtcaatgtcatccagggctcttctggtagtgagtgacttttctgcacatgtttagggcttgggggagctagaacacaggaaacatgaatgcaaaaggcatggaaaacactgttttgctttgggttagtaaaatgtgggcaggacaaagattactattggtcggagctttgccaagtgagatagaatcaactgtcaccccattcctttcccagaaggtcttatggtattaaggatacatccagtattttcccacagatttttattcaggcgatgtttcataaattacatatatgaaaacattcattattacatttccttgtgtgtttcaaacagacattggcaccttcctattgagttaattctctgcatcttttgcagcagcagcccgcaaggagattcccagagatggctcccctaacacacagtcctgtgattttacagttctatgacttacagttgatgattcacaagattcaggattctacaagactcaagggggaactaaactttcttacgattgtacatgatcagttatagggctgtaatcattaattgttggcttcaaatgtggacacacacacacacacatcatgccaaggagggaatggggtgtttcaagtcaggcagcgatgattctggaaggttggaaatgtaaggttagaagcttggctggtcttagtaaacttgttcccttgctcccaccaagaagaggtaccaaatgtgagacctgagatctcctccaatatctgtcctctgcagttccgggaaactaatcatgaagtacacatgcagcagctcctccacttcctttcctccgaggtcctcctttccattctcccacctagatactgacacaccgccacggtttccacattggaagggcagaacactgtgcagtatcgtgcacacttgctgggttaggaatagagctgccctagggtcaccttcatgcaagtattgacagctacaaattaaagtccttagagcagttgacacagatactacgttctagaagagaattaaatttaaacgtcaagtttaaagggatcataattctgcaggtatctttctctgagtgactgaatgtgactattgcattagggtaaatgaattaagacgtgcaagtgggatttactgtatgttagaaaggagttttgcagccaagactgccttgaataaaatgtgtttgcactgaaaaaaaattttaaattacttggtctctggttgctgtaaaggtcatccaagatggatgttctgtttatattgtatagtatttcatatgaaataattacagttcatgaaatgtcttccctaatgttactgatttataacagcacatttgtaacatggtttttatcgtgtcagtgtaccatactgtaaatgatgattacttgtcatgcttagtataataacttaaaagaaaaaaaaggacagggatttttgtaagtctatatttgaaagtccctccctatggtgatactgtgttcatgttgtttatgtagtgttgtgtgaaatatccattttggattgtgttactttttaagatattaaataacatttggtt

SEQ ID NO: 11561 - DNA, 2839 bp, Homo sapiens
gtagataatgcataagaagcaccaagtcaggctcagatgcaactaaaacacatctttgagccttttctttttcccttctcccctttctaagcaaaaaccttcctaggatggcatcttttgctctaactgggagacagtcataattggttgtagtcaattctactaagcagtgttggggtggttggaaagtctcttttttgtaatttgtttttgcaaatcattgtgaggccactttttctttctttctttctttctttctttctttctttcgttctttcgttctttcgttctttctttctttctttctttctctttctttcttttgctttccttctttcatctcttttttgtaatttgttgttgcaaatcattgtgaggccacttttctttccccttccttccttcctttttttctgtttttttttttttttttcccagagtcttgctctgtcgcccaggttggagtgcagtggcacgatctcggctcactgcaccctctgcctcttgggttcaagcgattctcctgcctcagcctcccaagtagctgggattacaggcatacaccaccacgccccactaattttttgtatttttggtagggcggggtttcaccatgatggccaggttggttttgaactcctgacctcaagtaatctgcccacctcggcctcccaaagtgccaggattacaggagtgagccactgcgcctggcccacttttctttctttccttcttattttgttatgctggcagccatttgcccctgcatggtatgggatcaaagaggacagcctttcctccctcaccttctccaaatctaggtgaaatcacagagtacaaaacgtgagaatgctgaatgtgtaaagttgcagagggatccctaatttgaagactttgacacagaactaacttcttttgacttaaatgaatttaaaatgagccaaaggaccctgaaaagaagacatgttgatttcccactcctagatgctaaagagacttggcaccagctttgttcaaactgtaaaaatagcaatttgcccctactcgctcagagtgggacagtagtgaacagagctgggattccatgcgacagcttgaatgctgaccttcagacatgagacatagggatttggaggccccttagaatgggtagatggtgttatgttccctttctggcatagcattcacttggtgctttggagattaggtgagggccctataggtagttggcctgttggcagaatttatttaggaacagcccttttgaaagtgtcccagtaacaacgcacccagctgcagcaaggaggtggggaaggagggcaccccaaaggacagcgccttcttctcttccacccatgcacggccttgggtgatggaggcgggttccctgtggctgcgtggatcccataggatcaagcccttctttgcatgaagcagtgttgtgactcttctctctccccttcctctgcacttcctttctgtaatccctactgttcttcttagtcccagcttctgcccagggaggcttctacccagacttcttttgcaatttgtccctgggaagagggggtctcccagtgcccccagcttcatcccagcagaaccagcaggatcctcctggtctctcactggccttcctccacacttggtttctatcctcaggggtagaagctcagagctttttatggcccaggagaaaatgtagaccctgagaaacctgtccctgcagaaaggttcccttgggccatgctttgggccctctgctctttatatgtttattctattctccatttttccaccccgtccttaccctaggcctaaacacaggtacagatatgtgcatgctcagggcagctcctaggcctggactgagctctcaggggggaattagataaatattccaacatcctcatgcctggcccatttagtttcatcctttagttacccaggccagtagctttgggttatcccttcctatagctccaaacccagcacttggagcagcaaaatagggcactgacaggagatgaaactctctcctatctcagaatttgccaacttctgggctgggctcctaggaggtagttttcttgaaggggactgcatcctagttgacctgaattttccagaccaggagggactgctgtgctctcccttctcgccatcatactgtttggctagattcattcagcagtagaagctgtttgatctgttgaccccagcatactgctgtttcttccccagcttcattgtgtcacagtagcttcctttgggaggatgatgtgatagaacactcagagagagggagggagaagagagatagtgggtatgcttctctagctccccatcttccaggtccacctcttgacttcctgttcccctaaacctgagcacatcacgccaggcctctttgctgccaggacagcatcagctcactcctcagcaataatctagggtatgtgggaaggtcagggctgtggtaaggaatagaatcaaagaggggagtgatacggggtgggggcacttggccgcctgctaaacttggacattaattttatatcatgacccccttttaagccagtgagctgggcttcagtttttcccaggccatgcacatttaatttatttcagagaaactctaattgtattttcactgcagtatcttgtattttttatttgtgatttaagaaatgtgaagagaaaatacacagacacaataatggctaacattgtttctttcattccttgttctagagctaaccactctaaaattgtttggtaatgtcacttagtgtaattaattgtaacatattcttttaaataaattgatttattgatc

SEQ ID NO: 11562 - DNA, 2229 bp, Homo sapiens
  CDS (44)..(2011)
tttcacctcagcaaggccaggggatctgcacgttgtgttagacatggctaaagtagctgataccatcctgttcctccttgatccactagaaggctgggacagcaccggtgattactgtctttcctgcctctttgctcagggccttccgacctatacactagctgtccaggggatttctggcctcccactgaagaaacaaatagataccaggaagaagctaagtaaagcagtggagaagcgctttccgcatgacaaactcctcttgttagacactcaacaggaggcagggatgctgcttaggcagttggctaaccagaagcaacagcatcttgcttttcgagatcggcgggcctacctatttgcccatgctgttgattttgttcctagtgaagagaataacttggtgggcaccttgaaaatttcaggctatgttcgagggcagactctgaatgtcaataggttgctgcatatcgttggatatggtgatttccagatgaaacagatagatgcccccggagaccctttccctttaaatcctagaggaattaaaccccaaaaggacccagacatggcaatggagatttgtgctacggatgctgtagatgatatggaagaaggtcttaaagtcctaatgaaggcagacccttgtagacaggaatccttgcaagcagaggttatcccagatccaatggagggagagcaaacctggcccactgaggaggagctgagcgaggcaaaggatttcttgaaggaaagttctaaggtggtaaagaaggtccccaaaggaacatccagttaccaagctgaatggattttggatggtggcagccaaagtggtggggaaggagatgaatatgaatatgatgatatggaacatgaggattttatggaggaggaatctcaggatgagagtagtgaagaagaggaagaatatgaaactatgactattggggagtctgtgcatgatgatctgtatgataagaaagtagatgaagaagctgaggcaaaaatgttggagaaatataaacaagaaagactggaagagatgtttccagatgaagtggacacgccccgtgatgtggctgctcgaattcgatttcagaaatacagaggccttaagagcttccggacatctccatgggatcctaaggaaaaccttcctcaagattatgctcgaatatttcagtttcagaactttactaacactaggaaaagcatctttaaagaggttgaagaaaaagaggttgaaggagctgaggttggctggtatgtcacacttcatgtctctgaagtccccgtctcagtggtcgagtgcttcaggcaaggaacacccttgattgcattttctttactacctcatgaacagaagatgtcagtattgaatatggtggtgaggcgtgaccctggcaacactgaacctgtgaaagccaaggaggagctcatatttcactgtggattcaggcgcttccgagcctcacctttattctctcagcacactgcagcggacaaacataaattgcagagattcctgactgctgacatggccctggtggcgacagtctatgcgccaatcacttttcctcctgcatctgtgctgcttttcaagcagaaaagcaatggaatgcacagcctcattgctacaggccatcttatgtcagtagatccagacagaatggtcatcaagagagttgttctgagtggtcatcctttcaaaatttttactaagatggcagtagtacgttacatgttcttcaacagagaggatgtgctgtggtttaaaccagtggaactgagaacgaagtggggccggagaggacatatcaaggaacctttaggtacccatggccacatgaaatgcagctttgatgggaagctaaaatctcaagacacagtactgatgaacctgtataaacgagtcttccccaaatggacttatgatccatatgtaccagaaccagtaccctggctgaaaagtgagatttcttcaacagtgcctcaagggggcatggagtaatggattcaaagagattctgtcctaccggtgccagtcagtactccagggatgggaggcacaagttgtgattgggcaaagtttattttctatgtcagcctgtcagtccactgccccattttgcaagacttttttttagccttgacaaaatgtctcagttaagtataaaagtttttccactacttagtccaaaaaaaactattaaatcttaatgaaat

SEQ ID NO: 11563 - protein, 656 aa, Homo sapiens
MAKVADTILFLLDPLEGWDSTGDYCLSCLFAQGLPTYTLAVQGISGLPLKKQIDTRKKLSKAVEKRFPHDKLLLLDTQQEAGMLLRQLANQKQQHLAFRDRRAYLFAHAVDFVPSEENNLVGTLKISGYVRGQTLNVNRLLHIVGYGDFQMKQIDAPGDPFPLNPRGIKPQKDPDMAMEICATDAVDDMEEGLKVLMKADPCRQESLQAEVIPDPMEGEQTWPTEEELSEAKDFLKESSKVVKKVPKGTSSYQAEWILDGGSQSGGEGDEYEYDDMEHEDFMEEESQDESSEEEEEYETMTIGESVHDDLYDKKVDEEAEAKMLEKYKQERLEEMFPDEVDTPRDVAARIRFQKYRGLKSFRTSPWDPKENLPQDYARIFQFQNFTNTRKSIFKEVEEKEVEGAEVGWYVTLHVSEVPVSVVECFRQGTPLIAFSLLPHEQKMSVLNMVVRRDPGNTEPVKAKEELIFHCGFRRFRASPLFSQHTAADKHKLQRFLTADMALVATVYAPITFPPASVLLFKQKSNGMHSLIATGHLMSVDPDRMVIKRVVLSGHPFKIFTKMAVVRYMFFNREDVLWFKPVELRTKWGRRGHIKEPLGTHGHMKCSFDGKLKSQDTVLMNLYKRVFPKWTYDPYVPEPVPWLKSEISSTVPQGGME

SEQ ID NO: 11564 - DNA, 2396 bp, Homo sapiens
  CDS (106)..(888)
aaatccttccttccccggggtagaagtccagggtgagaaattggttccgaactcaaaggaacccagtgccgggccacagccgggtcacgtggccggcggccccccatgacgtgctggctgcggggcgtcacggcgacgttcgggcgacctgccgagtggccaggctacctcagtcacctgtgtggtcgcagtgctgccatggacctgggacccatgcgcaagagttaccgcggggaccgagaggcatttgaggagactcatctgacctcccttgacccagtgaaacagtttgctgcctggtttgaggaggctgttcagtgtcctgacataggggaagccaatgccatgtgtctggctacctgcaccagagatggaaaaccctctgctcgcatgttgctgctgaagggcttcgggaaagatggcttccgcttcttcactaacttcgagagtcgaaaaggaaaagagctggactctaatccctttgcttcccttgtcttctactgggagccacttaaccgtcaggtgcgtgtggaaggccctgtgaagaaactgcctgaggaggaggctgagtgctacttccactcccgccccaagagcagccagattggggctgtggtcagccaccagagttctgtgatccctgatcgggagtatctgagaaagaaaaatgaggaactggaacagctctaccaggatcaagaggtgcccaagccaaaatcctggggtggctatgtcctgtaccctcaggtgatggagttctggcaaggtcaaaccaaccgcctgcatgaccggatagtctttcggcggggcctacccacaggagattcccctttggggcccatgacccaccgcggggaggaagactggctctatgagagacttgcaccttaactctgggacctgctggcccagagtggagctagggctaggtgtcaagagagggtgtgggattgggacccaggcccttctttctaaactcaacccatttccctccctaccccttatcttcaggactcttcagagctaatcctctaagttctctgtactcagttggttctcagttagctggttaagtggagtgtaatggtggcgtagagaatcacaaatggaaaataattccataattatttttttgaccttgcctatgattgattaggatagctccctctaggggtagcagccggtgtgactccctttctggtgacagacagggccccagcagccctgtctgttaccatgtgagtcatactggccaaagcttagtcctagcatatgcacctgagccaacctggccaatcagattgttttgtcaataatttgaaatttgaactggagagatccagaaccttgggagtcattaaagccaagtcattcatagcagccaggaaacaataggaaccaaaagcctctgcctgctgctattgcaattcccaggatctctccttccctggatccctccctcccaggtctgggctgtgcagttcctccccctgccttaaaacaccccactatctctgtaaagtctctctctctctttttttttttttacttaatctagctagaatctatttctgttgattacaacttaactaactcatttacggataggactttttttttttctttttttcttttttcttttctttttttttttgagatggagtctcactctgtcacccaggctggagtgcagtggtgtgatcttggctcactgcaacctctgcctcccaggttcaagcaattctcctgcctcagcctcccaagtagctgggactacaggcacacgccaccacacccaactaatttttgtatttttagtagagatggggtttcaccatgttggccaggattgtctccatctcttgaccttgtgatccacccacctcagcctcccaaagtgctgggattacaggcatgagccaccacacccagcgagacggggtttcattatgttggccaggctggtctccaactcctgacctaaagtgatctgcccgccttggcctcccaaagtgctgggattacagacatgagccaccacgcttggccgggatagtatatttttatagcacttcccctactgattgctgccttctctgtggctacaagggacccacagaattacagggaagttacagggaagcaggtttcatctcaatattgggagggatttcaaacaatcacacctgcctgagaaggagtgggctgtcactaggaatttttattcccagtccgtcaggaattttgtagaagggcttcatgtgctggtaccaataggacaggaagattttaatcagctttactatctatgtttttttatggaaactgtgtgtatgtatacatacattttccaaaaagaaaaattaaatgattatagagattatgtttttcagact

SEQ ID NO: 11565 - protein, 261 aa, Homo sapiens
MTCWLRGVTATFGRPAEWPGYLSHLCGRSAAMDLGPMRKSYRGDREAFEETHLTSLDPVKQFAAWFEEAVQCPDIGEANAMCLATCTRDGKPSARMLLLKGFGKDGFRFFTNFESRKGKELDSNPFASLVFYWEPLNRQVRVEGPVKKLPEEEAECYFHSRPKSSQIGAVVSHQSSVIPDREYLRKKNEELEQLYQDQEVPKPKSWGGYVLYPQVMEFWQGQTNRLHDRIVFRRGLPTGDSPLGPMTHRGEEDWLYERLAP

SEQ ID NO: 11566 - DNA, 2315 bp, Homo sapiens
  CDS (196)..(1488)
agagcatccccggagcatcttaagagctgagcgcagctgacaactaggggccggaccgtcgcaggaggcgtccgctggataccttcccccttccctgacctagagctctacagctgctgcctcggtactgaccgagggttcccagagctgtctcaccattgcaaaaacgttatagcaacagcctctgattacgacatggctgagatcaccaatatccgacctagctttgatgtgtcaccggtggtggccggcctcatcggggcctctgtgctggtggtgtgtgtctcggtgaccgtctttgtctggtcatgctgccaccagcaggcagagaagaagcacaagagcccaccatacaagtttattcacatgctcaaaggcatcagcatatacccagagaccctcagcaacaagaagaaaatcatcaaagtgcggagagacaaagatggtcctgggagggaaggtggacgtaggaacctgttggtggacgcagcagaggctggcctgctaagccgagacaaagatcccagggggcctagctctggatcttgtatagaccaattacccatcaaaatggactatggggaagaactaaggagccctattacaagcctgacccctggggagagcaaaaccacctctccatcatctccagaggaggatgtcatgctaggatccctcaccttctcagtggactataacttcccgaaaaaagccctggtggtgacaatccaggaggcccacgggctgccagtgatggatgaccagacccagggatctgacccctacatcaaaatgaccatccttcctgacaaacggcatcgggtgaagaccagagtgctgcggaagaccctggaccctgtgtttgacgagaccttcaccttctatggcatcccctacagccagctgcaggacctggtgctgcacttccttgtcctcagctttgaccgcttctctcgggatgatgtcattggcgaggtcatggtgccactggcaggggcggaccccagcacaggcaaggtacaactgaccagggacatcatcaaaaggaatatccagaagtgcatcagcagaggggagctccaggtgtctctgtcatatcagcctgtggcacagagaatgacagtggtggtcctcaaagccagacacttgccgaagatggatatcaccggtctctcaggtaatccttatgtcaaggtgaacgtctactacggcagaaagcgcattgccaagaagaaaacccatgtgaagaagtgcactttgaaccccatcttcaatgaatctttcatctacgacatccccactgacctcctgcctgatatcagcatcgagttcctcgttatcgacttcgatcgcaccaccaagaatgaggtggtggggaggctgatcctgggggcacacagtgtcacagccagtggtgctgaacactggagagaggtctgcgagagcccccgcaagcctgtggccaagtggcacagtctgagcgagtactaatcctgttcttctctcctctaatccccgggggccaagctggggagggatgtggaggggaaaaagatgacagagaagtggactccaaacctcattttagttgtagaagaaaatttcttacaaaacaaattccacaaagaacaccctatatgaccacagctgcagatcagttcttagcaatgatgtttttttttctgctttgcaaggcgctagaatcttttattttactttattttttttgaggtggagtttcgctcttgttgcccgggctggagtgcaatggtgagatctcaactcactgcaacctctgccctccaggttcaagtgattctcctccctcagcctcccaagtagctgggattacaggcacccacgagcatgcccggctaattttttgtattttcagtagagatgggtttcaccatgttggccaggctggtctcgaattccagacctcaggtgatccacccgcctcggcctcccaaagtgctgggattacaggtgcgagccaccgtgcccggcctctggttttgttttgttttttttttttaatgggggacaaaagagagggaaagacccctataaatctatatataacaatgtaaccatatacttgcatgtctaatacaaactgaagaaattagcctaactgccaatatcaagttgcagattttaatccatggaaattgtgttttgtgctgaattgtatttgctgattacctgaaattggcttctttttattgggcttctctggagaatttctcccactccccacctctgcagaagaaaattttgctcttataaaacctcatgttttcatcattcct

SEQ ID NO: 11567 - protein, 431 aa, Homo sapiens [sequence omitted]

SEQ ID NO: 11568 - DNA, 1011 bp, Homo sapiens
atgtaagatgtgtgacatcttatcctgtggcatgctgagcaccgacagcctctgaagcccacactcaaccaggacacacatgctccctgctcttggggttgacctggggtttatggagtcagtgtgcttgctcacaaacctctttatgccaattgcactggttatcagaattatgtaatttaatgaaatagtaccaaatatttcataaactaattaaatatgactacataaaggtcactgcttctttgaaagttcactattttggaaaagactcaaaattagtcactacagaagcatttctgtcaatgtaaatgtgttatgataactataaaaggcgagggggaatattataaaatctaagaggattctactcttcataagcatcttcagctccgctgacttcaaagaaactagactggaaatcagaccttgttattggagtgagttgtaaaagaaagtctacatggaattccaatgggtagatccttattcagagaactatttgtgcctcatcacaggtagaccggcatgttttgccacaatagctgcgagttcaaaatgttgtaaggtcttgtttatgtttatgtatttttttatgtattgttttcaaaaggattttctgctttaatcagcttttaccattaattgccttaggcctgattatgtcagatgagaggatttggccgtataaactaacagcaacacctaaaaaaggaaaagtttttcctttgtattaaaagccttttttaaaattccatttcctactattagcaagatctggaataggtttattagcactaaatattatactttggttatgtacagaaaatggaatgtgtgcaatcatgttgatgaagtaccttcccctattgtgacatattctttccctttccaaatggcagtgttagatgagatttcttatggataaagaaaacaatacccggaacaattttgagtcaaaatgacaatcggaaatatgacaaggagaaaataaacctttttcacatctgt

SEQ ID NO: 11569 - DNA, 2361 bp, Homo sapiens
  CDS (1187)..(1744)
agctgggtcgcggcgtctcgctccggtcgggaggactgaggacagccccgcctccgccccctgggtcaagcccggcttccttttcagttcgtccatcttctagaaacgagtccccgagaccccgggctgccttcttggggctgctccgcctcctgaccagccctcgtcagccactcgaagtccctgaggagacgtggagaggaggagggacacggcatggggggagtccgggaagggagacgagcgtctgaagacgtcctcccgagggcagaaggggccgggggagctggcgcagggctctctacctagcgctgcaggctcctgggcgattgtagcgggaccgtcacacacaactggcacccaggccaggggtccagagctaaattctgcctgcaggagcggttattgtggcatccgtttctaaaaagtttaaaggcaacattttattttattttaatttttttgagacaagatctgcctctgtcgcccaggctggagtgcagtggcgagatctcagctcactgcaacctgtgcctcccggcttcaagcgattctcagcctcagcctcccgagtagctgggattgcaggcgcccggcaccacgcccggctaatttttttttttttttctttttgttttgtttgagactcagtctcgctctgttgcccaggctgaagtgcagtggggcgctctcggctcactgcaacctctgcctcccaggttcaagcgattctcctgcctcagcctcccgagtagctgggattacaggagcgtgccaccactccgggctaatttttgtgttttaagtagagatggggtttcaccatgttggtcaggcagatttcgaattcctgacctcaagtgatccacccgcctcggcctttatttacttatttttttttaatagacacggggtcatgttgccagccatgttgcccaggctggtcgtgaactcctgggctcaagtgatcctcccgccttgcccttggccttccaagtgctaggattacaggcgtgagccaccaacaccctgcctgaggcaacattttaaacttggtgtatgttgaaaatttcaaaacccctcagctgtcctgcatcctcatttaggttcctgcttggctcgagtttgagtttacagcccctgcaagtaaatccaagagcctgttacagattggcggtcgtgccttatgaaatctgacttctacttccagaaatcagagcctcattcccttagtagtgaagcattgatgaggagagcagtgtctttggtaacagatagcacctctacctttctctctcagaccacatatgcgttgattgaagctattactgaatatactaaggctgtttataccttaacttctctttaccgacaatatacaagtttacttgggaaaatgaattcagaggaggaagatgaagtgtggcaggtgatcataggagccagagctgagatgacttcaaaacaccaagagtacttgaagctggaaaccacttggatgactgcagttggtctttcagagatggcagcagaagctgcatatcaaactggcgcagatcaggcctctataaccgccaggaatcacattcagctggtgaaactgcaggtggaagaggtgcaccagctctcccggaaagcagaaaccaagctggcagaagcacagatagaagagctccgtcagaaaacacaggaggaaggggaggagcgggctgagtcggagcaggaggcctacctgcgtgaggattgagggcctgagcacactgccctgtctccccactcagtggggaaagcaggggcagatgccaccctgcccagggttggcatgactgtctgtgcaccgagaagaggcggcaggtcctgccctggccaatcaggcgagacgcctttgtgagctgtgagtgcctcctgtggtctcaggcttgcgctggacctggttcttagcccttgggcactgcaccctgtttaacatttcaccccactctgtacagctgctcttacccattttttttacctcacacccaaagcattttgcctacctgggtcagagagaggagtcctttttgtcatgcccttaagttcagcaactgtttaacctgttttcagtcttatttacgtcgtcaaaaatgatttagtacttgttccctctgttgggatgccagttgtggcagggggaggggaacctgtccagtttgtacgatttctttgtatgtatttctgatgtgttctctgatctgcccccactgtcctgtgaggacagctgaggccaaggagtgaaaaacctattactactaagagaaggggtgcagagtgtttacctggtgctctcaacaggacttaacatcaacaggacttaacacaggc

SEQ ID NO: 11570 - protein, 186 aa, Homo sapiens
MKSDFYFQKSEPHSLSSEALMRRAVSLVTDSTSTFLSQTTYALIEAITEYTKAVYTLTSLYRQYTSLLGKMNSEEEDEVWQVIIGARAEMTSKHQEYLKLETTWMTAVGLSEMAAEAAYQTGADQASITARNHIQLVKLQVEEVHQLSRKAETKLAEAQIEELRQKTQEEGEERAESEQEAYLRED

SEQ ID NO: 11571 - DNA, 2513 bp, Homo sapiens
  CDS (109)..(1038)
tttgctgaggctgttaacttctgcactgttgattggctgccattaggccgacagtgtgtggagcattatcgcttgcttcatcgatattgtgtgttttcccatgatgagatgatctgcaagatggcttccaaggctgatgtattagatgttgtagtggcttcaactgttcagaaagacatggccattatgattgaggatgagaaagctttaagagaaactgtccgtaaattgggagtgattgattcggaaagaatggattttgagctgttgccagatgatgaacgtcagtgtgtaaaatgcaaaactacatgcttcatgtctgccatctcctgttcttgtaaacctggccttcttgtttgcctgcatcatgtaaaagaattgtgttcctgtcctccttataaatataaattgcggtataggtacacgctggatgatctctaccctatgatgaatgcattgaagcttcgagcagaatcttacaacgaatgggccttgaatgtgaatgaagctttggaggcaaagatcaacaagaagaaaagccttgtcagcttcaaggctttaattgaagaatctgaaatgaagaaattcccagacaatgatcttttgcgacaccttcgcctagtcacacaggatgcagagaagtgtgcctctgttgcgcagcagttgcttaatggcaaaaggcaaactagatatcgatctggtggagggaaatcccaaaatcagttgacagtgaatgagctccggcagtttgtaacacagctgtatgctcttccatgtgtcctcagtcagacaccattactaaaggatctcttgaatcgtgtagaagattttcaacagcatagtcagaaactactctctgaggaaacgcctagtgctgcggagctgcaggacttgctagatgtcagctttgaatttgatgttgaacttccacagcttgctgagatgcgtatccgtttggaacaagcccgttggctagaagaggtgcagcaagcttgcctagaccccagctcccttactttagatgatatgagcgtctcatagacctaggggtagggctggccccgtattcagcagtggagaaagctgtggcccggctgcaggaactgctcacagtgtcagagcactgggacgacaaagccaagagtctcctcaaggccaggccacgacattcattgaatagccttgctacggcagtaaaggaaatcgaagggatccctgcatatctgcccaatggtgcggctctgaaagactcagtgcagagagccagagactggcttcaggatgtagagggcctgcaggctggaggacgtgtgccagtgttagacacactcatagaacttgttacacgaggccgatctatcccggtacatctgaattctttgccaagactggaaaccctagtagctgaggttcaggcttggaaagaatgtgctgttaatacattcttgactgagaattctccatattctctcttagaggtgctgtgtcctcgatgtgatattggccttttgggattgaaaaggaagcagagaaagttaaaggagcccttgccaaatggaaagaaaaaaagcaccaaattagagagtctgagtgacctggagagagctttaactgaaagcaaggagactgcttcagctatggcaactcttggggaagctcgcctaagggaaatggaagccttgcagtctctcagactcgccaatgaagggaaattgctgtcgcctctccaagatgtggatataaaaatctgcctatgtcagaaggccccagctgcccctatgattcaatgtgaactctgcagggatgctttccacaccagttgtgtggcggtacccagtatttcacagggcctgcgaatctggctttgtccccattgtcggaggtcagagaaacctccattagagaaaattctgcccctgctcgcctcccttcagcgtatccgagttcgccttcctgagggagatgcacttcgatatatgattgaaagaaccgtgaactggcagcacagagcccagcaactgctttcgtcagggaatcttaaatttgtgcaagatcgagtgggctcaggactgttatatagcagatggcaagcctcagcaggacaggtgtcagacacaaacaaggtatctcaacctcctggcacaacatcattttctttgcctgatgactgggacaacagaacctcatatttgcactcccccttctcaactggacgaagttgtatccccctccatggtgttagtccagaagtgaatgaactattgatggaagcccagctgctccaggtatcccttcctgaaattcaggaactttaccagactttacttgcaaagccaagccctgctcagcagactgaccgaagctcaccagtgagacccagcagtgagaagaatgactgttgccgagggaagcgagatggaattaacagtcttgagagaaaactgaagagacgcctggaaagagagggcctctccagtgagcggtgggaacgagttaagaaaatgcggaccccc

SEQ ID NO: 11572 - protein, 310 aa, Homo sapiens [sequence omitted]

SEQ ID NO: 11573 - DNA, 2844 bp, Homo sapiens
  CDS (280)..(1836)
gtccctcacaccgagagttcctgcgcgtggggagttggagagtttgcgtggcgggaacgcggcggcagtgagagcgagcggcgccggcccttgcgtccggtgcggcgatgctgaccccggcgttcgacctcagccaggatccggacttcctgactatcgccatccgcgtgccctacgcccgggtctccgagttcgacgtctacttcgaggggtctgacttcaagttctacgccaagccatactttctcagattaacccttcctggaagaattgtagaaaatggaagtgagcaagggtcctatgatgcagataaaggaatttttaccattcgcctgcccaaaaacccctggccagcattttgaggggctgaacatgttaactgctcttctggcaccaagaaaatccaggacagcaaaaccacttgtggaagaaataggtgcttctgagattcctgaggaagtagttgacgatgaagagtttgattgggaaattgagcagacaccctgtgaagaggtatcagaaagtgctttgaatccgcagtgccactatggatttggaaacttacgatcaggagtgttgcaacggttacaggatgaactgagtgatgttattgatattaaggatccagatttcacccctgcagctgaacgaagacagaagcgcctggccgctgagctggccaagtttgatcctgatcattatctagctgacttttttgaagatgaggcgattgaacagattttgaagtataatccttggtggactgacaaatattcaaaaatgatggcctttttggaaaagagtcaggaacaagaaaatcatgctacattagtgtctttttctgaagaagagaagtatcagctacgaaaatttgtcaataaatcttatctgctggacaagagagcctgtcgtcaagtgtgctacagtttgattgatatccttctggcatattgctatgaaacccgtgtcactgaaggagagaagaatgttgaatctgcatggaatatcaggaaactgagtccaacactatgctggtttgagacttggactaacgttcatgatatcatggtgtcttttggaagaagggtgttgtgttacccactctatcgccatttcaagctggtgatgaaggcctacagggacactataaagatattgcaactgggtaaaagtgcagttttaaagtgtctcctggatattcacaaaatttttcaggaaaatgacccagcgtacatactgaatgatctctacatctcagactactgtgtgtggattcagaaagtcaaatccaaaaagttggcagctcttgcagaagccttaaaggaagtctcccttacaaaggcccagctggggttagaactggaagaactagaagcagcagcactgcttgtccaggaggaagaaactgcattaaaagcagcccattcagtttctgggcagcagacactttgctccagctctgaggcaagtgattcggaggactcagacagcagcgtgtcatctggaaacgaagactcaggctcagattcagaacaagatgaactcaaagatagtccatctgagacagtcagttctttgcaaggtccctttcttgaagaaagcagtgcctttcttattgctgatggtggagtacgcagaaacacagccatccaggagtctgatgccagtcagggaaagccacttgcctcttcctggcctcttggagtgtctgggcctctgatagaggagcttggggaacaactgaagactacagttcaggtttctgaacccaagggcaccactgctgtaaaccgcagcaatattcaggagagagacggctgtcagacaccaaataattgactcttaggtggttttattcattgttgagaaatatggtagattgggtttcatttaccgaatgagaattcttcattttcactttgtaatttttcttagtatatagtcagcccactgtatttgtgtgttccacatctgtggattcaaccaactgcagatcaaaaatattgaagaaaaaatcgcatctgtaccaaacatgtacagacttttttcttgttattattctctaaataatacagtatgacaactatttccacagcatttacattgtattgggtaatataagtaatctagtgatgatttaaactgtgcaggaggatgtgggtaggttatatgcaaatactgcaccattttttatcaggggcttgagcatctgaggattttagtatcctcaggagtcctggaaccaaccccccacagatacggggacaactttatgacattgtttttcaaccaatgaatgtttataccttttgttttccttgccgcgactgtgaagataaagttcaaaagtatttttaccaaagtgtagctaatatttcaagctgaaaataatagttctactgcccgtgtctccagaatgtagagcccatcaatatttttattttaggaggtgtacttgacacccaataaactgcacgtatcaaaagtgtacaatgtgttggcgtatgtataccctgcgtaaaactatcaccacaactgaagtgaggaacggacccatcattcccaagtgcccttgtgccctgttattagtttgcatgtcctagaattctatgtaaattgaatcatacaatatgtatcccttttttggtcaggcatattttactcagtatagttattttgagattcatccatgtggtagcatgtgtcacgagtttttgtttttatgtttttcattgctgagtactgcttcattgaatagatttgttcattgacctctcgatggacacctgggttgtttccagtttggggctgttataaataaagctgttatgaacatttgtgtac

SEQ ID NO: 11574 - protein, 519 aa, Homo sapiens
MEVSKGPMMQIKEFLPFACPKTPGQHFEGLNMLTALLAPRKSRTAKPLVEEIGASEIPEEVVDDEEFDWEIEQTPCEEVSESALNPQCHYGFGNLRSGVLQRLQDELSDVIDIKDPDFTPAAERRQKRLAAELAKFDPDHYLADFFEDEAIEQILKYNPWWTDKYSKMMAFLEKSQEQENHATLVSFSEEEKYQLRKFVNKSYLLDKRACRQVCYSLIDILLAYCYETRVTEGEKNVESAWNIRKLSPTLCWFETWTNVHDIMVSFGRRVLCYPLYRHFKLVMKAYRDTIKILQLGKSAVLKCLLDIHKIFQENDPAYILNDLYISDYCVWIQKVKSKKLAALAEALKEVSLTKAQLGLELEELEAAALLVQEEETALKAAHSVSGQQTLCSSSEASDSEDSDSSVSSGNEDSGSDSEQDELKDSPSETVSSLQGPFLEESSAFLIADGGVRRNTAIQESDASQGKPLASSWPLGVSGPLIEELGEQLKTTVQVSEPKGTTAVNRSNIQERDGCQTPNN

SEQ ID NO: 11575 - DNA, 2232 bp, Homo sapiens
  CDS (412)..(1104)
gaaattgcacacttaaagacatcagtggatgaaatcacaagtgggaaaggaaagctgactgataaagagagacagagacttttggagaaaattcgagtccttgaggctgagaaggagaagaatgcttatcaactcacagagaaggacaaagaaatacagcgactgagagaccaactgaaggccagatatagtactaccgcattgcttgaacagctggaagagacaacgagagaaggagaaaggagggagcaggtgttgaaagccttatctgaagagaaagacgtattgaaacaacagttgtctgctgcaacctcacgaattgctgaacttgaaagcaaaaccaatacactccgtttatcacagactgtggctccaaactgcttcaactcatcaataaataatattcatgaaatggaaatacagctgaaagatgctctggagaaaaatcagcagtggctcgtgtatgatcagcagcgggaagtctatgtaaaaggacttttagcaaagatctttgagttggaaaagaaaacggaaacagctgctcattcactcccacagcagacaaaaaagcctgaatcagaaggttatcttcaagaagagaagcagaaatgttacaacgatctcttggcaagtgcaaaaaaagatcttgaggttgaacgacaaaccataactcagctgagttttgaactgagtgaatttcgaagaaaatatgaagaaacccaaaaagaagttcacaatttaaatcagctgttgtattcacaaagaagggcagatgtgcaacatctggaagatgataggcataaaacagagaagatacaaaaactcagggaagagaatgatattgctaggggaaaacttgaagaagagaagaagagatccgaagagctcttatctcaggtccagtctctttacacatctctgctaaagcagcaagaagaacaaacaagggtagctctgttggaacaacagatgcaggcatgtactttagactttgaaaatgaaaaactcgaccgtcaacatgtgcagcatcaattgcatgtaattcttaaggagctccgaaaagcaagaaaaaataacacagttggaatccttgaaacagcttcatgagtttgccatcacagagccattagtcactttccaaggagagactgaaaacagagaaaaagttgccgcctcaccaaaaagtcccactgctgcactcaatggaagcctggtggaatgtcccaagtgcaatatacagtatccagccactgagcatcgcgatctgcttgtccatgtggaatactgttcaaagtagcaaaataagtatttgttttgatattaaaagattcaatactgtattttctgttagcttgtgggcattttgaattatatatttcacattttgcataaaactgcctatctacctttgacactccagcatgctagtgaatcatgtatcttttaggctgctgtgcatttctcttggcagtgatacctccctgacatggttcatcatcaggctgcaatgacagaatgtggtgagcagcgtctactgagatactaacattttgcactgtcaaaatacttggtgaggaaaagatagctcaggttattgctaatgggttaatgcaccagcaagcaaaatattttatgtttcgggggttttgaaaaatcaaagataattaaccaaggatcttaactgtgttcgcattttttatccaagcacttagaaaacctacaatcctaattttgatgtccattgttaagaggtggtgatagatactatttttttttcatattgtatagcggttattagaaaagttggggattttcttgatctttattgctgcttaccattgaaacttaacccagctgtgttccccaactctgttctgcgcacgaaacagtatctgtttgaggcataatcttaagtggccacacacaatgttttctcttatgttatctggcagtaactgtaacttgaattacattagcacattctgcttagctaaaattgttaaaataaactttaataaacccatgtagccctctcatttgattgacagtattttagttatttttggcattcttaaagctgggcaatgtaatgatcagatctttgtttgtctgaacaggtatttttatacatgctttttgtaaaccaaaaacttttaaatttcttcaggttttctaacatgcttaccactgggctactgtaaatgagaaaagaataaaattatttaatgtttt

SEQ ID NO: 11576 - protein, 231 aa, Homo sapiens
MEIQLKDALEKNQQWLVYDQQREVYVKGLLAKIFELEKKTETAAHSLPQQTKKPESEGYLQEEKQKCYNDLLASAKKDLEVERQTITQLSFELSEFRRKYEETQKEVHNLNQLLYSQRRADVQHLEDDRHKTEKIQKLREENDIARGKLEEEKKRSEELLSQVQSLYTSLLKQQEEQTRVALLEQQMQACTLDFENEKLDRQHVQHQLHVILKELRKARKNNTVGILETAS

SEQ ID NO: 11577 - DNA, 2149 bp, Homo sapiens
  CDS (397)..(2067)
caagcatgtgatgttcttgtaccttcttctgatagtacatctcaacagttgactccatatagtcaagtccatatttgtttgagatctggcaactatcaggaggtaatacagattttcattgaagacaacttaaccttgagtttacctgtccagttccgacagtcagtcctaagagaactctttaagaaagctcaacagggaaatgaagctctagatgaaatctgttttaaagtttgtgcctgtaatacagtccgtgatatactggaaggcagaacaattagtgttcaatttaaccagctatttcttagaccaaataaagagaaaatagactttcttcttgaggtatgttcaagatcagtaaatttagaaaaagcttcagagtctttgaaaggaaacatggctgcttttctaaagaatgtgtgtctggggttggaagatctgcagtatgttttcatgatttcttcacatgagcttttcattacattgttgaaagatgaagaacgaaagctacttgttgatcagatgaggaagagatcccctagagtaaatctgtgcattaaacctgtaacttcattttatgatatcccagcttcagcaagtgtcaacattggtcagttagagcatcaacttatattgtcagtggatccttggaggattagacaaattttaattgaattacatggtatgacttcagagcgccagttctggacagtgtctaataagtgggaagtaccttctgtctatagtggtgttatcctgggaattaaagacaatttaacaagagatttggtttatattcttatggccaaaggtttgcactgcagtactgttaaggacttttcccatgctaaacagctctttgctgcttgtttggagttggtaacagagttctcaccgaagcttcgtcaggtcatgctgaatgagatgttgcttttggatattcatacacacgaagctgggacagggcaggcaggagagagaccgccatccgaccttataagtagagtacgaggctatctggaaatgaggcttcctgatattcctcttcgtcaagttatagctgaggaatgtgttgcctttatgttaaactggagagaaaatgaataccttacactccaagttcctgcatttttgcttcagagtaatccatatgtaaagcttggacagcttttagcagctacatgcaaagaacttccaggccctaaagaaagcagacggactgccaaagacctttgggaagttgttgttcaaatctgtagtgtgtccagtcagcacaaacgaggaaatgatggcagagttagtttaataaaacagagggaatctacgttaggtatcatgtatcggagtgaactgctttcttttatcaaaaaattacgagaaccactcgttttgactattattttatcactctttgtgaaacttcacaatgttcgggaggacattgtgaatgatattacagctgaacacatttctatttggccatcttccattcccaacctccagtctgtggactttgaagctgtggcaatcacagtgaaagagctagttcgatatacactcagtataaatccaaataaccattcttggttaattatccaggcagatatttactttgcaacgaatcagtattcagcagctcttcactattacctccaggcaggagctgtgtgttctgacttctttaacaaggctgtgccccctgatgtttatacagaccaggtaataaaacgaatgataaaatgttgttctttgctgaattgccacacacaggtggctattttatgtcagttcctcagagaaattgactacaaaacagcgtttaaatctctgcaagaacaaaacagtcatgatgctatggactcctactacgactacatatgggatgttaccattttggaatacttgacttatcttcatcataaaagaggagaaacagataaaagacaaattgcaatcaaagccatcggccagacagagttgaatgcaagcaatccagaagaagtgttacagctggcagcgcagagaaggaaaaaaaagtttctccaagcaatggcaaaactttacttttaagcagttaaatttttttaacttttattttttaaacaatgggctaaaaataaacagtattaaaaggttaagtttatataat

SEQ ID NO: 11578 - protein, 557 aa, Homo sapiens
MAAFLKNVCLGLEDLQYVFMISSHELFITLLKDEERKLLVDQMRKRSPRVNLCIKPVTSFYDIPASASVNIGQLEHQLILSVDPWRIRQILIELHGMTSERQFWTVSNKWEVPSVYSGVILGIKDNLTRDLVYILMAKGLHCSTVKDFSHAKQLFAACLELVTEFSPKLRQVMLNEMLLLDIHTHEAGTGQAGERPPSDLISRVRGYLEMRLPDIPLRQVIAEECVAFMLNWRENEYLTLQVPAFLLQSNPYVKLGQLLAATCKELPGPKESRRTAKDLWEVVVQICSVSSQHKRGNDGRVSLIKQRESTLGIMYRSELLSFIKKLREPLVLTIILSLFVKLHNVREDIVNDITAEHISIWPSSIPNLQSVDFEAVAITVKELVRYTLSINPNNHSWLIIQADIYFATNQYSAALHYYLQAGAVCSDFFNKAVPPDVYTDQVIKRMIKCCSLLNCHTQVAILCQFLREIDYKTAFKSLQEQNSHDAMDSYYDYIWDVTILEYLTYLHHKRGETDKRQIAIKAIGQTELNASNPEEVLQLAAQRRKKKFLQAMAKLYF

SEQ ID NO: 11579 - DNA, 1507 bp, Homo sapiens
  CDS (149)..(1342)
aatcctggaacaaggctacagcgtcgaagatccccagcgctgcgggctcggagagcagtcctaacggcgcctcgtacgctagtgtcctcccttttcagtccgcgtccctccctgggccgggctggcactcttgccttccccgtccctcatggcgctgctccgacgcccgacggtgtccagtgatttggagaatattgacacaggagttaattctaaagttaagagtcatgtgactattaggcgaactgttttagaagaaattggaaatagagttacaaccagagcagcacaagtagctaagaaagctcagaacaccaaagttccagttcaacccaccaaaacaacaaatgtcaacaaacaactgaaacctactgcttctgtcaaaccagtacagatggaaaagttggctccaaagggtccttctcccacacctgaggatgtctccatgaaggaagagaatctctgccaagctttttctgatgccttgctctgcaaaatcgaggacattgataacgaagattgggagaaccctcagctctgcagtgactacgttaaggatatctatcagtatctcaggcagctggaggttttgcagtccataaacccacatttcttagatggaagagatataaatggacgcatgcgtgccatcctagtggattggctggtacaagtccactccaagtttaggcttctgcaggagactctgtacatgtgcgttggcattatggatcgatttttacaggttcagccagtttcccggaagaagcttcaattagttgggattactgctctgctcttggcttccaagtatgaggagatgttttctccaaatattgaagactttgtttacatcacagacaatgcttataccagttcccaaatccgagaaatggaaactctaattttgaaagaattgaaatttgagttgggtcgacccttgccactacacttcttaaggcgagcatcaaaagccggggaggttgatgttgaacagcacactttagccaagtatttgatggagctgactctcatcgactatgatatggtgcattatcatccttctaaggtagcagcagctgcttcctgcttgtctcagaaggttctaggacaaggaaaatggaacttaaagcagcagtattacacaggatacacagagaatgaagtattggaagtcatgcagcacatggccaagaatgtggtgaaagtaaatgaaaacttaactaaattcatcgccatcaagaataagtatgcaagcagcaaactcctgaagatcagcatgatccctcagctgaactcaaaagccgtcaaagaccttgcctccccactgataggaaggtcctaggctgccgtggcccctggggatgtgtgcttcattgtgccctttttcttattggtttagaactcttgattttgtacatagtcctctggtctatctcatgaaacctcttctcagaccagttttctaaacatatattgaggaaaaataaagcgattggtttttctt

SEQ ID NO: 11580 - protein, 398 aa, Homo sapiens
MALLRRPTVSSDLENIDTGVNSKVKSHVTIRRTVLEEIGNRVTTRAAQVAKKAQNTKVPVQPTKTTNVNKQLKPTASVKPVQMEKLAPKGPSPTPEDVSMKEENLCQAFSDALLCKIEDIDNEDWENPQLCSDYVKDIYQYLRQLEVLQSINPHFLDGRDINGRMRAILVDWLVQVHSKFRLLQETLYMCVGIMDRFLQVQPVSRKKLQLVGITALLLASKYEEMFSPNIEDFVYITDNAYTSSQIREMETLILKELKFELGRPLPLHFLRRASKAGEVDVEQHTLAKYLMELTLIDYDMVHYHPSKVAAAASCLSQKVLGQGKWNLKQQYYTGYTENEVLEVMQHMAKNVVKVNENLTKFIAIKNKYASSKLLKISMIPQLNSKAVKDLASPLIGRS

SEQ ID NO: 11581 - DNA, 1205 bp, Homo sapiens
agtgccgaaccttcggctgctccccgcctcaggacaccaagatgcctggcgaacagcaggcagaggaagaggaggaggaagagatgcaggaggagatggtgctgctggtgaagggtgaggaggatgagggtgaggagaagtatgaggtggtgaaactcaagatccccatggacaacaaggagagacacgatctcgctttgtcacccaggctggagtgcagtggcacgtgattgtagctcactgcagccttgaactcttgggctcaagtgatcctccttcctcggcctaccaagttgttgggactacaagtgcaccccaccacacctggctaatttttcactttttgtagagacgaggtctaactgtgttgcccaggctggtgtccaactcctggcctcaagtaatcctccttccttggcctcccgaagtgctaagattacaggtgtgagtcactgcacctggcctcatactgggaatttgatctcacttagcctacctggcctttctcgggacactggggcagaggaggatcttaatgagctggattcagctcctcttaccaagatttttcctcgggcatccaaggccccttctcctgggctggagacatcaacagtgcttgtatggagaatttctttttcagaagtcagtgaactcagcatgaggaagccctcaggctgtccaaagtcacctgaaagagggtgccaaggaaaaacgggccagaaaaatgtagatctgatgagacaagttctctccacagtggctgatgtattgaaataaaccaatagatttcaaaaccagggcaagactggaaaatgtgaccttgaattcagatggtaccaaacatactgtggggagtttctccatttaaagtatcaagttgtattttaaccttgaatccctcttggagtgtgccagggacgtggaatccagcctctgtcacatcttggtcacgtgagttcagaacagtgtagcctgaatgacggcatggtctcatgggcaccctgagtccatcctggctcccactggccatgtgaatttcatcgccctcagcctcagctttctcagctatcaaaagagagaacacccagctcaaggcgggtgacaggaggatttaatacaataacatacatagtgttgtcaaagcttaatactttgttattgattgttgctattgttatcagtatagatactatttaaaccag

SEQ ID NO: 11582 - DNA, 2682 bp, Homo sapiens
  CDS (229)..(1746)
ttgagcaacaataagaaattgagtgaaaatacgcaaaatacgtcattatgttctggaactgtagttcatggtagacgttttcatcatgctcatgcacagataccagtagtaaaaacagcagcccaaagcagtctggaccgaaaagaaaggaaagaatacccacctcatgtccaaaaagttgaaattaatcctgtaaggttaagtcggctccaaggtgttgaacgtataatgaagaaaacagaagagtccgaatcacaagtggagcctgaaattaagaggaaagtacaacagaaacggcactgtagtacctatcagcctactcctcctctatctcctgcttcaaaaaaatgtttaacccatttagaggatttgcaaagaaattgcagacaagctattactttgaatgagtctactggaccattattaagaacgtcaattcatcagaattctggaggacagaagtcacaaaacacaggattaacaaccaagaagttttatggcaacaatgtggaaaaggttccaattgatattattgtgaattgtgatgacagtaaacgcacttatttacagactaatggaaaagtcattttacctggggcaaaaatacccaaaatcacaaacttgaaagaaaggaaaacaagtttgtcagacctaaatgatccaatcattttgtccagtgatgatgatgatgacaacgacagaactaacagaagagaaagcatatctcctcagcctgctgattcagcatgttcttcccctgcaccatccactggaaaagtagaagcagcgctaaatgaaaatacttgcagagcagagcgtgaactacgaagcattccagaagactcagagttaaatacagttacattgccaagaaaagcaagaatgaaagaccagtttggcaattctattatcaacacacctctgaaacgtcgtaaagtgttttctcaagaacctccagatgctttagctttaagctgccaaagttcctttgacagtgtcattttaaactgtcgaagtatacgagtaggaacactcttccggctgttaatagagcctgtaattttttgtttagattttatcaagatacagctagacgaaccagaccatgatcctgtagagattatattaaatacctctgatctaactaaatgtgaatggtgtaatgtccgaaaattacctgtagtgtttcttcaagcaattccagcagtttatcaaaagctgagcatccaactgcaaatgaataaggaggataaagtttggaatgattgtaaaggagtaaataaattaacaaatttagaagaacaatatataattttaatttttcaaaatggccttgatcctccggcaaatatggtatttgaaagtatcattaatgaaattggtataaagaataacatctccaatttttttgcgaaaattccctttgaagaagctaatggcagacttgttgcctgtacaagaacctatgaagagagcatcaaaggaagttgtgggcaaaaggaaaacaaaattaaaactgtatcatttgaatctaaaatacaacttagaagcaaacaagaatttcagttttttgatgaagaagaagaaactggagaaaaccacaccatcttcattggcccagtagaaaagttgatagtatatccaccacctccagctaaaggaggcatctctgttaccaatgaggacctgcactgtctaaatgaaggagaatttttaaatgatgttattatagacttttatttgaagtaagttaattttccactgatcttttattaaatctttaacattccgtcatatcttatgtctttgttttccagagtcaggctttttgagttttaaattccatctctgccacttactgtgtgacatttggggagttattttttctgtttctgtctttgcacattttaaaaatgagaattctatctaaaaagttgtgaaaattgggccagggagatatctggcttatgtctataatcctgacactttgggaggtcaaggtgggaggatcgcttgagcccaagagttcacgaccagcctgggaaacaaagtgagaccttgtctccacaaaaaatttaaaattagccagtcatatacctatagtcccagccacttgggaggctcagacaggaagattacctgagcccatgagttcgaagttgcactgagccatgatggcgccactgcactccagcctggtcaacaaagcaaaactctacccccacacccacccccgaaaacaggagttgtgagaattaaatgagatcgtacatatcaagtagtaggaaaaatgcctagtacagtgttagaagtttatggtcttgtaggaagcacaaatacagaattaaagcaatgatagaagcattaacatggttcagtcctagcagatgagagaatgcttcattatctttggaggttgggagatatgagggaccaggaagctttcctggaagagcttacattatgacccaatatacattatgacccaacataacacatgtatacacctatgtgcaatgtgtttatacatttatcaatttgtatgtttttactggtttgtgatataaaatggacatgtatatgaaataaaacagaacttagcatcagtatgcatagttctctgtaatattttctagtttcttatactgtgtttcattaaacaaaacaaaacttttaaaaatt

SEQ ID NO: 11583 - protein, 506 aa, Homo sapiens [sequence omitted]

SEQ ID NO: 11584 - DNA, 1270 bp, Homo sapiens
  CDS (30)..(443)
gtgaaactctgaaagtccctcccaaaaagatggaagatttaactaatgtatcaagtctactgaatatggaaagggcacgagacaaagctaatgaagaaggtctggcattactacaggaagaaatagataaaatggtagagaccacagagttaatgactgggaatattcagagcctaaagaacaaaattcagattctggcaagtgaggtggaagaagaagaggagagagtaaaacagatgcatcaaataaatagtagtggagtactctctcttccggaactttctcagaaaactctcaaagcacccacacttcagaaagaaattttggcgctaattccaaaccagaatgctcttctaaaggacttggatattcttcataattcatcacagatgaagagcatgtcaaccttcattgaagaagcctataagaaactggatgcatcttaaagagtgttttttttttagattgttccatattaatttaatgttcgtgaatttgtaaaactgttaacctatgattatatgtacagaggctaaggcttctgcaggatttattatctcctgatatgcactttaaaattagtctttgtagttctatcattagcatctaatgtagttctgaagactgtttttagcagttgccaaatctaggaaactaacatttatattgctgtatctataagtatttgcctaaaaccataaaataggaattgccttaaggatctaatagtttataatgcctgaatggaactcatttattggttaacagctcatatcaggagctgtgataagtaagtgtttacatacactgtctagtgcataaaaaccttagtgtttgctatcattcattctgtagccaatggcttacagtttctgtctggtcatctggaacttgaaaaatcctcaaatgccttcactcttttacctaactccctagtctttttgggaagtagttaagatatgcctgctatctttaactttggaggtagtatcaaaattttacttctttggttgtttagtgaattaatgttgaatattttctactgtcatcaaaacatattcccaaaaagtattaaaaaggaaccttagcacatttattttattaaaacaagaaaacccaaaatatataaaccttttcttattatgataataagcttatatatgtgaataagttataacctagtgtataaaaaattatttctaacaaactacagtatactgtcttgggttttttttttttttttagtctgtaaaataaaatgactgcaatt

SEQ ID NO: 11585 - protein, 138 aa, Homo sapiens
MEDLTNVSSLLNMERARDKANEEGLALLQEEIDKMVETTELMTGNIQSLKNKIQILASEVEEEEERVKQMHQINSSGVLSLPELSQKTLKAPTLQKEILALIPNQNALLKDLDILHNSSQMKSMSTFIEEAYKKLDAS

SEQ ID NO: 11586 - DNA, 2417 bp, Homo sapiens
  CDS (208)..(717)
aatagaaaacgatccagatcagagagtgacagtgagaaagttcagccacttccaatttctaccattatccgaggcccaacactgggggcatctgctcctgtgacagtgaaacgggagagcaaaatttctcttcaacctatagcaactgttcccaatggaggcacaacacctaaaatcagcaaaactgtacttttatctactaaaagcatgaaaaagggtcatgaacatggatccaagaaatctcactctaaaaccaagccaggtattcttaaaaaagacaaagcagtaaaggaaaagattcctagtcatcattttatgccaggaagtcctaccaagactgtgtacaaaaaaccccaggaaaagaaagggtgtaaatgtgggcgtgctactcaaaatccaagtgttcttacatgccgaggccaacgctgcccttgctactctaaccgcaaagcctgcttagattgtatatgtcgtggctgccaaaactcctatatggccaatggggagaagaagctggaggcatttgccgtgccagaaaaggccttggagcagaccaggctcactttgggcattaacgtgactagcattgctgtgcgtaacgctagtaccagcaccagtgtaataaatgtcacagggtccccagtaacgacgtttttagctgccagtacacatgatgataaaagtttggatgaagctatagacatgagattcgactgttaaatcagtgggtcttttaaacctactcctggtagggaaatagctacagttttacggcagctatggttctgttggtttaacttgccggagctcctgcatatagatcacttgtatcaagtgttttcattgctaagttatatgtgttagtgtcggggaaatagtttgcagataatggaggagtaaccctacaactatatgtccttagttcttacagaacctcatagtttgagaacaaagctgatgcaactgatttatacaaaatgaactttggcaagaaaaataacattaacctcattgtttatggccatgctttgtgcataatcaaagtttatgattaaatgtaaggaagtggtatctagtcagtccataaagattgtgctaatttttttgtggaaaagtagccattagttcaggaaactcagtgctgccttcagatgtcattgatgtttctcctgttggaaagctgatgtgtccagctcaacctttgtgctgacaccataccatttctgatcatgaaatattggctactggtgtatgtagcagttcttaaatcagcagtattatgaaaaaaaattccccctcattagaatgtttaagaaatctttttaaaaagtaaaattctgtcagactacaaatgtttagctgttactcatttctagggaagaaattctaaatccctccttcactttgagcagtgttctaattggataaatgaaggagagtagttttattctgaaggtaattaaatttagactatgtagtatgtgacagaatttttttaaaattataaaaagattttatttagtaattgggatttacttaaaataattttggaataatgctcccagacttgcccagatttgtgtattgtacttattgccactggccgccactttgacttattttctctaatagtttatttgccacagtctttattttgaatatgctcctagtttttttttagggtgctgttcattatgaaggcttctttatagaggcctaataagaatgcctttttataaagcctgtgcatttaggtaggttgaagctaggaggattttctttagaatgctcttttgcatgtaaagcacaaagtatgtttcagtttaaatgcacttcttccggttaatttttatggggaagacaagtgagtcacaaacattctgttgaagggaaatctagtcagttgcttgaaagagcacagcccaaataaaacaaggactgactaggtgtaatgaaataacctgtgatttaaaagaagagctgcagctttgacagtgcttatttaaagaaaaatactgctggaaaatttccaatttctactacgttcaccatctctagtaagatctgacatatgctgaagttatgttttgatttggcacacagcatgttcaatgatggttactcgcctagtacaagacatggagaagaaacctttggacacagagcagatgacacctccttctgttttgtagtgtatcctggtgtcattttctgtgaatgtggtcaggtagagttgtttttgttgttgttgttgggcttttttttcttttttttttttggtctcttttggtggggtgggggtgggctaaagccataggaagaaaaatgtgatgtgtccagtatgtactattttgtttttgttttgcaagaagagttgaactatttttgataacaagagtaaatggtggaaaatgctt

SEQ ID NO: 11587 - protein, 170 aa, Homo sapiens
MKKGHEHGSKKSHSKTKPGILKKDKAVKEKIPSHHFMPGSPTKTVYKKPQEKKGCKCGRATQNPSVLTCRGQRCPCYSNRKACLDCICRGCQNSYMANGEKKLEAFAVPEKALEQTRLTLGINVTSIAVRNASTSTSVINVTGSPVTTFLAASTHDDKSLDEAIDMRFDC

SEQ ID NO: 11588 - DNA, 2017 bp, Homo sapiens
  CDS (12)..(1409)
agttggcgcccatggagccagagctgctggttcggaaggtgtctgcattgcaggcctgcgtccggggcttcttggtccgacgccagttccagagcctgcgagctgagtatgaggcgattgtacgagaggtcgagggcgacctgggcacgcttcagtggaccgagggccgcattcccaggccgcgattcctcccagagaaggcaaaatcccatcagacctggaaagcaggagacagggtagcaaatccagagcaggggctgtggaaccacttcccatgtgaagagtctgagggagaggccacctgggaggagatggtgctgaagaagtcaggagagagctcagcaaatcaaggaagcctctgcagagatcacagctcctggcttcagatgaagcagaacaggaaacccagccaagagaagaccagagacacgacaaggatggagaatccagaagccacagatcaaagactgccccacagccaacctcagcttcaagagcttcagtaccaccgcagccacttggccatggaattgctgtggctgcaacaggccatcaatagccgtaaggagtacctacttcttaaacaaacactgagatccccagaggcgggctcgatcagagaggaaccccgcgtgttcctagaacatggggaacaggcctgtgagagggaccagtcacaaccaagcgcaccactggaggaccagtcctacagagacaggaccactggagagctagaacaggaggatgactcctgtcacagggtcaaatcaccccacagatccccaggaagtttggccactacacaaaaaaacattgctggggctaagtgcagagaaccatgctacagcaagtctggaccaccgtcgtctataccatcaaacagccaggccttgggggacaggctcaccaaagggccagacgatggaagacagacctttggagggacctgcctgctgcagatgaaaatcctggaggaccagacccccagaggtttaaaacctaggaaccattgtcccaggaagtccaggacacagctgtctgcactctatgaggactcaaatattaaggagatgtctcccagaaaactagaccacaaagagcctgactgccgaacagtcaggacacaagagttgggcctctcagaggaccacatcatctgggatggtaccttgggggggccagagcatagtgtcctcgatctctggaggactaaaccacccaaaggccaggcccccactgatagaagctccagagatggaacctccaatgagcctagtcatgaaggacagaaaaagcagaggactataccatggagatcaaagtcacctgagattctgtcttctacaaaggcaggctgtacaggagaggaacagtggaggggcaggccatggaaaacagaaccacctggctagaccctaggaagccaggagaggatcaggttccaaaggggaatgctatgaaagggcagtgagacaagacctcatcctacctccctgaccagctctggcttctgctcctgcccctggccattggtgactagtggggccaagagaagctggagcagagagctggcatgagtatagggaaggaggaaggacacattttcaatcctctgcctgtagctcaatccaaatttgtggataaggggccgggtgcagtggctcacacctgtaatcccagcactttgggaggccaaggtgagtggatcacctgaggtcagaagtttgagaccagcctgaccaacatggtgaaatgaaaccccatctcaactaaaaatataaaaattagccaggcgtggtggtgcatgcctgtagtcccggttactcgggaggctgagacaggagaatcgcttgaacccaggagatggagattgcagtaggccaagatgatgccactgcactccagcctgggctacagagcgagacacggtctcaaaaaactaatgtgtggctaaggagttacctgggggaagtagaatgagaggtctgttgggaataaaggtttttcttagattctg

SEQ ID NO: 11589 - protein, 466 aa, Homo sapiens
MEPELLVRKVSALQACVRGFLVRRQFQSLRAEYEAIVREVEGDLGTLQWTEGRIPRPRFLPEKAKSHQTWKAGDRVANPEQGLWNHFPCEESEGEATWEEMVLKKSGESSANQGSLCRDHSSWLQMKQNRKPSQEKTRDTTRMENPEATDQRLPHSQPQLQELQYHRSHLAMELLWLQQAINSRKEYLLLKQTLRSPEAGSIREEPRVFLEHGEQACERDQSQPSAPLEDQSYRDRTTGELEQEDDSCHRVKSPHRSPGSLATTQKNIAGAKCREPCYSKSGPPSSIPSNSQALGDRLTKGPDDGRQTFGGTCLLQMKILEDQTPRGLKPRNHCPRKSRTQLSALYEDSNIKEMSPRKLDHKEPDCRTVRTQELGLSEDHIIWDGTLGGPEHSVLDLWRTKPPKGQAPTDRSSRDGTSNEPSHEGQKKQRTIPWRSKSPEILSSTKAGCTGEEQWRGRPWKTEPPG

SEQ ID NO: 11590 - DNA, 1087 bp, Homo sapiens
  CDS (40)..(627)
aaaaaaaaaaaaaaaaaaaaaaaaaaaaggtttttgaagatggcggccctcaaggctctggtgtccggctgtgggcggcttctccgtgggctactagcgggcccggcagcgaccagctggtctcggcttccagctcgcgggttcagggaagtggtggagacccaagaagggaagacaactataattgaaggccgtatcacagcgactcccaaggagagtccaaatcctcctaacccctctggccagtgccccatctgccgttggaacctgaagcacaagtataactatgacgatgttctgctgcttagccagttcatccggcctcatggaggcatgctgccccgaaagatcacaggcctatgccaggaagaacaccgcaagatcgaggagtgtgtgaagatggcccaccgagcaggtctattaccaaatcacaggcctcggcttcctgaaggagttgttccgaagagcaaaccccaactcaaccggtacctgacgcgctgggctcctggctccgtcaagcccatctacaaaaaaggcccccgctggaacagggtgcgcatgcccgtggggtcaccccttctgagggacaatgtctgctactcaagaacaccttggaagctgtatcactgacagagagcagtgcttccagagttcctcctgcacctgtgctggggagtaggaggcccactcacaagcccttggccacaactatactcctgtcccaccccaccacgatggcctggtccctccaacatgcatggacaggggacagtgggactaacttcagtacccttggcctgcacagtagcaatgctgggagctagaggcaggcagggcagttgggtcccttgccagctgctatggggcttaggccatgctcagtgctggggacaggagttttgcccaacgcagtgtcataaactgggttcatgggcttacccattgggtgtgcgctcactgcttgggaagtgcagggggtcctgggcacattgccagctgggtgctgagcattgagtcactgatctcttgtgatggggccaatgagtcaattgaattcatgggccaaacaggtcccatcctcttcatg

SEQ ID NO: 11591 - protein, 196 aa, Homo sapiens
MAALKALVSGCGRLLRGLLAGPAATSWSRLPARGFREVVETQEGKTTIIEGRITATPKESPNPPNPSGQCPICRWNLKHKYNYDDVLLLSQFIRPHGGMLPRKITGLCQEEHRKIEECVKMAHRAGLLPNHRPRLPEGVVPKSKPQLNRYLTRWAPGSVKPIYKKGPRWNRVRMPVGSPLLRDNVCYSRTPWKLYH

SEQ ID NO: 11592 - DNA, 2414 bp, Homo sapiens
  CDS (38)..(2215)
gaaatctgtacgaactattcaggctgcttttagaggcatgaaagttagacaaaaattgaaaaatgtatcagaggaaaagatggcagccattgttaaccaatctgcactctgctgttacagaagcaaaactcagtatgaagctgttcaaagtgaaggtgttatgattcaagagtggtataaagcttctggccttgcttgttcacaggaagcagagtatcattctcaaagtagggctgcagtaacaattcaaaaagctttttgtagaatggtcacaagaaaactggaaacacagaaatgtgctgccctacggattcagttcttccttcagatggctgtgtatcggagaagatttgttcagcagaaaagagctgctatcactttacagcattattttaggacgtggcaaaccagaaaacagtttttactatatagaaaagcagcagtggttttacaaaatcactacagagcatttctgtctgcaaaacatcaaagacaagtctatttacagatcagaagcagtgttatcattattcaagctagaagtaaaggatttatacagaaacggaagtttcaggaaattaaaaatagcaccataaaaattcaggctatgtggaggagatatagagccaagaaatatttatgtaaagtgaaagctgcctgcaagattcaagcctggtatagatgttggagagcacacaaagaatatctagctgtattaaaagctgttaaaattattcaaggttgcttctataccaaactagagagaacacggtttttgaatgtgagagcatcagcaattatcattcagagaaaatggagagctatacttcctgcaaagatagctcatgaacacttcttaatgataaaaagacatcgagctgcttgtttgatccaagcacattatagaggatataaaggaaggcaggtctctcttcggcagaaatctgctgctttgatcatacaaaaatatatacgagccagggaggctggaaagcatgaaaggataaaatatattgaatttaaaaaatctacagttatcctacaagcactggtgcgtggttggctagtacgaaaaagatttttagaacagagagccaaaattcgacttcttcacttcactgcagctgcatattatcacctgaatgctgttagaattcaaagagcctataaactttacctggctgtgaagaatgctaacaagcaggttaattcagtcatctgtattcagagatggtttcgagcaagattacaagaaaagagatttattcagaaatatcatagcatcaaaaagattgagcatgaaggtcaagaatgtctgagccagcgaaatagggctgcatcagtaatacagaaagcagtgcgccattttctcctccgtaaaaagcaggaaaaattcactagtggaatcattaaaattcaggcattatggagaggctattcttggaggaagaaaaatgattgtacaaaaattaaagctatacgactaagtcttcaagttgttaatagggagattcgagaagaaaacaaactctacaaaagaactgcacttgcacttcattaccttttgacatataagcacctttctgccattcttgaggccttaaaacacctagaggtagttactagattgtctccactttgttgtgagaacatggcccagagtggagcaatttctaaaatatttgttttgatccgaagttgtaatcgcagtattccttgtatggaagtcatcagatatgctgtgcaagtcttgcttaatgtatctaagtatgagaaaactacttcagcagtttatgatgtagaaaattgtatagatatactattggagcttttgcagatataccgagaaaagcctggtaataaagttgcagacaaaggcggaagcatttttacaaaaacttgttgtttgttggctattttactgaagacaacaaatagagcctctgatgtacgaagtaggtccaaagttgttgaccgtatttacagtctctacaaacttacagctcataaacataaaatgaatactgaaagaatactttacaagcaaaagaagaattcttctataagcattccttttatcccagaaacacctgtaaggaccagaatagtttcaagacttaagccagattgggttttgagaagagataacatggaagaaatcacaaatcccctgcaagctattcaaatggtgatggatacgcttggcattccttattagtaaatgtaaacattttcagtatgtatagtgtaaagaaatattaaagccaatcatgagtacgtaaagtgatttttgctctctgtgtacaacttttaaaatctgactttgttttaaaaaaacataaactgttcattacattcttcatttttatcatttatagttttatgcatgtaataaactaatatgtcataagatg

SEQ ID NO: 11593 - protein, 726 aa, Homo sapiens
MKVRQKLKNVSEEKMAAIVNQSALCCYRSKTQYEAVQSEGVMIQEWYKASGLACSQEAEYHSQSRAAVTIQKAFCRMVTRKLETQKCAALRIQFFLQMAVYRRRFVQQKRAAITLQHYFRTWQTRKQFLLYRKAAVVLQNHYRAFLSAKHQRQVYLQIRSSVIIIQARSKGFIQKRKFQEIKNSTIKIQAMWRRYRAKKYLCKVKAACKIQAWYRCWRAHKEYLAVLKAVKIIQGCFYTKLERTRFLNVRASAIIIQRKWRAILPAKIAHEHFLMIKRHRAACLIQAHYRGYKGRQVSLRQKSAALIIQKYIRAREAGKHERIKYIEFKKSTVILQALVRGWLVRKRFLEQRAKIRLLHFTAAAYYHLNAVRIQRAYKLYLAVKNANKQVNSVICIQRWFRARLQEKRFIQKYHSIKKIEHEGQECLSQRNRAASVIQKAVRHFLLRKKQEKFTSGIIKIQALWRGYSWRKKNDCTKIKAIRLSLQVVNREIREENKLYKRTALALHYLLTYKHLSAILEALKHLEVVTRLSPLCCENMAQSGAISKIFVLIRSCNRSIPCMEVIRYAVQVLLNVSKYEKTTSAVYDVENCIDILLELLQIYREKPGNKVADKGGSIFTKTCCLLAILLKTTNRASDVRSRSKVVDRIYSLYKLTAHKHKMNTERILYKQKKNSSISIPFIPETPVRTRIVSRLKPDWVLRRDNMEEITNPLQAIQMVMDTLGIPY

SEQ ID NO: 11594 - DNA, 2146 bp, Homo sapiens
  CDS (70)..(1668)
atggtgttcaccccacttcatcagcgtacataagttatctcttcttttggacccttattttatgccataatgcaacaagctttagaactagctttggatcgtgcagagtatgtcattgaaagtgcccgacagagacctcctaaaaggaaatacctatcaagtggaagaaaatctgtatttcaaaaactttatgacttgtatattgaagaatgtgaaaaagaacctgaagttaagaaattaagaagaaatgtgaacttgttagagaagcttgttatgcaagagactttgtcatgtttagtggtcaatctatacccaggaaatgagggatattctctgatgctcaggggaaaaaacggatcagattccgagaccattcgactgccctatgaagaaggagagttgcttgaatatttggatgcagaagaattacctcctattttggttgatctcctagaaaaatctcaggttaatatttttcattgcggatgtgtcatagcagaaatacgtgactacaggcagtccagtaacatgaaatctcctggttaccaaagtcggcacattctcttacgtccaacaatgcagactttaatttgtgatgtacattcaataacaagtgataaccacaaatggacccaggaagacaaacttttgcttgagagccagctcatcctagctacagctgaaccactctgtcttgatccttctatagcagtcacctgcactgcaaacagactgctctataacaagcaaaagatgaacactcgcccaatgaaacggtgtttcaagaggtattccagatcctctctgaatcggcagcaagatctatctcattgtccacctcctcctcagctgaggttacttgatttcttacaaaaaagaaaggaaagaaaagcaggtcagcattatgacctcaaaatttctaaggcaggaaattgtgtagatatgtggaaacggagtccctgtaatttggccataccttctgaagtagatgtggagaaatatgctaaagtggaaaagtctatcaaatctgatgactcacagccaacagtctggccagcccatgatgtaaaagatgattatgtatttgaatgtgaagctggtactcagtatcagaaaacaaagctgaccatcttgcagtcgcttggagatccactttactatggtaaaatacagccatgtaaagcagatgaagaaagtgacagccagatgtctccatcacactcgtccacagatgatcattcaaattggttcattattggatcaaagaccgatgctgagagggtagtcaatcagtaccaagaattagtccagaatgaagccaaatgtccggtcaagatgtcacacagctccagtggctcagccagtctgagtcaggtttctccagggaaagaaacagatcaaactgaaaccgtgtcagttcagtcttcggtattggggaagggtgtaaaacatcgacccccaccaatcaaacttccctcaagctcaggaaatagttcctcaggtaactattttacaccacaacagacaagcagctttctcaaatctccaactcctcctccttcttctaagccatcaagtattcctcggaaatcatctgtggatctcaatcaagttagcatgctttctccagctgccctatcacctgccagctcatcacaaagtgagtcataacttaaattcttcattaaatcttcataagcttttgcattagtgtttctcaagacagcttttttcaacctgtgaagtagtgatatctgaatgtactgtgtacccaaaatgtataagttgctagaagcttcaggcagagctcttgttgattgtatgtattatgtctctattgtaattgtacttgtttttctgtatctgtgtatgcattctgcgtgtacctttcttataggcttacaacctacacatctccttaaaaaaataacctggtagttacatgtggcaataagatttcaaaatattttttattccagtgtaccctaggatcattttgcatatttatgtaaattgtgtggctgatatgaaaaaaatgtcataagagttgttgctgcaggtcctatctttgtgtatatgtaagaagtcaactagttccaaggtggtgatacaataaactgaaaaacaatatttcaaaaacactcct

SEQ ID NO: 11595 - protein, 533 aa, Homo sapiens
MQQALELALDRAEYVIESARQRPPKRKYLSSGRKSVFQKLYDLYIEECEKEPEVKKLRRNVNLLEKLVMQETLSCLVVNLYPGNEGYSLMLRGKNGSDSETIRLPYEEGELLEYLDAEELPPILVDLLEKSQVNIFHCGCVIAEIRDYRQSSNMKSPGYQSRHILLRPTMQTLICDVHSITSDNHKWTQEDKLLLESQLILATAEPLCLDPSIAVTCTANRLLYNKQKMNTRPMKRCFKRYSRSSLNRQQDLSHCPPPPQLRLLDFLQKRKERKAGQHYDLKISKAGNCVDMWKRSPCNLAIPSEVDVEKYAKVEKSIKSDDSQPTVWPAHDVKDDYVFECEAGTQYQKTKLTILQSLGDPLYYGKIQPCKADEESDSQMSPSHSSTDDHSNWFIIGSKTDAERVVNQYQELVQNEAKCPVKMSHSSSGSASLSQVSPGKETDQTETVSVQSSVLGKGVKHRPPPIKLPSSSGNSSSGNYFTPQQTSSFLKSPTPPPSSKPSSIPRKSSVDLNQVSMLSPAALSPASSSQSES

SEQ ID NO: 11596 - DNA, 2370 bp, Homo sapiens
  CDS (261)..(1271)
aaaagaagcagcacctgttgagagaagtgacagttgaggaaaataatgcttccccacattttgagccagatctccatattgaggacctgaggaaatcccttggaacaaaccagaccaaagaggtgtcttcttctctctcccagagcaaggaggacttatacttggacagcctgtcctcccacaatgtctggcacctcctctctgctgagggggtagccctccgtagtgccaaggagttccttgtgcggcagacacgctccatgcggaggcggcagacagctctgaaagctgcccagcagcattggcgccatgagctggccagtgcgcaggaggtggccaaagacccaccaggcatcaaggccctggaagatatgcgcaagaacctggagaaggagaccaggcacctggatgagatgaagtcggccatgcggaaaggccacaacctgctgaagaagaaagaggagaagctgaatcagttggagtcctctctttgggaagaggcctcagatgagggcactctgggaggatcccccaccaagaaggcagtaaccttcgacctcagtgacatggacagcctgagcagtgaaagttctgaatctttttccccgcctcaccgtgagtggtggcggcagcagaggatcgactcaaccccgagtctcacctcccgcaagatccacgggcttagccactccctccggcagatcagcagccagctgagcagtgtcctcagcatcctggacagcctcaaccctcagtcgccgccgccgctcctcgcctccatgccagcccagctccctccccgggaccctaagagcacccccacccccacctactatggctccctggccaggttctcagccttatcatctgctacacccacgtccacccaatgggcctgggattcagggcaggggcccaggctcccctcctctgtggctcaaacggtggacgacttcctgttggagaagtggcgcaagtattttccatctggcatcccgctgctcagcaacagccccaccccgctggagagcaggctgggttacatgtctgccagtgagcagctccggctcctacagcactcccattcgcaagtccctgaggcgggcagcaccacctttcagggcataattgaggccaaccggaggtggctggaacgtgtcaagaatgaccccaggttacctctcttctcttcaacacccaagccaaaagctactttgagcctcctgcagctgggccttgatgagcacaacagagtgaaggtgtatcgcttctgaggccctgagcaggggcttggggcagcccagcctctcctccacccagaccaagtgcctgaggagctgcctgccttcttccatctgagaaagcaccctccttccccctttgacttgcaggagccaccagggaccagggggttgagtggaacagtaaagccacacattctgtgactatataacctatctcgggctaaaatgtgtggacttgtacgagctcttgtcattgacatggcaagctgatggcgtgcggtggctgcggggtatcagggccgggagccctttgggaggaagggaggcgttagaggagctgccttcggaggctcagggagtccctttggagctggttgtttccttggccctgcagcgcactgctcggggctcccaaggaggttgtgtgtatggttcttaattcatcaggacaaagacccccagcatgtgtgtaccctgggacccgatttctctgggcccacatctatctccaatacctcagcctcagatcagaccctttcttttttgtctttcttctcttaatttttaaatgcctcttttcttgagcattccatctctctttttgaccctctcaggactgggcttagctgtccagagccctgccggagggtgctgggggctgtccctctgcaggcactgtgttttcctcaggggctgtcctcagaacacccctcctgctccctggggctcctcagggagccatttcagctggagtctcaggtctcaaaaacaacttctccaggaggccaaaaaaagactgggttggcttctggtcctcatgacggcttttatcctcctgggacactttgggtatattcatgggcattgtttccatctgtcttttctacctgtgccacccctgccctgattccacggctgcctcaggcaggcaggcgaggagctaggccggtgcccggccctggcagcaaggggtctttgtgcagttggagatgctgccgttgtggcagagcgtcctgcagccccgcttccatcagcaggctctggggtgggggctttgcaggggatgctctctgatgtttgttccgttgtttaaataaaatgcacttatttttgtttttttttttgc

SEQ ID NO: 11597 - protein, 337 aa, Homo sapiens
MRRRQTALKAAQQHWRHELASAQEVAKDPPGIKALEDMRKNLEKETRHLDEMKSAMRKGHNLLKKKEEKLNQLESSLWEEASDEGTLGGSPTKKAVTFDLSDMDSLSSESSESFSPPHREWWRQQRIDSTPSLTSRKIHGLSHSLRQISSQLSSVLSILDSLNPQSPPPLLASMPAQLPPRDPKSTPTPTYYGSLARFSALSSATPTSTQWAWDSGQGPRLPSSVAQTVDDFLLEKWRKYFPSGIPLLSNSPTPLESRLGYMSASEQLRLLQHSHSQVPEAGSTTFQGIIEANRRWLERVKNDPRLPLFSSTPKPKATLSLLQLGLDEHNRVKVYRF

SEQ ID NO: 11598 - DNA, 2130 bp, Homo sapiens
  CDS (186)..(1262)
aagcgcgttcccggcagctgcgggctccgaggccagagagaaaagactgcgaggtggccgcagctgtggccggagagcacaaagaatgaaccagcagtggaagagaaaatactgtaagctggctgactgctggtgaagaaaatgctttatttttgtggcaggcatctgtgggatctgtaatagaaatgatggctggctgtggtgaaattgatcattcaataaacatgcttcctacaaacaggaaagcgaacgagtcctgttctaatactgcaccttctttaaccgtccctgaatgtgccatttgtctgcaaacatgtgttcatccagtcagtctgccctgtaagcacgttttctgctatctatgtgtaaaaggagcttcatggcttggaaagcggtgtgctctttgtcgacaagaaattcccgaggatttccttgacaagccaaccttgttgtcaccagaagaactcaaggcagcaagtagaggaaatggtgaatatgcatggtattatgaaggaagaaatgggtggtggcagtacgatgagcgcactagtagagagctggaagatgctttttccaaaggtaaaaagaacactgaaatgttaattgctggctttctgtatgtcgctgatcttgaaaacatggttcaatataggagaaatgaacatggacgtcgcaggaagattaagcgagatataatagatataccaaagaagggagtagctggacttaggctagactgtgatgctaataccgtaaacctagcaagagagagctctgctgacggagcggacagtgtatcagcacagagtggagcttctgttcagcccctagtgtcttctgtaaggcccctaacatcagtagatggtcagttaacaagccctgcaacaccatcccctgatgcaagcacttctctggaagactcttttgctcatttacaactcagtggagacaacacagctgaaaggagtcataggggagaaggagaagaagatcatgaatcaccatcttcaggcagggtaccagcaccagacacctccattgaagaaactgaatcagatgccagtagtgatagtgaggatgtatctgcagttgttgcacagcactccttgacccaacagagacttttggtttctaatgcaaaccagacagtacccgatcgatcagatcgatcgggaactgatcgatcagtagcagggggtggaacagtgagtgtcagtgtcagatctagaaggcctgatggacagtgcacagtaactgaagtttaaataaaaatgtcttcagctccatgctcaaggttgaaagggttacctgtaaatttctgcccacataacattatactcatccctagtagtgcattttgggagttggggtgggaaggggtatgggaaggatagactcataattaaaatgtctaacatgtctctgttgagaaatttatttaatgtaaggaacttgggtgttaatagttgagagctgtttagtaataacccagttttcttgaggtctgtttactttatactttttaaaaacttctgtagttcttttggccagtgtgtttgtattatctgtgcattaatggtcctcatctgactcctgcattgtgtcttatttttctgcatggattggcataagaccattactaaaatttggcacctgtgagatgtttgatattatgaacaggaaacataatttaatgtatgaatagatgtgaatttgggatttcaaaatagatgaataacaactattttatagtaaagttattgaaatggaaatgaaaacagccagtaacttatgtttcagaatgtttgtaacacacttcatggtgttcccataggctttgctgtctagtcttatagtttgaggtttttttggtctgcatttttctttttgattacaaaatttataatttaataaatactagagtttatcaaaaacagtttgtctcttgtttgagggtggaaagggtgtggaaacattttgacatttgtgaccaaaggtcacttaaaaagtggtggttttaattggttgttttcagcttaatcacctgctcagaaaagtttgatttttttcttagagattatttaaacagaatctataggcagtgtgtatataataaacatgtatggaaat

SEQ ID NO: 11599 - protein, 359 aa, Homo sapiens
MMAGCGEIDHSINMLPTNRKANESCSNTAPSLTVPECAICLQTCVHPVSLPCKHVFCYLCVKGASWLGKRCALCRQEIPEDFLDKPTLLSPEELKAASRGNGEYAWYYEGRNGWWQYDERTSRELEDAFSKGKKNTEMLIAGFLYVADLENMVQYRRNEHGRRRKIKRDIIDIPKKGVAGLRLDCDANTVNLARESSADGADSVSAQSGASVQPLVSSVRPLTSVDGQLTSPATPSPDASTSLEDSFAHLQLSGDNTAERSHRGEGEEDHESPSSGRVPAPDTSIEETESDASSDSEDVSAVVAQHSLTQQRLLVSNANQTVPDRSDRSGTDRSVAGGGTVSVSVRSRRPDGQCTVTEV

SEQ ID NO: 11600 - DNA, 1199 bp, Homo sapiens
  CDS (37)..(717)
ctcttttagcggcggcggcttcttccgtgggacaatatgttcaagagaatggccgaatttgggcctgactccggcgggagagtaaagggtgttactatcgttaaaccaatagtttacggtaatgttgctcggtattttggaaagaaaagagaagaagatgggcacactcatcagtggacagtatatgtgaaaccatatagaaatgaggatatgtcagcatatgtgaagaaaatccagtttaaattacatgaaagctatggcaatcctttaagagttgttactaaacctccatatgaaattactgaaacaggatggggtgaattcgaaataatcatcaaaatatttttcattgaccctaatgaaagacctgtaaccctgtatcatttgctaaagctgtttcaatcagacaccaatgcaatgctggggaaaaagacagtggtttcagagttctatgatgaaatgatatttcaagacccaacagcaatgatgcaacaattattgacaacatctcgtcagctaacattaggagcctataagcatgaaacagaatttgcagagcttgaagtgaaaaccagagaaaaattagaagctgctaagaaaaaaacaagctttgagattgcagagcttaaggagagattaaaagcaagtcgtgaaactataaattgtttaaaaaatgaaatcagaaaacttgaagaagatgaccaagcaaaagacatataaacagttctcatgagaacttggtagtaagctaaactgaaaataaggtgggcttcactggagaaatggacttactgcaaatgctgtgatgtttcttagaggaacttcatatacagctgttgaccatgaatttcttagcaataggaatttgtactatttaagcaatctttagtggaaaatatgtgtgtaagaatggatgctatataggtattttaccaacccattttaagaaaattctatgatattaagcacagtttttaaaaatgtttattgtagtatatgtatagcttattacccttttgacaggcatcaaaatttcattataaagtattacttgtacaaattttgtacttctttagtggctagaattagtgaagaaacttaatgtgtatatttaatttcttcaagttcttacctgcccccatccttttttgtatatgatgtgtccagtaagtattcaataaatgtagtttacagatcct

SEQ ID NO: 11601 - protein, 227 aa, Homo sapiens
MFKRMAEFGPDSGGRVKGVTIVKPIVYGNVARYFGKKREEDGHTHQWTVYVKPYRNEDMSAYVKKIQFKLHESYGNPLRVVTKPPYEITETGWGEFEIIIKIFFIDPNERPVTLYHLLKLFQSDTNAMLGKKTVVSEFYDEMIFQDPTAMMQQLLTTSRQLTLGAYKHETEFAELEVKTREKLEAAKKKTSFEIAELKERLKASRETINCLKNEIRKLEEDDQAKDI

SEQ ID NO: 11602 - DNA, 2342 bp, Homo sapiens
  CDS (54)..(1388)
gctccggcggcttcgctgctagctcgcggcgacgtcgggccgattttcccaggatgacagagctgaggcagagggtggcccatgagccggttgcgccacccgaggacaaggagtcagagtcagaagcaaaggtagatggagagactgcatcggacagtgagagccgggcagaatccgcacccctgccagtctctgcagatgataccccggaggtcctcaatagggccctttccaacttgtcttcaagatggaagaactggtgggtgagaggcatcctgactttggccatgattgcatttttcttcatcatcatttacctgggaccaatggttttgatgataatcgtgatgtgcgttcagattaagtgtttccatgagataatcactattggctacaacgtctaccactcatatgatctgccctggttcaggacgctcagctggtactttctcctgtgtgtaaactatttcttctatggtgagacagtgacggattacttcttcaccctggtccagagagaagagcctttgcggattctcagtaaataccaccggttcatttcctttactctctatctaataggattctgcatgtttgtactgagtctggccaagaagcattatcgactgcagttctacatgtttggctggacccatgtgacattgctgattgttgtaacacagtcacatcttgttatccacaacctatttgaaggaatgatctggttcattgtccccatatcttgtgtgatctgtaatgacatcatggcctatatgtttggctttttctttggtcggaccccactcatcaagctgtccccgaagaagacctgggaaggcttcattgggggcttctttgctactgtggtgtttggccttctgctgtcctatgtgacgtccgggtacagatgctttgtctgccctgtggagtacaacaatgacaccaacagcttcactgtggactgtgagccctcggacctgtttcgcctgcaggagtacaacattcctggggtgatccagtcagtcattggctggaaaacggtccggatgtaccccttccagattcacagcatcgctctctccacctttgcctcgctcattggcccctttggaggattcttcgcaagtggattcaaacgagcctttaaaatcaaagactttgccaataccattcctggccatggaggcatcatggatcgctttgactgccagtatctgatggccacctttgtcaatgtatacatcgccagttttatcagaggccctaacccaagcaaactgattcagcagttcctgactttacggccagatcagcagctccacatcttcaacacgctgcggtctcatctgatcgacaaagggatgctgacatccaccacagaggacgagtaggggccacccagggccaggagaacaggaacagaactgagcaggggcaggtctccaaggcaagcccagctggtgtgacttagacaatgacgaggcttcaactcactgtctttttttttttttttggagggtattttttatttgtgggttcaaaaaatctgtatatacagtctatgtgtttagaatttgtgttgtaagtaaactacagctttgagttggaaagaagtcacgggttgtaaaaccatttggatttttttaaaacaaaagtattaataatctggaagacagtgttgcccaggtcaggagtgttttcttggtggttccagcccccatcaattgaactgtttctgggctcagtcagacacagacattcatctgtgtctgaccaaatcaggggacttccccacctgtggtgggaggcacagcttagatgttttgtacacctggtcttttctagaaatccctgcttggagctgcagaagggttgccttctgtaggtcggaggaatggaggcttactaaccaggtaagccttctatgcatccacaccaaaatcctgcagaatgtaagtaagctctgctttataagatgggttcaccttcatcgcagactgaaagtttcagtttttatttttttcagaaagcacgaaaaattatttataatagtctggagaaaaaacacactgtaatatttcaagtgtatgcagtagaatgtactgtaactgagccctttcccacatgtctaggctccaatgtctcctgtaggtccacctaactgtgtgttttcagggacaatgccatccatgtttgtgctgtagacttgctgctgctgaatcctttctggggactttctcatcgggcagggagcagagggcttctcgttcatgcaccctttgcctgaacacccatgtagctgctgtgttgtgtatatattactcttaagaggaaaaaaaaat

SEQ ID NO: 11603 - protein, 445 aa, Homo sapiens [sequence omitted]

SEQ ID NO: 11604 - DNA, 1208 bp, Homo sapiens
  CDS (146)..(886)
gtgcgcccgccccctctggggcggagagactcagcccctgcccctcagcggataacctgggactgaccgttccctggggatccgacgggccccagaggacccacgcctgagccccgtgcgactcgtggcctttgggctagaagccatggacgccttcacccgcttcaccaaccagacccagggccgggaccgactcttcagagccactcagtacacatgcatgttgcttagatatttgttagagcccaaagctggcaaagagaaggtggtaatgaagctcaagaaactggagtccagtgtgagcactggtcgtaaatggttcagactaggcaatgtggtacatgctatacaggcaactgagcagagcattcatgccactgacctggtacctcgcttatgcttaacattagccaacctgaaccgtgtgatttatttcatctgtgacaccatcctctgggtgaggagcgtaggtctcacctctggcatcaacaaagagaaatggcgaacgagggctgctcaccactactactattctcttctgctgagcctggtcagggatctgtatgaaatctccctgcagatgaaacgagttacatgtgacagggcaaagaaagagaaatcagcatcccaggatcctctttggttcagcgtggctgaggaggaaacagaatggctccaatcctttctacttcttttattccgatctctgaagcagcatcctcccttgctcctggacacagtgaagaacctttgtgatatcctgaaccctttggaccagctggggatctataaatccaatcctggcatcattggacttggaggtcttgtgtcctctatagcaggcatgatcactgtggcatatcctcagatgaagctgaagacccgttagggtgtttttaggcttggaactagtacctactttaaaagatggcctcttggtgggacagacatttgtataagtcacaggccatgtcatactgtgcttaagttcttgttcatgtgagcatttaacaacctgtgatgtgggcagagatgaggccaagaacggagaagggaggagcatgaagagttgtatgtttttggagtgctggagtgacttgtgaatttctgaatattttcccttcatctaacattgattgaacatctcttatgtgcatagtgggagcttagtatttgctgaatgaataaaaattgaaaggaaaaaattt

SEQ ID NO: 11605 - protein, 247 aa, Homo sapiens
MDAFTRFTNQTQGRDRLFRATQYTCMLLRYLLEPKAGKEKVVMKLKKLESSVSTGRKWFRLGNVVHAIQATEQSIHATDLVPRLCLTLANLNRVIYFICDTILWVRSVGLTSGINKEKWRTRAAHHYYYSLLLSLVRDLYEISLQMKRVTCDRAKKEKSASQDPLWFSVAEEETEWLQSFLLLLFRSLKQHPPLLLDTVKNLCDILNPLDQLGIYKSNPGIIGLGGLVSSIAGMITVAYPQMKLKTR

SEQ ID NO: 11606 - DNA, 1128 bp, Homo sapiens
  CDS (95)..(1018)
atcgctgcggttgcgagcgctgtagggagcctgtgctgtgccgcgcagttaggcagcagcagccgcggagcagtagccgccgtgggagggagccatgaagcattacgaggtggagattctggacgcaaagacaagggagaagctgtgtttcttggacaaggtggagccccacgccaccattgcggagatcaagaacctcttcactaagacccatccgcagtggtaccccgcccgccagtccctccgcctggaccccaagggcaagtccctgaaggatgaggatgttctgcagaagctgcccgtgggcaccacggccacactgtacttccgggacctgggggcccagatcagctgggtgacggtcttcctaacagagtacgcggggccccttttcatctacctgctcttctacttccgagtgcccttcatctatggccgcaaatatgactttacgtccagtcggcatacagtggtgcacctcgcctgcatctgtcactcattccactacatcaagcgcctgctggagacgctcttcgtgcaccgcttctcccatggcactatgcctttgcgcaacatcttcaagaactgcacctactactggggcttcgccgcgtggatggcctattacatcaatcaccctctctacactccccctacctacggagctcagcaggtgaaactggcgctcgccatctttgtgatctgccagctcggcaacttctccatccacatggccctgcgggacctgcggcccgctgggtccaagacgcggaagatcccataccccaccaagaaccccttcacgtggctcttcctgctggtgtcctgccccaactacacctacgaggtggggtcctggatcggtttcgccatcatgacgcagtgtctcccagtggccctgttctccctggtgggcttcacccagatgaccatctgggccaagggcaagcaccgcagctacctgaaggagttccgggactacccgcccctgcgcatgcccatcatccccttcctgctctgagcgctcacccctgctgaggctcagcccctcaacccggtggcattctgggggaggagtggggcccacagctctccagcacccggaataaagcccgcctgccccagtcg

SEQ ID NO: 11607 - protein, 308 aa, Homo sapiens [sequence omitted]

SEQ ID NO: 11608 - DNA, 2213 bp, Homo sapiens
aaggaactttaaattcttatatttacttttctctcagtaaattgttaaattttcactcagcaaaagattggcatttgttaagtgttctatatttagtactaaaatcacagtcatgaaatcatagtcataaaatggtcttcacacagcagtcatccgtgtcatttatcattttgtaatattaaattatggcaattttatttcaaactaaagtttgaacaccggaaagtcattactcagtgatttgtaatttgggacttggattatttatctagagatgtttgtatattttgtcagtaactaatactgcgctgccatcatggtgactgtcatggttctacagaaatgccctccatgtgtccctctaatgttgcatgtttcagtgggttggaagttttgtatatttattgtattaacacagagtgtcataaaataaaatgctgtttactggatgtttgtttgtataattttgaacactataatagcaattcagagacagacattgttaaaggtttgatgtatatagaaattccatgtttgattttttaaaatatgtgtataagtctgtcatgtgctaaacaaaataatatgaaagacctagttaaaaattctaaccaatgtaaaatgaccatttttctgttgcattagacctttacaggtaatggaacatgagcttcacccatattaaatattttggcccctttaaggtcaaaatacagatcatctagaagttagattcaaaatggaaaacctattcatggctcagatttttcattgtgggttaaaaatgggtgtctctgtactagtattgtatttattcaattgaacttgtattctgatttctaaccttgctacctattgctgttttatgtactgatgaaagtacctatttgtgtatattggatttttcacttggttagctaaagaagatgtaaaaatatctaaaataatgttcatggtgaatcttattttgagaaatacatgttaaaaaaggaacagtattctttattttctgggtgttatatttaaaaaagcaagtttggatttttacacctaatttactaggaaaatattttattctgtaattcatgttaagattatgtatggtttgcattttaaggggatttatgttaggttaattagttgtttctgtaaatcatttgtaatagcatagtgctttttactcattgctgtatctttttctgaaaacactgttgttaacatctaattcagtatccttattggtacaaatctgtgtttggcatgactgtttatatacagaatttgttacattttgagcattttttcccctgcttatgtataccttagagttaccatggctgtcatataccatttcactatatctcctttcagtttttccttaaggaaaatgtttagaggaatttgttcatttcatgtgattaagccctttagagatgaaataagattggttaattttaaaaaaattgaggatggttaaaaaatagaaaacaccttactttgatacattttaaagtacaatagtatacatttatttagagtagactaatgtgttttaaacatgagttgttttaaatacttttttattgagctaaaaagttttatctcacatattaagtattacagaaagtgaagtattttggctagaattttagggcatattttataaagcagcatgcctgtaatattggtgggtatttttaaactttaggactttatcacagtatgtagagagctagaaataaatctagaaactttctaagccaggtattgccactaacctgtcttatataagcagatacctcttatttgaagattgtaggaaaatagagaaagactgttctccagttttctcacccccgctgtgggttttatatttacaatttaactttggggtttgggtaagacaaacatttaatgtataggattttggccaggtgtggtggctcacgcctgtaatcccagcactttgggaggccaaggtgggcggatcacgaggtcaggagatcgaaaccatcctggctaacatggtgaaaccccatctctactaaaaatacaaaaaaaaaattagctgagcatggtggcgggcgcctgtagtcccagctacttgggaggctgaggcaggagaatgacgtgaacctgggaggcggagcttgcagtgagccgagatctctccactgcactcctgcctgggcgacagagcgagactccatctc

SEQ ID NO: 11609 - DNA, 2193 bp, Homo sapiens
  CDS (26)..(2191)
ctcggttcctctttcctcgctcaagatggcgctgctcgcgatgcattcttggcgctgggcggccgcggcggctgctttcgaaaagcgccggcactccgcgattctgatccggcctttagtctctgttagcggctcaggtccgcagtggaggccacatcaactcggcgccttgggaaccgctcgagcctaccagcagattccagagtcattaaaaagtatcacatggcagagattgggaaaaggcaattcaggacagttcttagatgctgcaaaggctctccaggtatggccactgatagaaaagaggacatgttggcatggtcatgcaggaggaggactccacacagacccaaaagaagggttaaaagatgttgatactcggaaaatcataaaagcaatgctttcttatgtgtggcccaaagacaggccagatctacgagctagagttgccatttcgctgggatttttgggtggtgcaaaggccatgaatattgtggttcccttcatgtttaaatatgctgtagacagcctcaaccagatgtcgggaaacatgctgaacctgagtgatgcaccaaatacagttgcaaccatggcaacagcagttctgattggctatggtgtatcaagagctggagctgctttttttaacgaagttcgaaatgcagtatttggcaaggtagcccagaattcaatccgaagaatagccaaaaatgtctttctccatcttcacaacctggatctgggttttcacctgagcagacagacgggagctttatctaaggctattgacagaggaacaaggggtatcagttttgtcctgagtgctttggtatttaatcttcttcccatcatgtttgaagtgatgcttgtcagtggtgttttgtattacaaatgcggtgcccagtttgctttggtaacccttggaacacttggtacatacacagcattcacagttgcagtcacacggtggagaactagatttagaatagaaatgaacaaagcagataatgatgcaggtaatgctgctatagactcactgctgaattatgaaactgtgaagtattttaataatgaaagatatgaagcacagagatatgatggatttttgaagacgtatgagactgcttcattgaaaagtacctctactctggctatgctgaactttggtcaaagtgctattttcagtgtcggtttaacagctataatggtgctcgccagtcagggaattgtggcaggtacccttactgttggagatctagtaatggtgaatggactgctttttcagctttcattacccctgaactttctgggaactgtatatagagagactagacaagcactcatagatatgaacaccttgtttactctactcaaggtagacacccaaattaaagacaaagtgacggcatctccccttcagatcacaccacagacagctaccgtggcctttgataatgtgcattttgaatacattgagggccagaaagtccttagtggaatatcctttgaagtccctgcaggaaagaaagtggccattgtaggaggtagtgggtcagggaaaagcacaatagtgaggctattatttcgcttctatgagcctcaaaagggtagcatttatcttgctggtcaaaatatacaagatgtgagcctggaaagccttcggagggcagtgggagtggtacctcaggatgctgtcctcttccataatactatttattacaacctcttatatggaaacatcagtgcttcacctgaggaagtgtatgcagtggcaaaattagctggacttcatgatgcaattcttcgaatgccacatggatatgacacccaagtaggggaacgaggactcaagctttcaggaggagaaaagcaaagagtagcaattgcaagagccattttgaaggaccccccagtcatactctatgatgaagctacttcatcgttagattcgattactgaagagactattcttggtgccatgaaggatgtggtcaaacacagaacttctattttcattgcacacagattgtcaacagtggttgatgcagatgaaatcattgtcttggatcagggtaaggtagccgaacgtggtacccaccatggtttgcttgctaaccctcatagtatctattcagaaatgtggcatacacagagcagccgtgtgcagaaccatgataaccccaaatgggaagc

SEQ ID NO: 11610 - protein, 722 aa, Homo sapiens
MALLAMHSWRWAAAAAAFEKRRHSAILIRPLVSVSGSGPQWRPHQLGALGTARAYQQIPESLKSITWQRLGKGNSGQFLDAAKALQVWPLIEKRTCWHGHAGGGLHTDPKEGLKDVDTRKIIKAMLSYVWPKDRPDLRARVAISLGFLGGAKAMNIVVPFMFKYAVDSLNQMSGNMLNLSDAPNTVATMATAVLIGYGVSRAGAAFFNEVRNAVFGKVAQNSIRRIAKNVFLHLHNLDLGFHLSRQTGALSKAIDRGTRGISFVLSALVFNLLPIMFEVMLVSGVLYYKCGAQFALVTLGTLGTYTAFTVAVTRWRTRFRIEMNKADNDAGNAAIDSLLNYETVKYFNNERYEAQRYDGFLKTYETASLKSTSTLAMLNFGQSAIFSVGLTAIMVLASQGIVAGTLTVGDLVMVNGLLFQLSLPLNFLGTVYRETRQALIDMNTLFTLLKVDTQIKDKVTASPLQITPQTATVAFDNVHFEYIEGQKVLSGISFEVPAGKKVAIVGGSGSGKSTIVRLLFRFYEPQKGSIYLAGQNIQDVSLESLRRAVGVVPQDAVLFHNTIYYNLLYGNISASPEEVYAVAKLAGLHDAILRMPHGYDTQVGERGLKLSGGEKQRVAIARAILKDPPVILYDEATSSLDSITEETILGAMKDVVKHRTSIFIAHRLSTVVDADEIIVLDQGKVAERGTHHGLLANPHSIYSEMWHTQSSRVQNHDNPKWE

SEQ ID NO: 11611 - DNA, 2608 bp, Homo sapiens
  CDS (204)..(1040)
tgtgctcggtggcccaggtgttcatcctgggcttgccctcccgcatcgcctcagtgtggtttgggcccaaagaggtgtccacagcttgtgccaccgccgtgctgggcaatcagcttggaactgcagttggctttttgctaccaccagttttagtacccaacacacagaatgacacaaatctcctggcttgtaatatcagcaccatgttttatggaacatcagctgttgccacacttttatttattttaacagcaattgccttcaaagaaaaacctcggtatccaccaagtcaggctcaagcagctcttcaagacagtccccctgaagagtactcctataagaaatcaataagaaacctgtttaaaaacattccttttgtccttctgttgatcacttatggtatcatgactggtgccttttattcagtctcaacgttattaaatcaaatgatattgacatattatgagggagaagaagtcaatgctggaaggattgggctaacgctagtagtagctggaatggtgggctctattctttgtggcttatggctggattatactaaaacatacaaacagactactctgatagtttatattttgtcttttattggaatggttatctttactttcacattggaccttagatatattatcatcgtgtttgttactggaggggtgcttggcttcttcatgactggttacctccctttgggttttgaatttgctgttgaaatcacttaccctgaatctgaaggtacttcatctggtcttcttaatgcttctgcacagatatttggaattttgttcacattggctcaaggaaagctcacatcagactatggtcctaaggcagggaacatttttctctgtgtctggatgtttataggcatcatattaacagcattaatcaagtctgatctgcgaagacacaacataaatataggaattacaaatgttgatgttaaagctataccagctgacagtcccacagaccaagaaccaaaaacggttatgttgtccaagcagtcagaatcagcaatttgaagagaaaggcaaagttactgtcctgtagtaattggggacaatgtgatcatccttggagagagatgtgagcaccaaggctgggtttgtatgtggtgggggaataaacacacttacttgaaaattaccatatgaactctaaatgcataattattattttgcttaattgttaaattaagggaaattttcttaaaattcttctgtttacatcatgttaacactactgtttatctaattagtatccggtttttagtctcatattgtatctgaaagtaagcttcttgacgtttactttttaaaagtcgatgtttttcttttttgtagaaaatggaagcttagaatactttttaaagtgataatatggggtgttcagtccccataagatataatagttcatgcagtttatatattaaagtatccagtggaactaaatgtacaatatattcctaattggctgcctttttcactgtgctgaccagctgttcaagccacttcagtttgagtacaacataccaacatgacacttctcacccacaaaggacagcattgggatcaggctttcagatgacctctaagatttttcccatttattgtactcttgttacaaagtactttttaacacatgcagtcaatggctataaaaactattctgtgtacagattctacccagactttggtcttagaattatgttctaattaaggagcctggttacaggttcattctgtcttgagttcttttctgtgctgcctttctatcatggataaatgctaacgctgtattttttcactccaacttgagatagagtagttttgtacccattgccttttttttcttttaaactctctttttttttttttcctgatgtgtaactttctagtaagataatttcatcatgtatgttactggctatttcatgatttcatgtatcacatcgtatattttgccttgaagattcctgaaataaggaaatctataataacttcagatagcctacatgtccccatttagtggagacctcttgaatgctatttgaattctgcagtatcatttttatgaccattctcctttgaggaatactatgcccaggtacatgctctatcagtgtgccgggagagtggattcttttcttcactgcagagtcatcacactgttagaatagtctgctcttttacatgctcaggtagggaaaataggaccaaatatatttccacagtgcctaccactgtgtcatgtttacagtgaaagtttaaatattgttgatgtcctgactctgtgagctcatagggagtatcttcatagtaatgacatttgatcagccataaaatttacattatgttcatatgcacccaaaaaagctagtcaggtaatgaatacccttgaagtgaatagcaattttgatttaggcagtgtgttaggccatccttgcattgctataaagaaatatttaggctgggcgtggtggctcacgcctgtaatcccagcactttgggaggctgaagcgtgtggatcacctgaggtcaggagttcaagaccagcctggccaacatggtaaaaccccatctctact

SEQ ID NO: 11612 - protein, 279 aa, Homo sapiens
MFYGTSAVATLLFILTAIAFKEKPRYPPSQAQAALQDSPPEEYSYKKSIRNLFKNIPFVLLLITYGIMTGAFYSVSTLLNQMILTYYEGEEVNAGRIGLTLVVAGMVGSILCGLWLDYTKTYKQTTLIVYILSFIGMVIFTFTLDLRYIIIVFVTGGVLGFFMTGYLPLGFEFAVEITYPESEGTSSGLLNASAQIFGILFTLAQGKLTSDYGPKAGNIFLCVWMFIGIILTALIKSDLRRHNINIGITNVDVKAIPADSPTDQEPKTVMLSKQSESAI

SEQ ID NO: 11613 - DNA, 1626 bp, Homo sapiens
  CDS (26)..(877)
aactgagtgtgacgtcagaatcaccatggccagctatccttaccggcagggctgcccaggagctgcaggacaagcaccaggagcccctccgggtagctactaccctggaccccccaatagtggagggcagtatggtagtgggctaccccctggtggtggttatgggggtcctgcccctggagggccttatggaccaccagctggtggagggccctatggacaccccaatcctgggatgttcccctctggaactccaggaggaccatatggcggtgcagctcccgggggcccctatggtcagccacctccaagttcctacggtgcccagcagcctgggctttatggacagggtggcgcccctcccaatgtggatcctgaggcctactcctggttccagtcggtggactcagatcacagtggctatatctccatgaaggagctaaagcaggccctggtcaactgcaattggtcttcattcaatgatgagacctgcctcatgatgataaacatgtttgacaagaccaagtcaggccgcatcgatgtctacggcttctcagccctgtggaaattcatccagcagtggaagaacctcttccagcagtatgaccgggaccgctcgggctccattagctacacagagctgcagcaagctctgtcccaaatgggctacaacctgagcccccagttcacccagcttctggtctcccgctactgcccacgctctgccaatcctgccatgcagcttgaccgcttcatccaggtgtgcacccagctgcaggtgctgacagaggccttccgggagaaggacacagctgtacaaggcaacattcggctcagcttcgaggacttcgtcaccatgacagcttctcggatgctatgacccaaccatctgtggagagtggagtgcaccagggacctttcctggcttcttagagtgagagaagtatgtggacatctcttcttttcctgtccctctagaagaacattctcccttgcttgatgcaacactgttccaaaagagggtggagagtcctgcatcatagccaccaaatagtgaggaccggggctgaggccacacagataggggcctgatggaggagaggatagaagttgaatgtcctgatggccatgagcagttgagtggcacagcctggcaccaggagcaggtccttgtaatggagttagtgtccagtcagctgagctccaccctgatgccagtggtgagtgttcatcggcctgttaccgttagtacctgtgttccctcaccaggccatcctgtcaaacgagcccattttctccaaagtggaatctgaccaagcatgagagagatctgtctatgggaccagtggcttggattctgccacacccataaatccttgtgtgttaacttctagctgcctggggctggccctgctcagacaaatctgctccctgggcatctttggccaggcttctgccctctgcagctgggacccctcacttgcctgccatgctctgctcggcttcagtcgccaggagacagtggtcacctctccctgccaatactttttttaatttgcattttttttcatttggggccaaaagtccagtgaaattgtaagcttcaataaaaggatgaaactctgg

SEQ ID NO: 11614 - protein, 284 aa, Homo sapiens
MASYPYRQGCPGAAGQAPGAPPGSYYPGPPNSGGQYGSGLPPGGGYGGPAPGGPYGPPAGGGPYGHPNPGMFPSGTPGGPYGGAAPGGPYGQPPPSSYGAQQPGLYGQGGAPPNVDPEAYSWFQSVDSDHSGYISMKELKQALVNCNWSSFNDETCLMMINMFDKTKSGRIDVYGFSALWKFIQQWKNLFQQYDRDRSGSISYTELQQALSQMGYNLSPQFTQLLVSRYCPRSANPAMQLDRFIQVCTQLQVLTEAFREKDTAVQGNIRLSFEDFVTMTASRML

SEQ ID NO: 11615 - DNA, 2506 bp, Homo sapiens
  CDS (107)..(1054)
agatggcgcggagcgggaggcggccctggagcgaccccggaggactaagcgggaacgggaccagctgtactacgagtgctactcggacgtttcggtccacgaggagatgatcgcggaccgcgtccgcaccgatgcctaccgcctgggtatccttcggaactgggcagcactgcgaggcaagacggtactggacgtgggcgcgggcaccggcattctgagcatcttctgtgcccaggccggggcccggcgcgtgtacgcggtagaggccagcgccatctggcaacaggcccgggaggtggtgcggttcaacgggctggaggaccgggtgcacgtcctgccgggaccagtggagactgtagagttgccggaacaggtggatgccatcgtgagcgagtggatgggctacggactcctgcacgagtccatgctgagctccgtcctccacgcgcgaaccaagtggctgaaggagggcggtcttctcctgccggcctccgccgagctcttcatagcccccatcagcgaccagatgctggaatggcgcctgggcttctggagccaggtgaagcagcactatggtgtggacatgagctgcctggagggcttcgccacgcgctgtctcatgggccactcggagatcgttgtgcagggattgtccggcgaggacgtgctggcccggccgcagcgctttgctcagctagagctctcccgcgccggcttggagcaggagctggaggccggagtgggcgggcgcttccgctgcagctgctatggctcggcgcccatgcatggctttgccatctggttccaggtgaccttccctggaggggagtcggagaaacccctggtgctgtccacctcgccttttcacccggccactcactggaaacaggcgctcctctacctgaacgagccggtgcaagtggagcaagacacggacgtttcaggagagatcacgctgctgccctcccgggacaacccccgtcgcctgcgcgtgctgctgcgctacaaagtgggagaccaggaggagaagaccaaagactttgccatggaggactgagcgttgccttttctcccagctacctcccaaagcagcctgacctgcgtgggagaggcgtagcgaggtcggaggggaaagggagatcccacgtgcaagtagggggaatatctcccccttttccctcatagcctctagggagggagagtgacttcattctccatttgaagagattcttctggtgatgtttacttaaaaagtgatccccctcaacaacggatacagcgtgcttattattgggcatttagcctcaaaagcatgtagtaccaagcacttgtatttccgtatattttgtttcgcgggggagtgagggggaagaacacggatgaaaatgtcagtttttgaagggtccatgcacatccctgacacctcacaccttatctaagtctgaagctggggagaaaggggttcatttagacttcatacatttccagtacgactttagtatctctccagagccatattttctcagtccgaattaattccccctccctaggtgcctgtaggctatggtacttcttcctcattgttttctaggtaaacttcactactggtaattaaggggaaggatatgaggaagcagtttaaatagccctgttctcattactctgaccacatacatcatagggtgctaaagttgatgaacacattaatccgttaagtaaaatggactttgtaattgtacagcatacctaagaaactcagaaggtgcatttaagagagagacctgaaagaaatagtatggatttttaaaaattcttgtctctactattataaccaaaaaatatttcttgtatgtcccataaaaatatttgtgtaattcttatgaaacaggctggtagaggaggtttctgagcctagcccaagggcttattcatcaccatgggtaaattatttaaactcacttaattaaggaaaatattttcccagctagaaaagtatactcattctcatttaaactctctcatttggagggatcatgtgagttggcctacttacaagtagtgaaagttcccttttcagttttgttttgttttgttttgtttttctctttcactcagccaaatgtgaaagttgtgaatttaggaaaatcacttgtaatgaagtgtgaatcttgttatcaaatttatttctctgatgtttccttccttatccttgtagccaataaaacattgacattctcacgttttatagatgaggtaaaaagtcttgtgtgctgtgagttataatgcttttgcctttttaatattattagttcttaagtgttacagccccttcagaatataacttcaggacaattcaaactatgcttaatgtatgattttcgagcttctgtatgctaagaaaataggtgtgaaaaactggtgttctgaaatagcctaacatttattgtaattctgaattttctgcccttttattcattgcatattaaagtattagagtataaaaact

SEQ ID NO: 11616 - protein, 316 aa, Homo sapiens
MIADRVRTDAYRLGILRNWAALRGKTVLDVGAGTGILSIFCAQAGARRVYAVEASAIWQQAREVVRFNGLEDRVHVLPGPVETVELPEQVDAIVSEWMGYGLLHESMLSSVLHARTKWLKEGGLLLPASAELFIAPISDQMLEWRLGFWSQVKQHYGVDMSCLEGFATRCLMGHSEIVVQGLSGEDVLARPQRFAQLELSRAGLEQELEAGVGGRFRCSCYGSAPMHGFAIWFQVTFPGGESEKPLVLSTSPFHPATHWKQALLYLNEPVQVEQDTDVSGEITLLPSRDNPRRLRVLLRYKVGDQEEKTKDFAMED

SEQ ID NO: 11617 - DNA, 2415 bp, Homo sapiens
  CDS (105)..(1775)
aaaagacgccgggcgcggcggcgcgcggagaagtgcggcggagcggcgcctgcattagcaggtatgcaaagaagccttttcaccctgatgtccttagagataatatggatcagtccagagttctcctctgggtgaaagcagaaccctttatagtgggtgccttgcaggtcccccctccatccaagtttagtcttcactatctcaggaagatatccacctatgtgcaaatccgggccacagaaggagcttacccgcgcctctactggtctacatggaggcacatcgcttgtgggaagctgcagttggccaaggacctggcgtggctttacttcgaaatatttgatagtctttcaatgaagacacctgaggagcgcctggaatggtctgaggttctgtccaactgcatgtctgaggaggaagttgaaaagcagagaaatcagctttcagtggacacgctacagtttctgctcttcttatacattcaacagttgaacaaggtctccctaaggacatctttgattggcgaagagtggcccagtcccagaaacaaatctcagtctcctgacctgactgaaaaatctaattgtcataataagaactggaatgattacagtcaccaagcttttgtctatgatcatctgtctgatctcctcgagctgcttttagatccaaaacaactcactgcatcatttcattcaacccatagtagtctagtgtctcgagaagctgttgtggcgctcagcttccttattgaaggtacaataagtagagccaggaagatctatccacttcatgaacttgcactgtggcaaccactgcatgcagatagtggcttctcaaagatctctaagactttctctttctacaaactggaaacctggttgaggtcctgtttgactgggaatccatttggtacatcagcttgcctcaagtctggaaagaaattggcttgggctcatcaagttgaagggaccaccaaaagagctaagattgcttgtaatactcatgtggcccctaggatgcaccgactggtagtgatgagccaggtttacaagcagacactggctaagagctcagacactctggcgggggcacatgtaaagattcatcgttgcaacgaatcttttatatatctgctctctcccttacgatctgtgacaattgagaagtgcaggaatagcatctttgtcttgggccctgtagggactacacttcacctccacagttgtgacaatgttaaagtcattgctgtttgccatcgtttgtccatctcttctacaacaggttgcatctttcacgttcttacgcctacacgcccacttattctctctgggaaccagacagtaacttttgccccttttcatacacattacccaatgctagaggaccatatggccaggactggccttgctacagtgcctaactattgggataatccaatggttgtgtgcagagagaacagcgacacaagagtcttccagcttttaccaccttgtgaattctatgtatttattattccctttgaaatggaaggggacacaacagagatacccgggggtcttccatctgtatatcagaaagcactgggtcaaagagaacagaagatacagatctggcagaaaactgtgaaggaggctcatttgacaaaggatcaaaggaagcagttccaggtactggtagagaacaagttttatgaatggttgattaatacaggacatcgccaacagctggacagccttgtaccccctgcagcaggctccaaacaagcagctggataaggatcttacatgcagacactgggccctggaaatacaaggataaatggaggatggtgctcatcttgaaacttgaaactaaattgggaaggtgctattgctgcttaagagacattgggacttttctgtcttttttttttttttttttttgaggcagagtcttgttctgtcgcccaggctggcgtgcagtggcgcgatctcggctcactgcaagctctgcctcccgggttcacgccattctcctgcctcagcctcctgagtagctgggactacaggcgcccgccaccacgcccggccaattttttttgtatttttagtagagacggggtttcaccgtgttagtcaggatggtctcgatctcctgacctcgtgatccgcccatctcggcctcccaaagtgctgggattacaggcgtgagccaccgtgcccagccttctgttctatttaagaactttgatttccattccattttcatttattactgtttaggccgaattttcgctaaacttctgactttcatataaacatattgcttatagaacatcagaagactcatctttgtgatgcccaaatgaaaaagttggtgaaggtagtaccattgtatgtatgttaatattaaagcaactgagtgtagatttgc

SEQ ID NO: 11618 - protein, 557 aa, Homo sapiens
MDQSRVLLWVKAEPFIVGALQVPPPSKFSLHYLRKISTYVQIRATEGAYPRLYWSTWRHIACGKLQLAKDLAWLYFEIFDSLSMKTPEERLEWSEVLSNCMSEEEVEKQRNQLSVDTLQFLLFLYIQQLNKVSLRTSLIGEEWPSPRNKSQSPDLTEKSNCHNKNWNDYSHQAFVYDHLSDLLELLLDPKQLTASFHSTHSSLVSREAVVALSFLIEGTISRARKIYPLHELALWQPLHADSGFSKISKTFSFYKLETWLRSCLTGNPFGTSACLKSGKKLAWAHQVEGTTKRAKIACNTHVAPRMHRLVVMSQVYKQTLAKSSDTLAGAHVKIHRCNESFIYLLSPLRSVTIEKCRNSIFVLGPVGTTLHLHSCDNVKVIAVCHRLSISSTTGCIFHVLTPTRPLILSGNQTVTFAPFHTHYPMLEDHMARTGLATVPNYWDNPMVVCRENSDTRVFQLLPPCEFYVFIIPFEMEGDTTEIPGGLPSVYQKALGQREQKIQIWQKTVKEAHLTKDQRKQFQVLVENKFYEWLINTGHRQQLDSLVPPAAGSKQAAG

SEQ ID NO: 11619 - DNA, 1665 bp, Homo sapiens
tacaaatcattcatgaaactgaagctcagtctcccaggggtaagtcctgggccacgtgcaaacaatggcaaatccagctcttccatgatagagaaggcaaacacacccaccttcatcctgagcctaaaaggccacctctgagcacttgggcagccactcctctgggcctcagagggccatgagcttggccaggtaggcacagcggcggggaagtcacagctgtcaggtaccggccatggtgcaggtgggaataggagatgccagagctgctttagctgaggaaagcaaacagtcagcagtgctcaaaggagcaaaacttcgaatgtgcacattgacccctgacacctgcaagcataacacagatcctaagactagagtgaagtaggaagaagaattagaaaatccagtggatgtcctgagtatagggaaccagggccgttgaaaatcagtaaaggttgattacctggggcgagaccgggtgactgtggcagtgcaggtgaaggtaccctggaccttctcagttcgctggcacataaggctccgccaataaagcgtggttctctctgtcatacacacacacacacacacacacacacacacacacacaatgattggagggctatatgatccagcattagcttcctggtgtgccaagcatgcttgatcgggaatttttttttattattattattttttagctgtacctgaaggcatttctcggatgtggagaggagaatggaaatcgcagaaccaaatcagtttgccctgccatatttggctgtggtctgtcattgggcatttctgatgtgcttttctggattcaggaagagctgattgtcctccgagggttgaaaaaaaaaaacagtttcagaaacctgaatccagggccttatagttctcctcattatctatcttcttctcccttccctcgcccaagggagtgggggaaacacttttcattgcagagtttgctttaaagttttcccatcttgcgtgcattatcccttgatattaaaattattttctcagtttaatccaactcctgctgagaagctgtgtgagatttaggctgtggggtttttttcttgtactcttttggatggtgttgcatttttcactcttaacccgagggtgtgtttcagcttatgttcgttctgtttcatgcaggtttatagcacggtagagtagaaggcggcttctggtttttagggtatttttagaattcattcctgagtgaggggttcagacacccagtctcctcggaacaggggtgaggggtcgactgagctttgttgagaagcctccagttaggcttcgggcgggtctccatgttatattgtgtgtttactgagcttcccactggtagaagatgacacatttgtccatcgtcctgtgtatctgctttccagaggacaccggagcattctcctggggtcactcccacatggctgcctcacatagctgttttgcaacagcctttattgccaacacccttggaagaacatctcctgtagaagtacaagttttgcaatatggactttggaagtggttttgtgatgttcgaattttctgttagcctattgctcaagcactacagaatgtacatagtccctttggccatcctctcaccccagaatatcctaataaacattgttttcttttttt

SEQ ID NO: 11620 - DNA, 2304 bp, Homo sapiens
  CDS (14)..(868)
cttccttttctccatggctacactgttgaggaccagcttcagtgaccctggagtgattcctcgggcgctaccagatgaagcagctttcatagaaatggagatagaagctaccaatggtgcggtgccccagggccagcgaccaccgcctcgtatcaagaatttccagataaacaaccagattgtgaaactgaaatactgttacacatgcaagatcttccggcctccccgggcctcccattgcagcatctgtgacaactgtgtggagcgcttcgaccatcactgcccctgggtggggaattgtgttggaaagaggaactaccgctacttctacctcttcatcctttctctctccctcctcacaatctatgtcttcgccttcaacatcgtctatgtggccctcaaatctttgaaaattggcttcttggagacattgaaagaaactcctggaactgttctagaagtcctcatttgcttctttacactctggtccgtcgtgggactgactggatttcatactttcctcgtggctctcaaccagacaaccaatgaagacatcaaaggatcatggacagggaagaatcgcgtccagaatccctacagccatggcaatattgtgaagaactgctgtgaagtgctgtgtggccccttgccccccagtgtgctggatcgaaggggtattttgccactggaggaaagtggaagtcgacctcccagtactcaagagaccagtagcagcctcttgccacagagcccagcccccacagaacacctgaactcaaatgagatgccggaggacagcagcactcccgaagagatgccacctccagagcccccagagccaccacaggaggcagctgaagctgagaagtagcctatctatggaagagacttttgtttgtgtttaattagggctatgagagatttcaggtgagaagttaaacctgagacagagagcaagtaagctgtcccttttaactgtttttctttggtctttagtcacccagttgcacactggcattttcttgctgcaagctttttttaaatttctgaactcaaggcagtggcagaagatgtcagtcacctctgataactggaaaaatgggtctcttgggccctggcactggttctccatggcctcagccacagggtccccttggaccccctctcttccctccagatcccagccctcctgcttggggtcactggtctcattctggggctaaaagtttttgagactggctcaaatcctcccaagctgctgcacgtgctgagtccagaggcagtcacagagacctctggccaggggatcctaactgggttcttggggtcttcaggactgaagaggagggagagtggggtcagaagattctcctggccaccaagtgccagcattgcccacaaatccttttaggaatgggacaggtaccttccacttgttgtatttattagtgtagcttctcctttgtctcccatccactctgacacctaagccccactcttttcccattagatatatgtaagtagttgtagtagagataataattgacatttctcgtagactacccagaaacttttttaatacctgtgccattctcaataagaatttatgagatgccagcggcatagcccttcacactctctgtctcatctctcctcctttctcattagccccttttaatttgtttttccttttgactcctgctcccattaggagcaggaatggcagtaataaaagtctgcactttggtcatttcttttcctcagaggaagcctgagtgctcacttaaacactatcccctcagactccctgtgtgaggcctgcagaggccctgaatgcacaaatgggaaaccaaggcacagagaggctctcctctcctctcctctcccccgatgtaccctcaaaaaaaaaaaaaatgctaaccagttcttccattaagcctcggctgagtgagggaaagcccagcactgctgccctctcgggtaactcaccctaaggcctcggcccacctctggctatggtaaccacactgggggcttcctccaagccccgctcttccagcacttccaccggcagagtcccagagccacttcaccctgggggtgggctgtggcccccagtcagctctgctcaggacctgctctatttcagggaagaagatttatgtattatatgtggctatatttcctagagcacctgtgttttcctctttctaagccagggtcctgtctggatgacttatgcggtgggggagtgtaaaccggaacttttcatctatttgaaggcgattaaactgtgtctaatgc

SEQ ID NO: 11621 - protein, 285 aa, Homo sapiens
MATLLRTSFSDPGVIPRALPDEAAFIEMEIEATNGAVPQGQRPPPRIKNFQINNQIVKLKYCYTCKIFRPPRASHCSICDNCVERFDHHCPWVGNCVGKRNYRYFYLFILSLSLLTIYVFAFNIVYVALKSLKIGFLETLKETPGTVLEVLICFFTLWSVVGLTGFHTFLVALNQTTNEDIKGSWTGKNRVQNPYSHGNIVKNCCEVLCGPLPPSVLDRRGILPLEESGSRPPSTQETSSSLLPQSPAPTEHLNSNEMPEDSSTPEEMPPPEPPEPPQEAAEAEK

SEQ ID NO: 11622 - DNA, 1749 bp, Homo sapiens
  CDS (396)..(1379)
aggcctgcgcttccgctcgcgagggggaggcgggacccgcgaggagtcgcgcggaggacggaggccacgatacctgcgtggctggggctgcgggctccggggtcaccaccctgggcgacccggaggtggcgcctccgccggccgcagctggagaggagcgtgtccccaagccgggggagcaggacttgagcaggcacgcggggtcaccgccgggcagcgtggaggagccatctcctggaggagaaaactcacctggtggcggaggctccccttgtttgtcctcccggagcctggcgtggggttcttctgcgggaagagagagtgcgcgcggagatagcagtgtggaaacacgcgaggagtcggagggcacgggcggccagcgctcagcctgcgccatgggtggtcccgggaccaagagcggggagcctttgtgtcctccgttactgtgtaatcaggacaaagaaaccttgactctgctcattcaggtgcctcggatccagccgcaaagtcttcaaggagatttgaatcccctctggtacaaattacgcttctccgcacaagacttagtttattccttctttttgcaatttgctccagagaataaattgagtaccacagaacctgtgattagcatttcttcaaacaatgcagtgatagaactggcaaaatctccagagagccatggacattggagagagtggtattatggtgtaaacaacgattctttggaggaaaggttatttgtcaatgaagaaaatgttaatgagtttcttgaagaggtcctgagctctccattcaaacagtctatgtccttgaccccaccattaattgaagttcttcaagttactgataataagattcaaattaatgcaaagttgcaagaatgtagtaactctgatcagctacaaggaaaggaggaaagagtaaatgaagaaagtcatctaactgaaaaggaatatatagaacattgtaacacccctacaactgattctgattcatctatagcagttaaagcactacaaatagatagctttggtttagttacatgctttcaacaagagtctcttgatgtttctcaaatgatacttggaaaatctcagcaacctgagtcaaaaatgcaatctgaatttataaaagaaaaaagtgctacttgttcaaatgaggaaaaagataacttaaacgagtcagtaataactgaagagaaagaaacagatggagatcacctatcttcattactgaacaaaactacggttcacaatatacctggattcgacagcataaaagaaaccaatatgcaggatggtagtgtgcaggtcattaaagatcatgtgaccaattgtgcattcagttttcagaattctttgctatatgatttggattaattctatataattttggacttttaaatattaaggttaaaaaatacctgtatctaaaattgattctgttaactgttgtcttaaaactaaaggtattaaagtataaaattaaaatttgcaatttttttaaaaaaattgcaattttgattctcatgggggaaattggagataattttttttttttttgcctctggagtttaaagtttccttatggagataagttttgtgattcctgtaatagatgtgtatgttttctatttgagagttaaaacatttgagagttaaaacatttagttttaatacaacctatgtatatatacttctgtgttaaattttgctttgtcattaataaaatttaaaaatattcact

SEQ ID NO: 11623 - protein, 328 aa, Homo sapiens
MGGPGTKSGEPLCPPLLCNQDKETLTLLIQVPRIQPQSLQGDLNPLWYKLRFSAQDLVYSFFLQFAPENKLSTTEPVISISSNNAVIELAKSPESHGHWREWYYGVNNDSLEERLFVNEENVNEFLEEVLSSPFKQSMSLTPPLIEVLQVTDNKIQINAKLQECSNSDQLQGKEERVNEESHLTEKEYIEHCNTPTTDSDSSIAVKALQIDSFGLVTCFQQESLDVSQMILGKSQQPESKMQSEFIKEKSATCSNEEKDNLNESVITEEKETDGDHLSSLLNKTTVHNIPGFDSIKETNMQDGSVQVIKDHVTNCAFSFQNSLLYDLD

SEQ ID NO: 11624 - DNA, 1185 bp, Homo sapiens
  CDS (32)..(748)
accgtcttccgccgcacgtggattcagcgcgatgcccaaatccaagcgcgacaagaaagtctccttaaccaaaactgccaagaaaggcttggaattgaaacaaaacctgatagaagagcttcggaaatgtgtggacacctacaagtaccttttcatcttctctgtggccaacatgaggaacagcaagctgaaggacatccggaacgcctggaagcacagccggatgttctttggcaaaaacaaggtgatgatggtggccttgggtcggagcccatctgatgaatacaaagacaacctgcaccaggtcagcaaaaggttgaggggtgaggtgggtctcctgttcaccaaccgcacaaaggaagaggtgaatgagtggttcacgaaatacacagaaatggactacgcccgagctggtaacaaagcagctttcactgtgagcctggatccagggcccctggagcagttcccccactccatggagccacagctcaggcagctgggcctgcccaccgccctcaagagaggtgtggtgactctgctgtctgactacgaggtgtgcaaggagggcgatgtgctgaccccagagcaggctcgcgtcctgaagctttttgggtatgagatggctgaattcaaagtgaccatcaaatacatgtgggattcacagtcgggaaggttccagcagatgggagacgacttgccagagagcgcatctgagtccacagaagagtcagacttagaagatgatgactgaaagggactcgggactgaaggtctcctggaagcttctgggtctcactggaccatcaggactgctgccgcccctctggagagagcagctttttatttgtctgtagacagggaacatgatgggcactgacctcctgtaaagaataaaactgtgggccgggcgcggtggctcacgcctggaatcccagcactttgggaagccgaggtgggcagatcataaggtcaggagattaagaccatcctggctaacacggtgaaaccccgtctctactaaaaatagaaaaaaaaactagttgggcatagtggcatgtgcctgtagtcccagctactcaggaggctgaggcaggagaatcacttgaacccgggaggtggaggttgccgtgagttgagattggaccactgctctccagcctgggcaacagagtaaaactctgtccc

SEQ ID NO: 11625 - protein, 239 aa, Homo sapiens [sequence omitted]

SEQ ID NO: 11626 - DNA, 2512 bp, Homo sapiens
  CDS (67)..(423)
gataaaagcctaagagtttgggaatgggatatccctgtggatttcaagtacatagcagaacccagtatgcactcaatgcctgcagtgactttgtctccaaatggaaaatggctagcatgccaatcaatggacaaccaaatcttaatttttggagcacagaacagatttagattaaataagaaaaaaatttttaagggccatatggtagcaggctatgcttgtcaggtggacttttcaccagacatgagttatgtgatttcaggagatggaaatggaaaattaaacatttgggactggaagaccacaaaactctacagtcgatttaaagctcatgataaagtgtgtataggtgcagtgtggcatcctcatgaaacttctaaggtcataacatgtggttgggatggtctcattaaattgtgggattaatgagattaatccttaaactagctgggatcatttttgatccattgtcatatttatatttaattattaaatgtatctgatgataacttgatttacagataatgttgatgacattgaccctttgtttaaaaaaagaaactgtaaatttgacataatttcatttgcaacttcattttgttttttataaatgttatttatacagaaagtggctattgactttctatttgacaagtagttataattggcaagcagtttgagtttatactcatgacatactgaaagcatctctttggggtcaagaaagaatccctagtggatttgggattctagaggaggtgttataattaattattcagaaaaatgcatgtatttacctcttcaaccaaaagggcagtaaagaatagggataatatattttaatgtaaatttggaagaaggataaaatcacccacagttactctccctattattttcactgggtcaagttttaatcttttggcttcatgagttccactccctttgatgatatatgttgtatatttttagttgtaaagcagtaatctttaactgtagcattcctctaattataaacagtgaaaaatcaaaatcagtccagagttcttttgttgacttaattcctgatcagtatagacaggactatatatatttaatcagagaattacattatatctgaagatggagctcaggagaatgcaccaagactttgaattgtatttacattcactgtcagtaaagacctggctacgctttgagaaatcaggatctcctaggtcattgcttcgcagctgtgattactgaaatcctcctcataggagataaagtacgaggggtagagtccaagatgtcaacttgtaatttctttgaagtcatatgttttatctttaaaattattcttattttacctgtgaatatatacaacagaactttttaagattaaaaaatttttaaacctctatgtctgaaaaaaaaaatgacactcctggaagatggctagggttccccagtttgagaagcagtggccatggtgaaaaatagtttttgaaaacatcagattataaaatcaagatagtccggacgcggtggcacatgcctgtaatcccagcactttgggaggctgaggcaggtgaatcacctgaggtcaggagttcaagaccagcctggccaacatagtgaaaccccgtctctactaaaaacacaaaaattagccaggcttggtggctggcgcctgtaattccagctactcagaaggctgaggcagggagaattgcttgaacccaggagtggaggttgcagtgagctgagatcatgccactgcactccagcctgggcgacagagcgagactccacctcaaaaaataaaatcaagataacctcttgaatgtaatagctcatagcactttaatttggcaagccatttttcctgttttattataaatctatattagatgtttgaatatggtttgaaatatttcactaccgtgctgaaaaaggttggttgatagcagcttggagtgctaactggaagatcaaaatcatgtctcttgctgataacctaagagcattaagctctgagtccagtgaggtcatagcagtgtatgctccttgcccttacggagtgtctgtttttagaaatttagattttaaaaggcgtgggacatacgaccaggccctatagccacataaatataaatttcatagaaaaagaataaaagcggagatatattttttgacacagaggcacccaaagaaatacaaacattgcctagctgctgccatttctgtaactgcccagaagggtgacagatttctgaaggggaaaggattcagatatgaccttttctttagtcccaaccactagttttaacaaatgtgaattattgaaatgtgaagggacaaaaagaatcatacatttaaactgtcttgttcagcataccaatattgtatgttacaaatcatcatttctaaatctggattgattctgttgtgtttttgactgtttctaaagtaagtgtgtataaaagtctcctttttaaaaagatcatatttttaaataaagcattttttgtag

SEQ ID NO: 11627 - protein, 119 aa, Homo sapiens
MHSMPAVTLSPNGKWLACQSMDNQILIFGAQNRFRLNKKKIFKGHMVAGYACQVDFSPDMSYVISGDGNGKLNIWDWKTTKLYSRFKAHDKVCIGAVWHPHETSKVITCGWDGLIKLWD

SEQ ID NO: 11628 - DNA, 2355 bp, Homo sapiens
  CDS (583)..(1956)
gggctccgtttgaaacatggcgcgggctggccctcggctggtgctgagcgaggaggcggttcgggcgaagagcggcttagggcctcaccgcgacctggctgagcttcagtcattgtctattcctggaacttaccaagagaagatcacccacctgggacattctctgatgagtttaacaggtctgaaatctttggatctctcgcgcaactccttggttagtctggagggcattcagtacctgactgcattggagagtctcaatctctactacaactgcatctcctcgttggcgaagtgtttcggctccacgccttaaccgagctcgtggatgtggacttccggctgaaccccgtggtgaaggttgagcctgactaccgcctttttgttgtgcacctgctccccaagctccagcagctggacgatcgccccgtgagagcaagcgagcggaaggcttcccgactgcattttgcatcagaggactcactcgactccaaagagagcgtcccagcttctttgaaagagggcagaccacaccaccccagagccaagtgcaccgaggccttggccaagcagagcctggtcatggatgcggatgacgaggcagtcctgaacctcattgcagagtgcgagtgggacctcggcaggcctcccgggagcacgagcttcagccagaaggggcgtgaggccgactctcgtggttcccaagaatccagacatctgttgagcccgcagttggtacagtaccagtgtggggactctgggaagcagggccgtgagacgaggaggagcagctgcagagggtgctgtctggagaagatgccttggagccagctctgtggagagcttccgccactgtacggagcggagccagaggcctcccgtgcccccaggccacacacgtacttcaccccacacccagactccatggataccgaggactcggcctcttctcagaagttggatttgtcaggagaaatggtgcctggtcccctgccagcccccggaaagtgcaggaagcgaagaatgcctgttggaagattccagacgttttcggaccaggagggtttgggctgcccggagagaactcatgggtcctccgtgcccaaggagagcctgagcagacaggacagctcagaaagcaggaacgggaggaccttgtctcagcctgaggcctcggagactgaggagcagaggtctcggggtgtgaccgacaccagagagccgtctcccgggtcacactcggctctacccgggaagaagacggccctgcaggcggcgctcctggagacgctcttggacctggtggacaggagctggggcggctgcaggtccctgcacagcaacgaggcattccttgctcaggcaagacacatcttgtcatctgttgaagaattcacagcagctcaggacagctctgcgatggtgggtgaagatgtcggctccctggctctggagagtaagtccctgcaaagccgccttgctgagcagcagcagcagcacgcccgggagatgagcgaggtgacggcggagctgcaccacacacacaaggagctggatgatttgagacaacatttagataaatctttggaagagaacagtaggttaaaatcgcttttgttgagtatgaaaaaggaagtgaagagtgcagacactgcagccacgttaaatttgcagatcgctggacttcaaacaagtgtgaagaggctgtgtgtcgagattgtggaactgaagcagcacctggagcactacgacaagatccaggagctcacgcagatgctgcaggagagccacagctccctggtcagcaccaatgaacacctgctgcaggagctgagccaggtgcgggcgcagcacagagccgaggtggagcagatgcactggagctaccaggagctcaagaagaccatggccctgtttccacacagcagcgccagccatggaggctgccaggcctgctgactcctgccgagaagctgggccaccccttaagcttcctggtaaagttacattgtctgcacctttgtacttctttattgagtgtactggctggcaagagttctctcttctgttggtaattatttaggatttttggaatgtattcaggacctgtagcttggttttctaaagcacctcgtaaaatgatatgattactccaagccctctgcatgttttcagacagaacacattgacatattttgagacaaactgactattaatcttgtatccagtatcctgagatgaagtaaatgcagtgttctactgcctgatgtgaaagagagctatgtatgataattaaagaaaataattttctgtgtaacaagcaatctttatttaataaacaaatacattgttctg

SEQ ID NO: 11629 - protein, 458 aa, Homo sapiens
MDADDEAVLNLIAECEWDLGRPPGSTSFSQKGREADSRGSQESRHLLSPQLVQYQCGDSGKQGRETRRSSCRGCCLEKMPWSQLCGELPPLYGAEPEASRAPRPHTYFTPHPDSMDTEDSASSQKLDLSGEMVPGPLPAPGKCRKRRMPVGRFQTFSDQEGLGCPERTHGSSVPKESLSRQDSSESRNGRTLSQPEASETEEQRSRGVTDTREPSPGSHSALPGKKTALQAALLETLLDLVDRSWGGCRSLHSNEAFLAQARHILSSVEEFTAAQDSSAMVGEDVGSLALESKSLQSRLAEQQQQHAREMSEVTAELHHTHKELDDLRQHLDKSLEENSRLKSLLLSMKKEVKSADTAATLNLQIAGLQTSVKRLCVEIVELKQHLEHYDKIQELTQMLQESHSSLVSTNEHLLQELSQVRAQHRAEVEQMHWSYQELKKTMALFPHSSASHGGCQAC

SEQ ID NO: 11630 - DNA, 2526 bp, Homo sapiens
  CDS (454)..(894)
ggccccaccccggcggcgcagcccgcccgcccgcgcgtccctcggtccacctgcagcagggaggaagacaggcaatccctccggctgtccgaccaagagaggccggccgagcccgaggcttgggcttttgctttctggcggagggatctgcggcggtttaggaggcggcgctgatcctgggaggaagaggcagctacggcggcggcggcggtggcggctagggcggcggcgaataaaggggccgccgccgggtgatgcggtgaccgctgcggcaggcccaggagctgagtgggccccggccctcagcccgtcccgccggacccgctttcctcaactctccatcttctcctgccgaccgagatcgccgaggcggcctcaggctccctagccccttccccgtcccttccccgcccccgtccccgccccgggggccgccgccacccgcctcccaccatggctctgaagagaatccacaaggaattgaatgatctggcacgggaccctccagcacagtgttcagcaggtcctgttggagatgatatgttccattggcaagctacaataatggggccaaatgacagtccctatcagggtggagtatttttcttgacaattcatttcccaacagattaccccttcaaaccacctaaggttgcatttacaacaagaatttatcatccaaatattaacagtaatggcagcatttgtcttgatattctacgatcacagtggtctccagcactaactatttcaaaagtactcttgtccatctgttctctgttgtgtgatcccaatccagatgatcctttagtgcctgagattgctcggatctacaaaacagatagagaaaagtacaacagaatagctcgggaatggactcagaagtatgcgatgtaattaaagaaattattggataacctctacaaataaagataggggaactctgaaagagaaagtccttttgatttccatttgactgctttctatgagcccacgcctcatcttcccctgtgcacatgtttacctgatacagcagtgctgcgtgttgtacatacttggaacaacaaactagaaatactgtacttctgtaccaacattgcctcctagcagagaagtgtgtgtgtgacaagccagttctacaggcattacctaggtgtgagactaaaagcttttcttattgacttaaatttggataacagcaaggtgtgaggggggtggtgggtatggtgtgtgcttggatgggaaagaaaaggctccactcacctataggagattatttttaagtggaatccatttaaactcaaaacagttatgaaaagcaaggtgaagaacatgaagctgtgtctgtattcattttattccgaaggagctacgtcttaggtgaaagttatgaccaaccagattaaactctacccacatcctgcattttaaggtctaagtttagctggtcaacatttaaatggattggagctattagtacatcaagtgtgatgggctttgttcccaactcttttacatctccctaccccttcaacctttggcctttcagcccttctttctctcttccatattctttggtttgtatgtggtttctcagttaatacatagctaatagctcttatttttcttatgtttttaaccgcttaggtctatttggatgtaagggtgaaaattcatttgatggaaatacttgtgtatatttaaagacccaattgctcctctggagcttgtactttcaagaatgattaatctgtgtaataaactggttactacagtcattacatataattttgtgtgaataggctttttcatttttaagaagtttgtctagctgagattagtggtggattttctcccacttctgaaatgttcatttatactggttgcattttaagatcatgaaacaattccagttacattgtaaaaaggatatcttacgagtaattttattgaacaagttagaggcataagcttaagagcatttccatgaaacaacacatgcagcattccaggaacttgattgttaaattcaataagaaatttgctttattaatgaaactaagctgcatttcatcaaaaccttgtgacattcccttggtacataggacataaaacacagaggcattgctatttggtaagttaagcttctgtgattgtaattataaaagagcaacattgaccaaacctgggaaacaagagcacagtcttgtttggagagtctacataattactttgcactaacatttgcaggatgttcacacaattttaaattgtactgtatgtggctttttgaagtcttcccttgaccctagtaaaatatagcttgaaacttgtaaacaactgtgtttgccagaaacatcattcatgtgaactaggcaagttacctttttccccccttcttttcctaattgtaaactaggccaacctgaaagccatggctgatgctctagccatcaggttctttcaaatgcatctttacactcttgcacaaaagttaaggaataaatgtccactgcttttggtttt

SEQ ID NO: 11631 - protein, 147 aa, Homo sapiens; identical to SEQ ID NO: 11375

SEQ ID NO: 11632 - DNA, 2104 bp, Homo sapiens
  CDS (16)..(618)
gtcgggaccggcaagatggcggcgcggacagcgttcggtgctgtgtgccggcgcctctggcagggattagggaatttttctgtaaacacttctaagggcaatacagccaaaaatggtggcttgcttctcagtaccaatatgaagtgggtacagttttcaaacctacacgttgatgttccaaaggatttgaccaaacctgtggcaacaatctctgatgaaccagacatattatataagcgcctctcggttttggtgaaaggtcacgataaggctgtattggacagttatgaatattttgctgtgcttgctgctaaagaacttggtatctctattaaagtacatgaacctccaaggaaaatagagcgatttactcttctccaatcagtgcatatttacaagaagcacagagttcagtatgaaatgagaacactttacagatgtttagagttagaacatctaactggaagcacagcagatgtctacttggaatatattcagcgaaacttacctgaaggggttgccatggaagtaacaaagacacaattagaacagttaccagaacacatcaaggagccaatctgggaaacactatcagaagaaaaagaagaaagcaagtcataaagcctcagggaggccatttttgcctaaatttgaaatgagggtgggccagatgagtatgtttaagtggagagtgcttccagctgagatgatttgagtctgtcctaactgctccattgagttctcgtgccctcatcagctgagggcagggaatggaactttaatggaagaaccacttttatctattctttttattcattgtttcagttctgatttcagcaaacatgagcaaaccactttgactgaaagcagaaagagtgaaaattctattttgttacgctactggtgttcaattattagtttgtaccatttttaatttatgtcagttgatgcatctgaaaataagtgcttggagtgttcgtacccttatttttttttaagattcctagaaggaatctttggttaattcagattgagcagttaaagtttttgctatttacctttgtgcaggctggcatatgctaatttgggggtggtaaccaaccgattttatctcatgtaagcattacattttgaagactgaatatacttcacagcagatcaaacacatttatggcatgcactaacctcttcttggagcccagaactttatagagttgcctaccagggttactgtaatggaatttatgatcttaagaaattactagttgtattatttatcctatgattcattcattcaataagcttttactgcataaactttacatccagcactgtagttaagtacccaaaattgaatagaaataatggcttttgaaaattgcacaaagcaggccaggcacggtggctcacgcctgtaatcccagcactttgggaggccgaggcaggcggatcacgaggtcaagagatccagaccatcctggctaacacggtgaaaccccgtctctaataaaaatacaaaaattagctggacatggtggcacgtgcctgtaatcccagctactcaggaggctgaggcaggagaatcgcgtgaacccgggcccggtggaggctgcagtgagacgagatcgcgccactgcactccagcctggcgacagagcgagacaccgtctcaaaaaaaaaaaaaaagaaaattgtgcaaagcataggtaaatatttttctttattaagcttctcactgagaagccctctttattttggtaaatgtcactctgtttgttaggagatgtctgcttttccatgaaatgaaatagtggctaaagccctgaaagaggcaagactacaatgggctgaaacagttggtatagcaaccccagagaagtgcttcattttctttttatagtagaagcaggtccatgtcttttgtggtttcctgcacatctttggagtagttatgacttctcagtttttccccccttaaactgcattgcctattcttttttcctgacatgctatcaggtatcagtgtgttgaatacataatgcttgtgtatcagacttacgttactgtcatcaccattaaaagaattgcagccttgtgccccatg

SEQ ID NO: 11633 - protein, 201 aa, Homo sapiens [sequence omitted]

SEQ ID NO: 11634 - DNA, 2225 bp, Homo sapiens
  CDS (137)..(1963)
ctgcctgcgttagcggcggtggaggaggaggcagagaggagtggagggcggagtagacggaggaggctgctgcagagaagaaagtgtcagagccggttcggctttagagtgtggtgaagggtacttttcatggtgcatggaaggaaagccaatgcgcaggtgtaccaacattcgaccaggagagactggaatggatgtaacaagccgctgcacccttggagaccccaacaaactgccagaaggggttccccaacctgcccgcatgccctatatctcagacaagcaccctcgacaaaccttggaagtgattaaccttctgagaaagcaccgggagctatgtgatgtggtgctagttgtgggcgccaagaagatatatgcccatcgagtcattttgtcagcctgtagtccctacttccgagctatgtttacaggagaattggcagagagccgtcagacagaagtagtgatccgagacattgacgagagggctatggaattactgattgactttgcgtatacctcccagataacagtagaagagggcaatgttcagactcttctgccagctgcttgcctcctccagctggcagaaatacaggaagcctgctgtgaattcttaaagagacaattagatccttctaactgccagggcattcgggcttttgctgacacacattcatgtcgtgagttgctaaggatagcagacaagttcacccaacataactttcaagaggtaatggagagtgaagagttcatgttgcttccagccaatcaactcattgatataatatccagtgatgagctaaacgttcgcagtgaagaacaagtgttcaatgcagtgatggcctgggtcaaatacagtattcaggaaagacgtcctcaattaccccaggtgctgcagcatgttcgtttgcctttgcttagtcccaagttcctggtcggcacagtaggctctgatcccctcatcaaaagtgatgaagaatgcagagacttggtagatgaggctaaaaactacctcctattgccgcaagaacgaccactaatgcaaggaccaaggacgagaccacggaaacctatccgatgtggggaagtactctctgcagttggtggttggtgcagtggagatgccatttccaatgttgaacgatatgatccacagaccaatgaatggagaatggtggcttcaatgagcaaaaggagatgcggagttggggtcagtgttcttgatgatctgttatatgcagtaggaggccatgatggatcctcttatctcaatagtgttgaaaggtatgaccccaaaacaaaccagtggagcagtgatatggcccctacaagcacctgcaggacaagtgttggtgtagcagtacttggaggctttctttatgctgtgggtggccaggatggtgtgtcttgcctcaacattgttgagaggtatgatccgaaggagaacaagtggactcgggtagcttctatgagtaccagaagactaggtgtggctgtggctgtgttaggagggttcttatatgctgtaggtggctctgacgggacatctcctctcaacacagtggaacgttacaatcctcaggaaaacagatggcacactatagcccctatggggacccggaggaaacacctaggctgtgcagtatatcaggacatgatctatgctgtaggaggtagagatgacactacagagctgagcagtgctgagagatacaaccccagaaccaaccagtggtctccagtggtggccatgacatcacgccgtagtggagttggcctggcagtggtcaatggacagctcatggcagtaggaggttttgatggcacaacatacttgaagaccatagaagtttttgatcctgatgccaatacatggaggttatatggcgggatgaattaccgtcggctagggggtggcgtaggagttattaaaatgactcactgtgaatcccatatttggtgaacacagagaagacagtcttgtatatattcctctgtattctggggagctttgaccttggagctttgtacagcttgagaaaacattagaacaaattttattatttgccggtgcctcaacaaatggaaatacaatccaatgaaagtacttcacctgcaagatgcacaataattttcaactctgtgcagaagaatatttatttttggttttaatttatcatggttttttgttgttttcgttttgaacttatccttcctcccac

SEQ ID NO: 11635 - protein, 609 aa, Homo sapiens [sequence omitted]

SEQ ID NO: 11636 - DNA, 2452 bp, Homo sapiens
  CDS (391)..(2181)
agagccggacgttccggccgcttcgggctggcggctggagagcgctcgggtcatgtctgcccagggggactgcgagttcctggtgcagcgagcccgggagttggtgccgcaagacctgtgggcagccaaggcgtggctgatcacggcccgcagcctctacccggcagactttaacatccagtatgagatgtacaccatcgagcggaatgcagagcggaccgccaccgccgggaggctgctgtacgacatgtttgtgaatttcccagaccagccggtggtgtggagagaaatcagcattattacatcagcattaaggaacgattacaggacaaacaaacccaatttttaagaagtttatttgaaactcttcctggtcgagtccagtgtgaaatgttactaaaggtcacggaacaatgcttcaacacgttagaacgatcagaaatgttgcttctacttttgaggcgcttccctgaaacggtggtgcagcatggggttggccttggggaggcactattagaggctgaaactattgaagaacaagaatctccagtgaactgctttagaaaattatttgtttgtgatgtccttcctctaataattaacaaccatgatgttcgattacctgccaatttattgtataagtacttgaacaaagcagctgaattttatatcaattatgtcactaggtctactcaaatagaaaatcagcatcaaggcgcccaggatacatctgatttaatgtcacctagcaaacgtagctctcagaagtacataatagaagggctgacggaaaaatcatcccagatcgtggacccttgggagaggttgtttaagattttgaatgttgttggaatgagatgtgaatggcagatggataaaggaagacgaagctatggagatattttgcatagaatgaaggatctctgcagatacatgaacaactttgatagtgaagcacatgcaaaatataaaaaccaagtggtgtattccaccatgctggtcttctttaagaatgcattccagtatgtcaacagcatacagccatctctcttccaaggtcctaatgccccgagccaagttccactggttcttcttgaagatgtatcgaatgtgtatggtgatgtagaaattgatcgtaataaacacatccataaaaagaggaaactagctgaaggaagagaaaaaaccatgagttcagacgatgaagactgttcggcgaaaggaagaaatcgtcacattgtagtcaataaagccgaacttgctaactccactgaagtgttagaaagctttaaattggccagggagagctgggagttgctctattccctagaattccttgacaaagaatttacaaggatttgcttggcctggaagacggatacttggctttggttaagaatcttcctcactgatatgatcatctatcagggtcaatataaaaaggcgatagccagcctgcatcacttagcagccctccagggatccatttctcagccacagatcacagggcaggggaccctggagcatcagagggcgctcatccagctggcgacgtgccactttgcgctaggggagtacagaatgacatgtgaaaaagtccttgatttgatgtgctacatggtactccccattcaagatggaggcaaatcccaggaggaaccctcgaaagtaaagcccaaatttagaaaaggttcggatctgaagctcctgccttgtaccagcaaggctatcatgccatactgcctccatttaatgttagcctgttttaagcttagagctttcacagacaacagagacgacatggcattggggcatgtgattgtgttgcttcagcaagagtggccacggggcgagaatcttttcctgaaagctgtcaataaaatttgccaacaaggaaatttccaatatgagaattttttcaattacgttacaaatattgatatgctggaggaatttgcctacttgagaactcaggaaggtgggaaaattcatctggaattactacccaatcaaggaatgctgatcaagcaccacactgtaactcgaggcatcaccaaaggcgtgaaggaggactttcgcctggccatggagcgccaggtctcccgctgtggagagaatctgatggtggttctgcacaggttctgcattaatgagaagatcttgctccttcagactctgacctgagtggagacctttccaccagacacagctcgggcctgtgtaattgtaggagaagacactcagcagtgattgccatggcacagagccgtggtcattgttgctgttacaaagaagaaaaccatctgagttctaactccttggttgcttaaaagtagttcccaagagtctgagaagctatttctatttttaagagtcattttttgtaatttttgtaaaacaaaagtaccaatctgttttgtaaataaaaatcatcctaaaatttgaagttttt

SEQ ID NO: 11637 - protein, 597 aa, Homo sapiens
MLLKVTEQCFNTLERSEMLLLLLRRFPETVVQHGVGLGEALLEAETIEEQESPVNCFRKLFVCDVLPLIINNHDVRLPANLLYKYLNKAAEFYINYVTRSTQIENQHQGAQDTSDLMSPSKRSSQKYIIEGLTEKSSQIVDPWERLFKILNVVGMRCEWQMDKGRRSYGDILHRMKDLCRYMNNFDSEAHAKYKNQVVYSTMLVFFKNAFQYVNSIQPSLFQGPNAPSQVPLVLLEDVSNVYGDVEIDRNKHIHKKRKLAEGREKTMSSDDEDCSAKGRNRHIVVNKAELANSTEVLESFKLARESWELLYSLEFLDKEFTRICLAWKTDTWLWLRIFLTDMIIYQGQYKKAIASLHHLAALQGSISQPQITGQGTLEHQRALIQLATCHFALGEYRMTCEKVLDLMCYMVLPIQDGGKSQEEPSKVKPKFRKGSDLKLLPCTSKAIMPYCLHLMLACFKLRAFTDNRDDMALGHVIVLLQQEWPRGENLFLKAVNKICQQGNFQYENFFNYVTNIDMLEEFAYLRTQEGGKIHLELLPNQGMLIKHHTVTRGITKGVKEDFRLAMERQVSRCGENLMVVLHRFCINEKILLLQTLT

SEQ ID NO: 11638 - DNA, 1557 bp, Homo sapiens
ctctctctctctctcctgctgcattgtgaagaaactgcttgcttccctctcaccctctgcagtttcctgaggcctccccagccatgcggaacgctgtagaccaagacctggaattaacacatcagaagattctatggggaaacccatttaaaaataggatgcatttttttcttttctgcacagggagaaagtttaagctctcctcactatgagttttcaagtataaaagactttttcttccacgattttgagaacaactgaggactcttgtgaccaggacaacagggaagcttgcagcaagatagctccaggttggattcatgcttcgcaccccaagggctgccagccagagaggaggagaagcaatcactcctgcagtttctgaacactacacagacgccaggtagcttcttcaggagaacagccctctgaggaggcaggaagaggaggcttatctttcagcagccggagctgctgagatctctgggcagattaagctctctctaatggatgggctccagcctggcacattcagtggagagggatccactcatccatcatcaacataatatggtcctccctgcacttcacagtgtcctcttgctattgaaaaggcttttttgccttctcaagtttctttgtcaacagtctacaggaagaagctcaggccgccaccggcagaggtgaatgcaagctcacgttttatttctgactgcttaatcattgcctcgatcactgctcaagctctgcctttgtttccaaaggttacctgtgggaaaacttctttttctatgctgaaattaatagggaggcaaagatgagtccactgataagcagagccttaaaactcacatagagaaacaactttgctggagtgtgtgtgagtgaaccactaaggaatcagatagtgtgatggcagttatcattgcaggttaagacatttctacaaatatttcgacatctccatatactcactcctttcccccctgagtggagagactcagctacccagagaggaagctcaaaaaaaacagaagcttcaaacaaacaaccaaccaaaaaaaaaaaaaactgtgggttcatcagaggtggtagggaagacaaaaacatgggaggagcagctgggcacggtggctcaagcctgtaatcccagcactttgcgaggctgaggtgggtggatcacctgaggtcaggagttcgagaccagcctggccaacatggtgaaaccccatctctactaaaaatacaaaaaattagccgggcgttgtggtacgcacctgtaatcccagctactccggaggctgaggcagcagaatcgcttgaacccaggaggcagaggttgcaacgagccaagatcgcaccattgcactccagcctgggcaacaagagcgaaactccatctaaaaaaaacaaacaagcaaacaaacaaaaaacacgggaggagcaataaaaaggaatccatgctttgatttttttttttagtgagaggaagggaaggctgctgcctctcacttctccctgttttgttgttcttttaagtagcatgtgtcactctgt

SEQ ID NO: 11639 - DNA, 2445 bp, Homo sapiens
  CDS (12)..(2039)
ttaacagaaagatggaaattaagcctttgcaatttgaaattatgattgacagacttgaaaaagccagttctaatcagcttgtaacacttcaagaagcaaaactgctgctaaacgaagatgattaccttattaaagctgtatatgactactgggtgagaaaacgtaaaaactgcagggggccatccctcattcctcagataaaacaagagaaaagagatggctctaccaacaatgacccttatgttgcctttcggagaagaacagagaaaatgcaaactcgaaagaatcgtaagaatgatgaagcctcttatgaaaagatgttgaaactgagacgagaatttagtagagccataacaattttggaaatgattaagagaagagagaaaacaaaacgagaattattgcacttaaccttagaagttgtggagaaaagataccatttgggagactatggtggtgaaatccttaatgaagtaaaaatcagtagatcagaaaaagagttatatgccactccagcaactcttcataatggaaatcatcacaaagttcaagaatgtaaaactaagcaccctcatcatttgtctttgaaagaagaggcttctgatgtggttcgtcaaaagaagaagtacccaaagaagcctaaagcagaggctttgataacatctcagcaacccactcctgagacattgcctgtgatcaataagagtgacattaagcaatatgattttcacagctcagatgaagatgaatttccacaggtattgtccccagtatcagaaccggaagaagaaaatgatcctgatggtccctgtgctttcagaaggcgggcaggatgccagtattatgctcctcgtttggaccaagctaaccattcatgtgaaaattcagaattggcagatttggataagttgaggtataggcattgccttacaacacttacagtcccaagaagatgtataggatttgcaaggaggcgaattggcagaggtggaagggtcataatggaccgaatatccacagaacatgacccagtcctgaaacagatagaccctgaaatgctgaatagtttttcaagctcttcccaaactatagacttttcttctaatttctctcggaccaatgcttccagtaaacattgtgaaaatagactgtctctctctgaaatattaagcaatatcagatcatgtcgactacagtgtttccagccaaggctactaaatttacaggacagtgatagtgaagaatgtacctcaagaaaaccagggcagactgtgaacaataaaagagtttctgcagcatctgtagctttattgaacaccagcaagaatggcatatcagtaacagggggtatcacagaagagcagtttcagacacatcagcagcagttagttcagatgcaaaggcagcaacttgcccagcttcagcagaaacagcaatctcagcattcctcgcaacagacacatccaaaagcacagggctcaagcacctctgactgtatgtctaaaacacttgactcagccagcgcccactttgctgcatctgcagtggtcagtgcacctgttccaagtcgcagtgaggtagccaaggaacagaacactggccacaacaacataaacggtgttgtccagccttcaggaacctctaaaacattatactccaccaatatggctttatcatccagcccagggatttcagctgtacagcttgtaaggacagttggccacaccactacaaaccacttaatcccagcattgtgcacaagcagtcctcagacacttcccatgaacaattcctgcctgacaaatgcagtgcacctcaataatgtcagtgttgtttctccagtcaatgtgcatatcaatacacggacttcagcaccatcgccaacagccttaaaacttgccacagttgctgccagtatggacagagtgccaaaggttactcccagcagtgccatcagcagcatagcaagagagaaccacgaaccagaaagattgggcttaaatggaatagcagagacaacagtagctatggaagtgacataacctaaaacacgtggctctgacctgtgctgatggtgtgcagtcattcatattccagctgaatgcaaaaggcaacactctgtggatcacagagtgtaacaatggacctaaatggactatagtatattggatgttaaatccatatatgatgtatattttgtaaaattgggaaaatcactaccttgtaaaatagtttatttgtatcatcaatattatttctgttacttgaatagtagatattcatcatcatgcttttgcacttgaatttgcaactgaatggattttaaaaaataattctttaatgggatcatgagcatgaaatgggatcctgcatcacttgttttaactatttattttgccatgtttacattttgtatcttgtaaaaataaatccaactttgtgtct

SEQ ID NO: 11640 - protein, 676 aa, Homo sapiens
MEIKPLQFEIMIDRLEKASSNQLVTLQEAKLLLNEDDYLIKAVYDYWVRKRKNCRGPSLIPQIKQEKRDGSTNNDPYVAFRRRTEKMQTRKNRKNDEASYEKMLKLRREFSRAITILEMIKRREKTKRELLHLTLEVVEKRYHLGDYGGEILNEVKISRSEKELYATPATLHNGNHHKVQECKTKHPHHLSLKEEASDVVRQKKKYPKKPKAEALITSQQPTPETLPVINKSDIKQYDFHSSDEDEFPQVLSPVSEPEEENDPDGPCAFRRRAGCQYYAPRLDQANHSCENSELADLDKLRYRHCLTTLTVPRRCIGFARRRIGRGGRVIMDRISTEHDPVLKQIDPEMLNSFSSSSQTIDFSSNFSRTNASSKHCENRLSLSEILSNIRSCRLQCFQPRLLNLQDSDSEECTSRKPGQTVNNKRVSAASVALLNTSKNGISVTGGITEEQFQTHQQQLVQMQRQQLAQLQQKQQSQHSSQQTHPKAQGSSTSDCMSKTLDSASAHFAASAVVSAPVPSRSEVAKEQNTGHNNINGVVQPSGTSKTLYSTNMALSSSPGISAVQLVRTVGHTTTNHLIPALCTSSPQTLPMNNSCLTNAVHLNNVSVVSPVNVHINTRTSAPSPTALKLATVAASMDRVPKVTPSSAISSIARENHEPERLGLNGIAETTVAMEVT

SEQ ID NO: 11641 - DNA, 2326 bp, Homo sapiens
  CDS (7)..(2130)
gtcaagatggcggctgcggcagtggcggcggcggcggcggcggccgcggctgcatctcttcaggtactggagatggagagcatggagacggccgccgccggctcggcaggactggccgccgaggtccgaggcagcggcacggtggacttcgggcctgggccggggatctctgcaatggaggcgagcgggggcgatccgggcccagaagccgaggatttcgagtgcagctctcactgctcagagctgtcctggcggcagaacgagcagcggcgccagggcctcttctgcgacattaccctgtgcttcggcggggctggaggccgcgagttccgggcccaccgctcggtactggctgccgccaccgagtacttcacgcccctgctctcgggccagttttccgagtcccgctcgggacgggtggagatgcgcaagtggagctccgagccggggcccgaacccgacacagtggaagccgtaatcgagtacatgtacaccgggcgcatccgcgtcagcacgggcagcgtgcacgaggtgctggagttggccgacaggttcctactcattcgtttaaaagaattttgtggagaatttctcaagaaaaaacttcatctctcaaattgtgtggcaattcatagcttagcacacatgtacaccctgagccaacttgctctgaaggctgctgatatgatacggagaaatttccacaaagtgattcaggatgaagaattttatacgttacctttccatctcattagagactggctttcagatttggaaattacagttgattctgaagaggttctctttgaaaccgttttgaaatgggttcagagaaatgctgaagagagagagagatactttgaagaactttttaaattgctcaggttgtcccagatgaaacctacctaccttactcgacatgtcaaaccagagaggctggtagccaataatgaagtttgtgtcaagttggtcgctgacgcagtggagagacatgctctgagagctgagaatatacaatctggcacatgccagcaccccacttctcatgtgtcactattgcctcgttatgggcaaaacatggatgtgatcatggttattggaggtgtgtcagaaggaggggactatttaagtgaatgtgtgggatattttgttgatgaggacagatgggtaaatctgccacatattcataatcacctcgatggacatgctgttgcagtaacagaatcctacgtgtatgttgctggatcaatggagccagggtttgctaaaactgtagaaaggtataacccaaatttgaatacatgggaacatgtttgtagtctgatgacaagaaagcattcttttggactaacagaagtcaaagggaagctctatagcattggaggacatggcaactttagtcctggttttaaagatgtgactgtttataatcctgagcttgataaatggcacaacttggaatcggcaccaaagattcttcgagatgtcaaagcactagccattgaagaccggtttgtatacattgccgcccgcactcctgtagaccgggacactgaagatggattaaaggctgtaattacttgctatgatacagagactcgacagtggcaagatgtggaatctttgccgcttattgacaattactgctttttccaaatgtctgtggtcaattcaaacttttatcagacagcatcatgttgtcccaagagttattgtttagaaaacgaagaggcagtaagaaaaattgccagccaagtgtctgatgagatccttgaaagcttgcctccagaagtcctaagcatcgaaggagcagccatttgctattacaaagatgatgtcttcattataggaggctggaaaaacagtgatgatattgataaacagtatcggaaagaagcctaccgatattgtgcggagaggaagaggtggatgcttcttcctcctatgccacaacctcgttgtagagccactgcttgtcacgtgaggatcccataccggtacttgcatggcacacagagataccctatgcctcaaaacctgatgtggcagaaggaccgcatcagacagatgcaagagatacatcgtcacgccctgaacatgaggcgagtgccaagctctcagattgaatgctaggttctctcaagcgtgccgattaaaactgttacacccgtttcgtgaagctgaagatacccaggctgttatttaaaaaagtatgtcgataacttattttctacatgaactgattattaccccatataaaggaaatagagttaaaaactaaagaatgggagactcagttcaatacatggtcattttgttagcttgc

SEQ ID NO: 11642 - protein, 708 aa, Homo sapiens
MAAAAVAAAAAAAAAASLQVLEMESMETAAAGSAGLAAEVRGSGTVDFGPGPGISAMEASGGDPGPEAEDFECSSHCSELSWRQNEQRRQGLFCDITLCFGGAGGREFRAHRSVLAAATEYFTPLLSGQFSESRSGRVEMRKWSSEPGPEPDTVEAVIEYMYTGRIRVSTGSVHEVLELADRFLLIRLKEFCGEFLKKKLHLSNCVAIHSLAHMYTLSQLALKAADMIRRNFHKVIQDEEFYTLPFHLIRDWLSDLEITVDSEEVLFETVLKWVQRNAEERERYFEELFKLLRLSQMKPTYLTRHVKPERLVANNEVCVKLVADAVERHALRAENIQSGTCQHPTSHVSLLPRYGQNMDVIMVIGGVSEGGDYLSECVGYFVDEDRWVNLPHIHNHLDGHAVAVTESYVYVAGSMEPGFAKTVERYNPNLNTWEHVCSLMTRKHSFGLTEVKGKLYSIGGHGNFSPGFKDVTVYNPELDKWHNLESAPKILRDVKALAIEDRFVYIAARTPVDRDTEDGLKAVITCYDTETRQWQDVESLPLIDNYCFFQMSVVNSNFYQTASCCPKSYCLENEEAVRKIASQVSDEILESLPPEVLSIEGAAICYYKDDVFIIGGWKNSDDIDKQYRKEAYRYCAERKRWMLLPPMPQPRCRATACHVRIPYRYLHGTQRYPMPQNLMWQKDRIRQMQEIHRHALNMRRVPSSQIEC

SEQ ID NO: 11643 - DNA, 2232 bp, Homo sapiens
  CDS (428)..(2068)
atctaatgaggagcgaggtgcggtgccccgaagcgctcgcttcccgcggtgcgatctagtcctgcagtaggcggcccggggccacaccgcggccgcccaagccagtgcaaggcccaggggcctgacatcgctcccagcgctcgaggaccgaggcctgctgtggaggacaccgtgctccctcgggacctgctctggattccggcccggacgtccccttggagctctgcatctccaacctggaacccaacccagaagtctcaagtttgacgcatcacgtggcgtgcggatccactgagggtccacagagaggggcgcccatctcctgcgtctcagttatcctggtgttgggaattctgtgccctaaagaattccgactcagatccgaacggggatctggtggaatcgagggtgaaagaccagagggacaatgttctactatcccaacgtgcttcagcgccacaccggctgctttgccaccatctggctggcggcgactcgcggcagccggttggtgaagcgcgaatacctgagggtgaatgtggtgaaaacctgcgaggaaatcctcaattacgtgctggtacgagtgcaacccccgcagcccggcctgccgcggccccgcttctccctctatctctcagcccaacttcagatcggtgtgatccgcgtctattctcaacaatgccagtacctcgcggaggacatccagcacatcttggagcgcctccaccgtgcccagctgcagatccgaatagatatggagactgagctacccagcctgctgcttcctaaccacctggccatgatggagaccctagaagatgctccagatcccttttttgggatgatgtctgtggatcccagacttcctagtcctttcgatatccctcagattcgacacctcttagaggctgcaatcccagagagagttgaagagatccctcctgaagttcctacagagcccagggagccagagaggattccggtcactgtgctgccacctgaggccatcacgatcctggaggcagagcccatacggatgctggagattgagggtgaacgggagctcccagaggtcagccgccgagaactggacctgctgatcgcagaggaagaagaagctatcttgttagaaatcccgcggctcccacctccagctcctgcagaggtggaaggaataggagaggcactgggtcctgaggagctgaggctgacaggctgggaacctggggccctactcatggaggtgacccccccggaggagctgcgtctgccagccccacccagcccagagaggaggcccccagtccccccacctcctcgccgccgccgtcgtcgccggttactgttctgggacaaggagactcagatctccccggagaaattccaggaacaactgcaaaccagagcccactgctgggaatgtcctatggtgcagccgcccgagaggaccatcagaggccctgcggagttgttcagaaccccaactctctctggctggctaccccctgaactactgggtctctggacccattgtgcccagccacccccaaaagccctcaggcgagagctgcctgaggaggcagccgctgaggaggaaaggagaaagattgaagttccaagtgagattgaggtcccgagggaggccctggagcccagtgttccccttatggtgtctttagagatctccctagaggcagctgaagaggagaagtcccgcatcagcctcatcccaccagaagaacggtgggcctggcctgaggtggaggcgccagaagctcctgcattgcccgtggtgcctgaactccctgaggtgcccatggagatgcctttggtgctgcccccagagctcgagctgctctcactggaagcagtgcacagggcagtggcactggagctgcaggctaacagggagcccgacttcagcagcctggtgtcacctctcagcccccgcaggatggctgcccgggtcttctacctgctcctggtgctctcagcgcaacagattcttcacgtgaaacaagaaaagccatatggtcgcctcctgatccagccggggcccagattccactgaggttagagtccatttacaaagctgccaggaaaccggccacttctagtaaaccacgtcgtgcctcactgggtcctgcttacctcatttctgaatgtgcatttccagccttcttgctctcagagctattgttcaagcagaaaacaagctgcttttattacagt

SEQ ID NO: 11644 - protein, 547 aa, Homo sapiens
MFYYPNVLQRHTGCFATIWLAATRGSRLVKREYLRVNVVKTCEEILNYVLVRVQPPQPGLPRPRFSLYLSAQLQIGVIRVYSQQCQYLAEDIQHILERLHRAQLQIRIDMETELPSLLLPNHLAMMETLEDAPDPFFGMMSVDPRLPSPFDIPQIRHLLEAAIPERVEEIPPEVPTEPREPERIPVTVLPPEAITILEAEPIRMLEIEGERELPEVSRRELDLLIAEEEEAILLEIPRLPPPAPAEVEGIGEALGPEELRLTGWEPGALLMEVTPPEELRLPAPPSPERRPPVPPPPRRRRRRRLLFWDKETQISPEKFQEQLQTRAHCWECPMVQPPERTIRGPAELFRTPTLSGWLPPELLGLWTHCAQPPPKALRRELPEEAAAEEERRKIEVPSEIEVPREALEPSVPLMVSLEISLEAAEEEKSRISLIPPEERWAWPEVEAPEAPALPVVPELPEVPMEMPLVLPPELELLSLEAVHRAVALELQANREPDFSSLVSPLSPRRMAARVFYLLLVLSAQQILHVKQEKPYGRLLIQPGPRFH

SEQ ID NO: 11645 - DNA, 1786 bp, Homo sapiens
  CDS (59)..(472)
gtacgccgattccatatgggcgccggcgcggagcgccgcggggcagcgcggggtcgccatggctgagctgcagcagctccgggtgcaggaggcgatggagtccatggtgaagagtctggaaagagagaacatccggaagatgcagggtctcatgttccggtgcagcgccagctgttgtgaggacagccaggcctccatgaagcaggtgcaccagtgcatcgagcgctgccatgtgcctctggctcaagcccaggctttggtcaccagtgagctggagaagttccaggaccgcctggcccggtgcaccatgcattgcaatgacaaagccaaagattcaatagatgctgggagtaaggagcttcaggtgaagcagcagctggacagttgtgtgaccaagtgtgtggatgaccacatgcacctcatcccaactatgaccaagaagatgaaggaggctctcttatcaattggaaaataaaagtatttgccagtggccatcaggctgagggcaagaatatattttttataaggaattgggaattttagtcttttaagcaaagtttacgaatgaagaaatgaaggatggccacaagcgtaaggcatatgtcacttgcctctggacactggttattttatgtttcagtccctaaaaaatgaaatggaaaaaagtggtgctaaatcgagtcagagatattacaggagagttttagagcttattatttcctgtggccagtgcttgtcctggcagtaaggctctcccctgtaacaagccagagccctccaaggtaccagactcttcttactacacaggtactaacaggctggcaggttagagttggtggagtctgaggagagatattttctctttgttgccaacatcctgtttaccaaaagtgtcaccccaccatcttccataagctgtgaaacaaaatcaatgaggtcactaacttagaagggaaagaaagttttctgggtctttgttttcttgatttggggtaatttatacaagggcatacaagttgattttaagatgtggaactgggaggtagactagtttggataagaactttgaaatgttccttgtggatccccatttctggtcatcaagatgtggatgtacatttcttaaaattattacatgctgcatctttcagcctggagactgtgcagaaacatgagaggtgatgacacactaattatgggaagcagaattactggctgatggcccctgaggctgtgtgtaacaaaatgacaggacaatcttgcagtaacactttccccttgaagagaagggggttttgattgtgatatatactagtatctaggaatgaacagtaaaagaggagcagttggctacttgattacaacagagtaaatgaagtactggatttgggaaaacctggttttattagaacatatggaatgaaagcctacacctagcattgcctacttagccccctgaattaacagagcccaattgagacaaacccctggcaacaggaaattcaagggagaaaaagtaagcaacttgggctaggatgagctgactcccttagagcaaaggagagacagcccccattaccaaataccatttttgcctggggcttgtgcagctggcagtgttcctgccccagcatggcaccttattgttttgatagcaacttcgttgaattttcaccaacttattacttgaaattataatatagcctgtccgtttgctgtttccaggctgtgatatattttcctagtggtttgactttaaaaataaataaggtttaattttctcccc

SEQ ID NO: 11646 - protein, 138 aa, Homo sapiens
MAELQQLRVQEAMESMVKSLERENIRKMQGLMFRCSASCCEDSQASMKQVHQCIERCHVPLAQAQALVTSELEKFQDRLARCTMHCNDKAKDSIDAGSKELQVKQQLDSCVTKCVDDHMHLIPTMTKKMKEALLSIGK

SEQ ID NO: 11647 - DNA, 1600 bp, Homo sapiens
  CDS (49)..(1359)
atgctgggcggcgtcaggtgagcggtggtcgctgggcctcaggtaaccatggagaaagagctgcggagcaccattcttttcaatgcctacaaaaaggagatatttaccaccaacaatggctacaaatccatgcagaaaaaacttcggagtaattggaagattcagagcttaaaagatgaaatcacatctgagaagttaaatggagtaaaactgtggattacagctgggccaagggaaaaatttactgcagctgagtttgaaatcctgaagaaatatcttgacactggtggagatgtctttgtgatgctaggagaaggtggagaatccagatttgacaccaatattaactttttactagaagaatatggaatcatggttaataatgatgctgtggttagaaatgtatatcacaaatatttccatcctaaagaagctctagtttccagtggagtcttgaacagggaaattagccgagctgcaggaaaggctgtgcctgggatcattgatgaggaaagcagtggaaacaatgcccaggctctcacctttgtgtatccttttggtgccacattgagtgtcatgaaaccagcagtggcggttctgtctacaggttctgtctgcttcccacttaacagacccattttggctttctatcactcaaagaaccaaggtgggaagctggcagtgcttggttcatgtcacatgttcagtgatcaatatttggacaaagaagaaaacagcaaaatcatggatgttgttttccagtggctcacgacaggagacatccacctaaaccagattgatgctgaggacccagagatttctgactacatgatgctgccctacacagccaccctatcaaagcggaatcgagagtgtctccaggagagtgatgagatcccaagggactttaccaccctcttcgacctgtccatcttccagctggataccacctccttccacagcgtcatcgaggctcacgagcagctaaatgtgaaacatgaaccactccagctcatccagcctcagtttgagacgccgctgccaacccttcagcctgcggtttttcctcccagtttccgggagttaccacctcctcctctggagctatttgatttagatgaaacgttctcctctgagaaggcacggctggctcagattaccaataagtgtactgaagaagacctggaattttatgtcaggaagtgtggtgatattcttggagtaaccagtaaactaccaaaggaccaacaggatgccaaacatatccttgagcacgtcttcttccaagtggtggagttcaagaaattgaaccaggaacatgacatcgatacaagtgaaacagcattccagaacaatttctgaagaccatgcctcttgaagctttttctgcctcctgattctctctttgtaaactattttcaaattgtttttcaactccttatcaaaattgtttatacactctttcctccatgagctctggaaggtatatgcatcttctgtaatactcagataggtataagatttttcacaaaatccttatgtaagatacattccatttttaaaaattaaatgtatggttgcatctgtctttttataccct

SEQ ID NO: 11648 - protein, 437 aa, Homo sapiens
MEKELRSTILFNAYKKEIFTTNNGYKSMQKKLRSNWKIQSLKDEITSEKLNGVKLWITAGPREKFTAAEFEILKKYLDTGGDVFVMLGEGGESRFDTNINFLLEEYGIMVNNDAVVRNVYHKYFHPKEALVSSGVLNREISRAAGKAVPGIIDEESSGNNAQALTFVYPFGATLSVMKPAVAVLSTGSVCFPLNRPILAFYHSKNQGGKLAVLGSCHMFSDQYLDKEENSKIMDVVFQWLTTGDIHLNQIDAEDPEISDYMMLPYTATLSKRNRECLQESDEIPRDFTTLFDLSIFQLDTTSFHSVIEAHEQLNVKHEPLQLIQPQFETPLPTLQPAVFPPSFRELPPPPLELFDLDETFSSEKARLAQITNKCTEEDLEFYVRKCGDILGVTSKLPKDQQDAKHILEHVFFQVVEFKKLNQEHDIDTSETAFQNNF

SEQ ID NO: 11649 - DNA, 2235 bp, Homo sapiens
  CDS (116)..(1597)
acacgccgcgctgaggcccgcgggcccgtcatggaggcgcccaccgtggagacgccccccgacccctcgcccccttcggccccggcccctgccctggttccgttgcgcgccccggatgtggcgcggctgcgcgaggagcaggaaaaggaagaaggtagataatgactataatgcccttcgagaaagactcagcaccttgcctgataaattgtcttataatataatggtaccatttggcccttttgccttcatgccaggaaaacttgtccatactaatgaagtcactgttttactgggggacaactggtttgcaaagtgctcagcaaagcaggctgtaggtttagttgagcaccggaaagaacatgtaagaaaaacaatagatgacttaaaaaaagtgatgaaaaattttgaatccagagttgaattcacagaagatttgcagaaaatgagcgatgctgcaggtgatattgttgacatacgagaagaaattaaatgtgacttcgaatttaaagcaaaacaccgaattgctcataaaccgcattccaaaccaaaaacttcagatatttttgaagcagatattgcaaatgatgtgaaatccaaggatttgctagctgataaagaactgtgggctcgacttgaagaactagagagacaggaagaattgctgggtgaacttgatagtaagcctgatactgtgattgcaaatggagaagatacgacatcttctgaagaggaaaaggaagatcgtaacacaaatgtgaatgcgatgcatcaagtaacagactctcatactccttgtcataaggatgttgcaagttcagaaccattcagtggtcaagtgaatagtcagttgaactgttcagtgaatggttccagttcttaccacagtgatgatgatgatgatgatgatgacgacgacgacgacaacattgacgacgatgatggtgataacgaccatgaggctttaggggttggagataattctataccaacaatatatttttcacatactgttgagcctaagagggtccgaataaatactggaaagaataccactttaaaattcagtgaaaagaaagaagaagccaaacgtaaacgaaagaacagcactggcagtggccactctgcccaggagctgccgaccatcaggacgcctgcagacatttacagagcctttgttgatgttgtgaatggagaatatgtccctcgcaaatccatcctgaagtctcgaagtagagagaatagtgtgtgtagcgacactagtgaaagcagtgctgctgaatttgatgataggcggggagttttgaggagtatcagctgcgaagaagccacttgcagtgacaccagtgagagcattttggaagaggaaccacaagaaaatcaaaagaaacttttgcccttatcagtaacacctgaggctttttctggaactgttatagaaaaagaatttgtatcaccttccttaacaccacccccagccattgctcatcccgcactacccactattccagaacgaaaggaagttctgttggaagcatctgaagaaactggaaagagggtttcaaagtttaaagctgccagattgcaacagaaagactaggccctgtctaggaaatgggaatttacatcctaaaacctagttgttcatttgtttagagtatctatagcaaaataggttacatgtagtttgaaataaggtatcctgagttactttggcaacaagttcttttacccttacccgtggtatttgaaaaaaatcaaggtaactgtctgaatactttaatatcagcttgttttgtgaattctctgaatactgtcaacactcttatctaagtttgcctttatgatgcagtggcagcattttgaattacttttcaaagaatactgttcatatgcattgtttttgtgtttcaaactaaatacaggcagttttgtgccagctgtgatattgtgcataccatatggaccattttaaagaaaattttaaaatttcaaatagattcaacaattacattacttgctttcacattttaaaggcactttaaaaaaatctacttctcttgtaggttttgcggctagttggctattcaagaaacctcgcccctctgaatgtcatactgtaatctttaaggaagaaagctacatgaattaattgtactctatgggaaaatttctttggaaagatattttgtaaaacttttttttccaagtaaaaactttatgaaacttggtctc

SEQ ID NO: 11650 - protein, 494 aa, Homo sapiens [sequence omitted]

SEQ ID NO: 11651 - DNA, 2328 bp, Homo sapiens
  CDS (40)..(1308)
gtgacttcgggctgtgggctcgctcgcggctcttcggccatggttttctcaaacaatgatgaaggccttattaacaaaaagttacccaaagaacttctgttaagaatattttccttcttggatatagtaactttgtgccgatgtgcacagatttccaaggcttggaacatcttagccctggatggaagcaactggcaaagaatagatctttttaactttcaaacagatgtagagggtcgagtggtggaaaatatctcgaagcgatgcggtggattcctgaagaagctcagcttgcgaggctgcattggtgttggggattcctccttgaagacctttgcacagaactgccgaaacattgaacatttgaacctcaatggatgcacaaaaatcactgacagcacgtgttatagccttagcagattctgttccaagctgaaacatctggatctgacctcctgtgtgtctattacaaacagctccttgaaggggatcagtgagggctgccgaaacctggagtacctgaacctctcttggtgtgatcagatcacgaaggatggcatcgaggcactggtgcgaggttgtcgaggcctgaaagccctgctcctgaggggctgcacacagttagaagatgaagctctgaaacacattcagaattactgccatgagcttgtgagcctcaacttgcagtcctgctcacgtatcacggatgaaggtgtggtgcagatatgcaggggctgtcaccggctacaggctctctgcctttcgggttgcagcaacctcacagatgcctctcttacagccctgggtttgaactgtccgcgactgcaaattttggaggctgcccgatgctcccatttgactgacgcaggttttacacttttagctcggaattgccacgaattggagaagatggatcttgaagaatgcatcctgataaccgacagcacactcatccagctctccattcactgtcctaaactgcaagccctgagcctgtcccactgtgaactcatcacagatgatgggatcctgcacctgagcaacagtacctgtggccatgagaggctgcgggtactggagttggacaactgcctcctcatcactgatgtggccctggaacacctagagaactgccgaggcctggagcgcctcgagctgtacgactgccagcaggttacccgtgcaggcatcaagcggatgcgggctcagctccctcatgtcaaagtccacgcctactttgctcccgtcaccccaccgacagcagtggcaggaagtggacagcgactgtgcaggtgctgtgtcattctctgacagcagctgcctgggcccaaggggtgatgaggcatcctttcctctagaagacctgagtcttcctgaccgactccaccatcacccaatctgttgattctccattgggaaaggcatttacaggtaaaagacttctgtatggattgcagttactctggtgatagttttcacctttattctgctgtgaaacaatcaaatcaaagccttgtgtcagttaacacatgacaagtggtctcaatgcagctaggaccatgccagaaacctggatctcttaagagattggtacctacctaggtacgaaagttctacccttggcatactcagcattcctcaaaaagaccatcagtgttagcacaaactgagcagaaaaaataagctgttgattttctacctgatacttaagccagtggcctactttaattcacaattccattttgattagcaggacttttccactttgaagataaatagcaactttatcaaagtgactgtactgcaaattaattcataatgcctgatagttttatatatagagacttatgtggaaggcatgttaataggtttccatgagacaccaaagaaaagaggactctatactgggtggagcagggtcttcacctttttgtttctgtcaacttgtcatatacacctccagggaccaaaaacaaaagcagctcggagtctgtgttgcctgattggaaagtagaagctctggtgtatgctacagcacataacacatttttactaaaggaaaaaagctaattatgtccatgcctctcgtaaaactggggggaaccttaaagagaaagaactaaggcttaagttatctgtagtataatcaattagaagtaatgaatggatgcatgtaaaatggatgtgattttttttcaagcttattttgaaatcttaaaaatcaggttacaccatagctactcaaaagttttacacacttaaaactcagatcagtaagtgttggtaccttttagactcataaaattgaataaaccattgcaatgcttt

SEQ ID NO: 11652 - protein, 423 aa, Homo sapiens
MVFSNNDEGLINKKLPKELLLRIFSFLDIVTLCRCAQISKAWNILALDGSNWQRIDLFNFQTDVEGRVVENISKRCGGFLKKLSLRGCIGVGDSSLKTFAQNCRNIEHLNLNGCTKITDSTCYSLSRFCSKLKHLDLTSCVSITNSSLKGISEGCRNLEYLNLSWCDQITKDGIEALVRGCRGLKALLLRGCTQLEDEALKHIQNYCHELVSLNLQSCSRITDEGVVQICRGCHRLQALCLSGCSNLTDASLTALGLNCPRLQILEAARCSHLTDAGFTLLARNCHELEKMDLEECILITDSTLIQLSIHCPKLQALSLSHCELITDDGILHLSNSTCGHERLRVLELDNCLLITDVALEHLENCRGLERLELYDCQQVTRAGIKRMRAQLPHVKVHAYFAPVTPPTAVAGSGQRLCRCCVIL

SEQ ID NO: 11653 - DNA, 2742 bp, Homo sapiens
aagaagatgcctggagcaggcagcatcctcaaatggaaggtaattgccctcaaatcacttaactaggatgacctactttgctttcctgtatagccaggtctgttatcagacccttatcttgggaggcatcgtgccagagcctggggcaagaaagggctgctatccaggaatgcaggtgaaattatagctattagccctgtcttagagtgtgaggaaaatgtgcccccctacccctggctaagtttgggttcccatgtcataaactgcctccctctctgatagctctgcataaacatcccaggaactcaaagtaacatttgatttcccaaagagaacatttgcatttgtaactgtcagaaataggagagatcatcaaagctaaatgaattgggctataaacagtttgaaatatgtctttaaattttaaaaaacatattttttgtttgttttggggagagaggatcatttagactcaacaacaaaacagaaaactgtgagtgccattttgagacaagacctacctggtccttccccctcatactttctgctaccccgtgacctccctctctccttccagtcacagattatccgcttggttttggagttttaaatgtgtggtcctgagagggagaggagagcaagagaatctcaagatagatttggaagattagggtaagacagtgagggtactagaagtgctttcccaagtgagtccccagaggggagggaaaatatccatggagaaggggcagtgtggttggtcctggctaaagggcctgaacagcagaggctattgcagccctgcatagcacagggcaatggaataacttcataggcccccaaactgcatggaagcagatagggtcttagaagcacggggttgctttcctggacctggtgtggcttggaagccacaaaatgtttcctgtgcacctacaagagtgtaagaaaaccactggataggaaaggaccttgcagactggaatgagtcatcatgcagaccaaagtctacctcagtagatggcagtgtggatggatagggacagatgtccggatactgtctgtcgtgtgcactcccaccccagccttttggtattcctggtacaaagatataactcttaggaaaaacagaaaccctaaataggctgagattaagtttctttcacctggaagaatgaagactatggtagattttgagttataaaactcaaatttttgcatttcttgaacacctaagtctatggactgatattagcaccagctgcagaaataagcacagttctcaccacttttcaatttgaatgcagaaggagccttgtctggccatagctctgccctctacagtggaaaacataactttagtggaatttagagatctttgagtaaagacagaagaatagcaaagtctgttatttaccacctcactttttttgtacaaatatttgaaagcattttcgcattatacaatacaatttgtttctattttgaggcaaacacatctgttagaggaattattgcatttcttccccctagaaagctgtctccttaatctttccacaaagtcttgagaatgttagcttctttttctacattgttggaaatcacagcgtggtgttcctcctgacggcactcccaccttcatcattctgtgcttacagtttcaccacattccattgttctaatgaggtgactgagtggaagctgaggttagaagataaaacttagaacaggagcagcccttggctcctttcccttggagggtgcttcaaaagaggtgaagttttcaaagatagaacttcagggagagggttttgtgttccggcttcgaagtggcagttctttcctgagttgtcacctggactatcttaccatatttcctggttgaatgattcctctaaatcttatcttagcctggccaaatatccctggtccctttgatatctaagttttctggccaagaagcaaattcctgtagttccaaatcagtagctcaagttcctgggtcagactacccgcaggccctcaagttgctgtctggttgtcgtctaaaaagttgatgtcacaggccagttgataaggccttacacaagttatgtgacaattcttaacctaagtttcctcagctataaagtggggattatagcaatatcccacaatacctctgacaatgaaataatgtgtatatattgcttggcaccggatatggtttggatctgtatccccatccaaatctcatgttgaaatgtaatctgttatgttggaggtgggacctggtgggaggtgattgaatcatgggggtggtttctaatggtttatcactgtctccctagagctgttctcatgatagagttctcgtgagatctggttgtctaaaagtgtgtggcacctccccaccccacttttcctcctgctccagcaatgttcaatgtgcctgcttcctgttcaccttctgccatgattgtaagtttcctgaggcctcccctgccatgcctcctgtacagcctgtggaactatgagccaattaaacctcttttctttataaattgcccagcctcaggtattctttatagcagtacaagaactaatacagcacctaataggcattcaacaaatagtaattccctgctccttctgcctaagcagacatgcatgggtttgtgtatctaaactgtaggactttacaaagactaaaatggaattttttgaggcatttcactataatcaataaaataaagtatttgt

SEQ ID NO: 11654 - DNA, 1186 bp, Homo sapiens
  CDS (109)..(810)
actgagtttgagggtgcagtcatagctctgttccatttgttggccaccaggacggacaaagtccgagctttacgggaggctttttatcggcagaacttacccaatctcatgaacctcattgctacagtttttgtgtttgctgttgttatatatttccaaggatttcgcgttgatctgcccattaagtcggcccgttaccgaggacagtacagcagctaccccatcaaactcttctacacctccaacatccccatcatcctccagtcggccctggtgtccaacctgtatgttatttcccagatgctgtctgttcgatttagtggcaactttttagtaaatttactaggacagtgggccgatgtcagtgggggaggacccgcacgttcttacccagttggaggcctttgttactatctttctcctcctgagtccatgggcgccatctttgaggatcctgtccatgtcgttgtttatatcatcttcatgttggggtcatgtgcattcttctctaagacatggattgaagtgtctggttcctcagccaaagatgtagctaaacagctgaaagaacagcagatggtaatgaggggccaccgagatacctctatggttcatgagcttaataggtacatccccaccgcagctgcgtttggcggtttgtgcattggcgccctgtcagtgctggctgacttcctgggggccattggatctggcactggaattctgctagcagtcactattatttaccagtattttgaaatatttgttaaagaacaggccgaagttggtgggatgggtgctttgtttttctaaatgttcaaatatttcattttgtgcgtgtgaaagggaaaacactttgacggatcgtttttgtcagatgacactggtggctccccttttctcccctcacagtttcttgtttcgagtgctgactgacccgtttctgaaatgggcaccgagctaagtctgtgtgcagcattagtacccgctgccttaaaactcaagtttacattattcattaaaaaaagtacatctagtgttgcctgtaatgctggaaaccagtgtatctaccttgctgtgttaaatcatgacagtgagacggtgagatggattcgttttgcacacaacattcaaaacacttcatattgcccccacttgttgaaaaataaatgtagttcaaattgcc

SEQ ID NO: 11655 - protein, 234 aa, Homo sapiens
MNLIATVFVFAVVIYFQGFRVDLPIKSARYRGQYSSYPIKLFYTSNIPIILQSALVSNLYVISQMLSVRFSGNFLVNLLGQWADVSGGGPARSYPVGGLCYYLSPPESMGAIFEDPVHVVVYIIFMLGSCAFFSKTWIEVSGSSAKDVAKQLKEQQMVMRGHRDTSMVHELNRYIPTAAAFGGLCIGALSVLADFLGAIGSGTGILLAVTIIYQYFEIFVKEQAEVGGMGALFF

SEQ ID NO: 11656 - DNA, 2251 bp, Homo sapiens
  CDS (186)..(1595)
gacgtcacggtcactgacagcgtgagcccgcggcggctgctgccatggtggctggcggccgggtaagggtctgagtggatctcctgccaggccagagcgccttcgggggccgcggcggaaggccaggagtttgcagccagggcgccgggtttgtggtctgcagtgtcgtgaggctgaggtgcagcatgtctagactgggagccctgggtggtgcccgtgccgggctgggactgttgctgggtaccgccgccggccttggattcctgtgcctcctttacagccagcgatggaaacggacccagcgtcatggccgcagccagagcctgcccaactccctggactatacgcagacttcagatcccggacgccacgtgatgctcctgcgggctgtcccaggtggggctggagatgcctcagtgctgcccagccttccacgggaaggacaggagaaggtgctggaccgcctggactttgtgctgaccagccttgtggcgctgcggcgggaggtggaggagctgagaagcagcctgcgagggcttgcgggggagattgttggggaggtccgatgccacatggaagagaaccagagagtggctcggcggcgaaggtttccgtttgtccgggagaggagtgactccactggctccagctctgtctacttcacggcctcctcgggagccacgttcacagatgctgagagtgaagggggttacacaacagccaatgcggagtctgacaatgagcgggactctgacaaagaaagtgaggacggggaagatgaagtgagctgtgagactgtgaagatggggagaaaggattctcttgacttggaggaagaggcagcttcaggtgcctccagtgccctggaggctggaggttcctcaggcttggaggatgtgctgcccctcctgcagcaggccgacgagctgcacaggggtgatgagcaaggcaagcgggagggcttccagctgctgctcaacaacaagctggtgtatggaagccggcaggactttctctggcgcctggcccgagcctacagtgacatgtgtgagctcactgaggaggtgagcgagaagaagtcatatgccctagatggaaaagaagaagcagaggctgctctggagaagggggatgagagtgctgactgtcacctgtggtatgcggtgctttgtggtcagctggctgagcatgagagcatccagaggcgcatccagagtggctttagcttcaaggagcatgtggacaaagccattgctctccagccagaaaaccccatggctcactttcttcttggcaggtggtgctatcaggtctctcacctgagctggctagaaaaaaaaactgctacagccttgcttgaaagccctctcagtgccactgtggaagatgccctccagagcttcctaaaggctgaagaactacagccaggattttccaaagcaggaagggtatatatttccaagtgctacagagaactagggaaaaactctgaagctagatggtggatgaagttggccctggagctgccagatgtcacgaaggaggatttggctatccagaaggacctggaagaactggaagtcattttacgagactaaccacgtttcactggccttcatgacttgatgccactatttaaggtgggggggcggggaggcttttttccttagaccttgctgagatcaggaaaccacacaaatctgtctcctgggtctgactgctacccactaccactccccattagttaatttattctaacctctaacctaatctagaattggggcagtactcatggcttccgtttctgttgttctctcccttgagtaatctcttaaaaaaatcaagattcacacctgccccaggattacacatgggtagagcctgcaagacctgagaccttccaattgctggtgaggtggatgaacttcaaagctataggaacaaagcacataacttgtcactttaatctttttcactgactaataggactcagtacatatagtcttaagatcataccttacctaccaaggtaaaaagagggatcagagtggcccacagacattgctttcttatcacctatcatgtgaattctacctgtattccagggctggaccacttgataacttccagtgtcctggcagcttttggaatgacagcagtggtatggggtttatgatgctataaaacaatgtctgaaaagttgcctagaatatattttgttacaaacttgaaataaaccaaatttgatgtt

SEQ ID NO: 11657 - protein, 470 aa, Homo sapiens
MSRLGALGGARAGLGLLLGTAAGLGFLCLLYSQRWKRTQRHGRSQSLPNSLDYTQTSDPGRHVMLLRAVPGGAGDASVLPSLPREGQEKVLDRLDFVLTSLVALRREVEELRSSLRGLAGEIVGEVRCHMEENQRVARRRRFPFVRERSDSTGSSSVYFTASSGATFTDAESEGGYTTANAESDNERDSDKESEDGEDEVSCETVKMGRKDSLDLEEEAASGASSALEAGGSSGLEDVLPLLQQADELHRGDEQGKREGFQLLLNNKLVYGSRQDFLWRLARAYSDMCELTEEVSEKKSYALDGKEEAEAALEKGDESADCHLWYAVLCGQLAEHESIQRRIQSGFSFKEHVDKAIALQPENPMAHFLLGRWCYQVSHLSWLEKKTATALLESPLSATVEDALQSFLKAEELQPGFSKAGRVYISKCYRELGKNSEARWWMKLALELPDVTKEDLAIQKDLEELEVILRD

SEQ ID NO: 11658 - DNA, 1025 bp, Homo sapiens
ggctcgtcccttcccccacccccagccgccgccgccgcccgcgcttcgcaacaaagccggctgcggagccatggtccacgccgcccgcccgcgaccccgccgccccgcatggtagccggaacgtctctcccttaccagccttcgcttcctggtgcccagctcttaggaccgtgtgtgactctggccttctaccgagacaacagagaaacgcacagcaactcgcatggaggaatcggcgaaatggctccgaccgcggcgctagggggcggggccagcgagcggtgttgaaagcagcaggggcctagaagacattaaaccgataccacagaaatacaaaggatcattagagactattatgaacaactatatgccaacaaattggaaaccaaatggaaatggataaattcctgaacagatacaacttaccaaaattggaccaagaagaaatagaaaacctgaaaagaccaactatgagtaatgagattaaatcagtaatatagagtctcccatcaaagaaaagtccaggccctgatggcttcactgctgaattctactgaacagttaaagaagaactcataccagttctcaaactcatcctgtgagggcagcattaccctgataccaaaactagatatggacacaagaaaaaaaatctataggccagtatccctgatgaacatagatgcaagaatcctcaacaagaccaggtgtggtggttcatgcctgtaatcccagcactttgggaggccaaggcaggtggatcacctgaggtcaggaatttgagaccagcctggccaacatggcaaaaccctgtctgtactaaaaatacaaaaattagccgggcaaggtggcgtgtgcctgtaatcctagctacttgggaggctgaggcaggagaattgcttgaacctggagggaggaggggcagaagttgcagcgagctcagatcgtcccactgcactccagcctgggtgacagagtgagactccatctcaaaataagtaaataaataaagagactcaactagc

SEQ ID NO: 11659 - DNA, 1718 bp, Homo sapiens
  CDS (27)..(1286)
gtgacgcagcccgggtctcagggaacatggcggcgctggtgagacccgcgaggtttgtcgtgcgaccgttgctgcaggtggtccaggcttgggaccttgacgcgaggcgctgggtccgggcgctgcggcggagcccagtgaaagtggtgtttccttccggagaggtggtggaacagaagcgcgctcctgggaagcagccccgcaaggcaccatctgaggccagtgcccaggagcaacgagagaaacaaccgctcgaggagtccgcatcccgcgctcccagcacctgggaagagtctgggcttcgctacgataaagcttatcccggggacaggaggctgagcagtgtaatgacaatagtaaagtccaggccatttcgggaaaaacaagggaagatcctgctggaaggtcgcaggctcatttcagacgctctcaaggctggagctgtgccaaaaatgttcttctttagccgtctagaatacctaaaggagttgccagtcgataagctgaaaggtgtcagcctcattaaggtgaaatttgaggatatcaaggattggtccgacctcgtaacgccacaaggaataatggggatttttgccaagcctgaccatgttaagatgacatatccaaagactcagcttcagcattcactgcctttattattgatttgtgacaatctccgtgaccctgggaacctggggacaattctgagatctgcagctggggcaggctgcagcaaagtgttactcaccaaaggctgtgtggatgcctgggagcccaaagtgctccgggcgggtatgggcgcacatttccggatgcccattatcaataatctggaatgggaaaccgtgcccaattacctgccccctgacactcgggtctatgtggctgacaactgtggcctttatgcccaggctgagatgtctaataaagctagtgaccatggctgggtgtgtgatcaacgagtgatgaagtttcacaagtatgaggaagaggaagatgtagaaaccggagccagtcaagattggctgcctcatgttgaggttcagagttacgactcggactggacagaggcgccggcagctgtggtgattggcggggagacctacggcgtgagcctggagtccctgcagctggccgagagcactggtggcaagaggctgctgatccccgttgtgcctggtgtggacagcctcaactcggccatggcggcaagcatcctgcttttcgaagggaaaagacagctgcgggggagggcggaggacttgagcagggacaggagttaccactgaggacgcagaagtgacttctgcttgaggacgtctgcagctcctcctacaccagcacactggtgggaggctggcggagtcagtgactatggcccccacgttcaggaggaaggtgtgatgccgtcatacagttacaggaaaaataagaacttcctcagaaagaacaggtccgaattcttcctgtcgcgtcactgattttgaggttcttttttctcttggtgacaataggtgacccacgtggctctgtgtgtttttaaaaattgtccaccaagaagcactttgtgcccagaaagttcctgaagcatcatcctggcagggaggcgcctgctccaccagctggtgggtgtttgtaatcgccaagcaccagctataggtcacagccacatcactcacagctgatcactggttggtggaaaataaactatgagcagc

SEQ ID NO: 11660 - protein, 420 aa, Homo sapiens
MAALVRPARFVVRPLLQVVQAWDLDARRWVRALRRSPVKVVFPSGEVVEQKRAPGKQPRKAPSEASAQEQREKQPLEESASRAPSTWEESGLRYDKAYPGDRRLSSVMTIVKSRPFREKQGKILLEGRRLISDALKAGAVPKMFFFSRLEYLKELPVDKLKGVSLIKVKFEDIKDWSDLVTPQGIMGIFAKPDHVKMTYPKTQLQHSLPLLLICDNLRDPGNLGTILRSAAGAGCSKVLLTKGCVDAWEPKVLRAGMGAHFRMPIINNLEWETVPNYLPPDTRVYVADNCGLYAQAEMSNKASDHGWVCDQRVMKFHKYEEEEDVETGASQDWLPHVEVQSYDSDWTEAPAAVVIGGETYGVSLESLQLAESTGGKRLLIPVVPGVDSLNSAMAASILLFEGKRQLRGRAEDLSRDRSYH

SEQ ID NO: 11661 - DNA, 922 bp, Homo sapiens
  CDS (93)..(629)
ggccatctctgggcggcggcggcgggcggtgtctgcgcggtcggtgagacccgcgcgggtgagacgctggccctccttacagcctagaaaaaatgacagatctcgtagctgtttgggatgttgctttaagtgacggagtccacaagatcgaatttgaacatgggactacatcaggcaaacgagtagtatatgtagatggaaaggaagagataagaaaagagtggatgttcaaattagtgggcaaagaaacattctatgttggagctgcaaagacaaaagcgaccataaatatagacgctatcagtggttttgcttatgaatatactctggaaattaatgggaaaagtctcaagaagtatatggaggacagatcaaaaaccaccaatacttgggtattacacatggatggtgagaactttagaattgttttggaaaaagatgctatggacgtatggtgcaatggtaaaaaattggagacagcgggtgagtttgtagatgatgggactgaaactcacttcagtatcgggaaccatgactgttacataaaggctgtcagtagtgggaagcggaaagaagggattattcatactctcattgtggataatagagaaatcccagagattgcaagttaatgaattttcatcttaagaagtaaagatcaggactttttaattactgtggtaattaaatgtgttcagtatgtacttatcagtacatttagtctgcaatgttttaattttttaaaaagttacatgaaactaacattccaagggtcaggaaaaaaaccaattatgtatagtcataaaaattacaatttatgatgcaaataatgtaaaatgttttaaagacaaatggcaaataagatatggaccaaagtcactaatgttttacaacagtaacctttactataataaatactttt

SEQ ID NO: 11662 - protein, 179 aa, Homo sapiens
MTDLVAVWDVALSDGVHKIEFEHGTTSGKRVVYVDGKEEIRKEWMFKLVGKETFYVGAAKTKATINIDAISGFAYEYTLEINGKSLKKYMEDRSKTTNTWVLHMDGENFRIVLEKDAMDVWCNGKKLETAGEFVDDGTETHFSIGNHDCYIKAVSSGKRKEGIIHTLIVDNREIPEIAS

SEQ ID NO: 11663 - DNA, 2478 bp, Homo sapiens
  CDS (158)..(1384)
tttgtgttccctcaaatggcggtgtgaagagagttcgcctgagccagatcccaggtttcactgaagaaacttcttagaggttcattgcacttctgagatttaatgtttacaacttggagttgtcgaccttcttataagatacattttggaagtcaaaatgaaagttttctgtgaagttttagaagagttatacaagaaggtacttcttggagccacacttgaaaatgacagccatgattacatcttttatctcaacccagcagtttcagatcaagattgttctacagccacctccttagaatgggcaaacacctgtggtatccagggcaggcatcagcccatctctgttggtgtggctcccattgctgtagcacctgtgtgtttgaagaccaactctcagatgagcggttccagagaagtaatgctccttcagttaacagtgatcaaagtgatgacaacccggatattgtctgtcaaaaccgagttccatgcaaaggagcagtacagagatgtaattaaaattctcttagaatcagccaaagtcgattctaaattaatctgcatgttccaaaattcagataaattgttatctcacatggctgcacagtgccttgcattgcttctatatttccaattgagagaaaagataaccttaagtaattcctggattgctttttgccagaaaaatctttctgaatactctgagagtaataaagcaatatactgcctctggactcttacagcaataataaaagaaatctttaaagattcatgttcacagaaaacagaaattctaaagcagttcctgactcatttcgacaccatttttgaagtgttttacaattccttattctctcagcattttgaaaactgccgggatacttctaaaatagtaaacatcctgatgtgtttcctggatttgcttgagcttctcatcgcctccagaatccacctgaagttacatttcacttgccagaggattttatttttgaaaccatcttgcatgctagaagttattacctggcctattcaggcttttgttaaaaggaaggtcatcatattcctcaaaaagtgccttctctgtaaagtgggtgaagacctctgtcgtggatctgtgcctgccttaatgccgccagaccatcatgtagcggtggacatgctggctttagctaatgctgttttgcaagctgtgaattcggggttgttgaagacactgtctgtttatgaaaaacattccttttttggaggtgatgaagttcaacctgaatgtgaacttatcactagtccagatcatgtgatccttagagcagcaagcttagttataatgaaatccttagaaatcaagtttcaaaattattcttcagcaagtgaaatgaaaggtgcgtgaccatggcccactgcagccctgaccccccttcggcccatgctattcctcctgtcccaacctgggaggtcctggcctgggagatcaaggctacagtgagccgcgacccatcgcacacctgcactccagtcctggtgcaacagatggagatcctttcagggagagagagagagagagaggagaagacagagagattaaagaaaaatatgttcactcccacttatgtgtttattgttattattgtttgttgttatttctttgttattgttgtgtttactgtttatttattttgaggcagggtcttgctctgtctcccaggctcactgcagcctcaacgttttgagctgaagtgatcctctcgcctctgcttccccaccccatttgtattaatccttcatacaattagtgtttctactaatgtagattattgaaaattagatattgaattaaagctaatatatgagaagttatattgacaaagaaattgttacatatataatttccagaatagtaactcaggagttcaaagtcttccattttacttgagaaaaatgaatagtaaatgtctctaaacaggcagcatacagattcagtgaaaagtttgaattgtgagcaatgacatcactgaattgctttggatataatttagcttttaataactacacattagttataattctgtgcagttttaatttataacactagatggcacctgttatataattcagttttaaattgtagttcaaactacctaaaacgtttttttatttttgtgcttaataatagtacttctatgctttaaacaaacaaaaaatatgtttttctgttattttgaagacaaaattatttttgcttggttgcattcttggacagacagctctggcatccgatgaagtgatcttagttgtctgctcatttatttatctgcttttagcaagaaatcacataacttttatttctaagagacagttgttaggcagttgttgcaaatagatgatgtagctgtacattttaaatgtatgctctggaatgagtcactttttttccctgagcctcagtgtcctcatttgccaaataaagatgcttcctaactg

SEQ ID NO: 11664 - protein, 409 aa, Homo sapiens
MKVFCEVLEELYKKVLLGATLENDSHDYIFYLNPAVSDQDCSTATSLEWANTCGIQGRHQPISVGVAPIAVAPVCLKTNSQMSGSREVMLLQLTVIKVMTTRILSVKTEFHAKEQYRDVIKILLESAKVDSKLICMFQNSDKLLSHMAAQCLALLLYFQLREKITLSNSWIAFCQKNLSEYSESNKAIYCLWTLTAIIKEIFKDSCSQKTEILKQFLTHFDTIFEVFYNSLFSQHFENCRDTSKIVNILMCFLDLLELLIASRIHLKLHFTCQRILFLKPSCMLEVITWPIQAFVKRKVIIFLKKCLLCKVGEDLCRGSVPALMPPDHHVAVDMLALANAVLQAVNSGLLKTLSVYEKHSFFGGDEVQPECELITSPDHVILRAASLVIMKSLEIKFQNYSSASEMKGA

SEQ ID NO: 11665 - DNA, 1920 bp, Homo sapiens
gtattcctactgtgctctctgaggatgtggatgctgttgatctgcggaccacactttgagaaatacacaggtgacagctgtggtggaaagaactcccatccaggaatcaaaacatgtcttcacattttggccatggaacttgggggtcttgctttgttgctcaggatggagtacagtggtgcaatcttgtctcactgcagcatcgacctctggggcttaagccatccttgcacttcagcctcccaagtagctggtactacaggggatgcaacaacaaggcgccatcttggaagtagacaccaggccctcaccagacaccaaacctgctggtgcctcgatcttcaatttccagcctccagagtgtcatggtttctggaagaaaagactcaagatgttctcagtagctgctgttttcagacatcatgaaagtcttctcctaccctctataaaaacaaacaataaaactctacaaaggaaaagcccacaaaaacatgctgactttagaagaatccatgatttagaatatttttataaatatctaagaaaacaggagtcctttccatatatatggtccttggagatactttccatatatatggtccttggagaatccagtttttatgagaaaggtgatttccaaaatctcttacactttacaatttcaattttggcctgagcatatctctcgattgatctacctacctacatactgatctatcttggatagagcactggacaaaaggtaggcactgtttacaatccactgacaagaaaacacatgaagaagcaaaccccacagcgctctgaaacctggaagagatgggttctacatgggtctgatgggattactgtactaaccagcctccgaatatcccgctccgactcccacttgatcttcgagatggcttcttggtgggactgatgctcactccgaaggtccccagccttgattttatctgcttggatcatattgctcagagcctcgtccacctgcttcttggccgttttcaggtccgcaatttcctgtaagagcttaaggcgctctgtgtcaaacagtttccgggcctcctcccgggcctcaatggtgagcgctgtccttactttgtcactgctgccgtcgcggagagcacagagagcagacttgagcctctggatctctccatcacgtaccttcaccgtccttgacatttcctgctcgtgctgcttgataaggttctccctcacagcctgcagctccttcatcttctcctcatggagcttggctttgagttctgtcaccagcaccgtgtgcttgcgctgctccagctcacgaatcctcttcgcttcttgagtcttctctctttcaagctttgatacctaaaaacagagaggcgaaatgatgaagagaaatgagcctcaaaggacgggtgtgctcctaggcaggatttgcagctcaggccgctgtgatctcttaattcctcatctcttttccaattccaggccctctgagaaaaaagaactacaggccttgaagctgggaatacagtgtgtaagaggaggaaatacctgaggatatttatattactttgttcagatgaatatttgatgttctggggccttactatgcaatgtgtggtctgcagacaagcagcctcggtatcacccaggaagcatgttagaagcacagaatccctggcttagccccagatctatgactcagaatttgcatcttaacaaatccccatgtgattggtatacgccttaaaattagaaagtatcgctatcatggtttttccctttacggggaggactgcaaaacagatcgcctggagagctttttagactacacaaccctagctagatccaaactgataaatgtgtgtcttagaatagctcacagtttgatattgtgataaggctaataaattagtgcctcaagtg

SEQ ID NO: 11666 - DNA, 1142 bp, Homo sapiens
  CDS (151)..(501)
agcttctttgtctctggctgccgctggaactccgggtctcgtcttcactgctctgtgtcctctgctcctagaggcccagcctctggtcctgtgacctgcaggtattgggaatccacagctaagacgccgggacaccctggaagcctagaaatggacaacctgaggtatggagtgtatcctgtcaagggggcaagtggataccctggggctgagaggaatcttctggagtactcttattttgaaaaggggccgttgacatttagggatgtggtcatagaattctctcaggaggagtggcaatgcctggacactgctcagcaagatttgtataggaaagtgatgttagagaacttcagaaacctggtgttcttgggtattgatgtctctaagccagatctgatcacctgtctggagcaaggaaaagatccctggaatatgaagagacacagtatggtagccacacccccagatggagtttcactgttgttccccaggccggagtgaaatggcgcgatttcacctcgctgtgtcccaggttcaagcagttctcctacctcagcctcccgagtagctgggattacgggcatatgccaccacacccagctaagtttgtatttttagtagagacagggtttctccatgttggtcaggctagtctcgatctcctgacctcaggtgattcacccacctcagcttcccaaagtgccgggattacaagcttgagctaccgcgcccagccaacacatcacttttatcttgcagctcccgagattctcttttctgtgacttttaaaattgtgcttacatatgtgtttgatataaatatctttgtattctagtttgtttgttcagcttcttcatttttacatcactttttaaaagatttctgttattttttatattttttacctccataatttctgtttttccaatattttaaatatttctgttcttatttccagttttctgattttctgtagttctctgtgttcatattttactcattgagtattcaatttgttttgtttttaaaattaatgtatacattttttatttctttctgaaaaatttataataattttgttggtactgcattgccctgttttgtatatattctaatcttttattaaaatttgcacatt

SEQ ID NO: 11667 - protein, 117 aa, Homo sapiens [sequence omitted]

SEQ ID NO: 11668 - DNA, 1398 bp, Homo sapiens
  CDS (86)..(526)
gtgcagcttggtggcggctgagccggcagcgggccgcctcaggcagccccggccgggccgcccgggtccccggcagcggggtaggatggcgctaaagcggatccagaaggaattaaccgacttgcagagggatcctcctgcccagtgttctgcaggacctgtcggtgatgacttgttccactggcaggccaccatcatgggcccgaatgacagtccttaccaaggaggtgttttcttcctgaccatccactttcctacagattacccgttcaagcccccaaaggttgctttcacaaccaaaatttatcaccctaatatcaacagcaatggcagcatctgccttgatatcctgcggtctcagtggtctccagcgttgactgtgtcaaaagttctcttgtccatctgctcgctgctctgcgaccccaaccccgatgaccccctggtgccagagatagcacacacctacaaggccgacagagagaagtacaacagactagcaagagagtggacacaaaaatatgctatgtaagtgccttggaggttttacatgagacactgtccaagagaagctggcagagaggtcttcccttaaaactttgggctgttggctgagccattcaaagagcatcatctgttcttcaaacaaatgttggtcacccactctctccagctgcagcatgttggtgccattttcagcaattacggctttgacagtgccacctctttgatgccaaatcagcaaccattgttgttatgatctgcagtcttcctggtgacactggaatctctctctctgccgcctcagtttgtctgctggtctcttggggggccaggccctgcacgtctctcctacccggcctcaaatggtgcttctgcccatgatggtaccacaccagggcctcagcctggcccctcaccacataccctttgccttttagaactcagtgccatcctgggtgcccagggcagagcaggctttgttcgcacctcatctgctgcagaaccacatcctgaggagtctcagcttatcctggagggaattgggaacagtgtcactgggaagtgaaggcctagccctgtggcttccaccagtctcctcctgcagtgccacgtggtggcatttctcgcctcacaccaagaagcagcaagtggaaaatttcaggatacaaagcacataacaccccataagagatgattatgtttttagaagcaagagcaaaattatgaaacctctagagatttgggtcatgttactccatttgatgaagattctcactaccgcccgctcctcccataggagcctacactaagtccaagtgtgagccattcacagactagaacacaaggagggagagagactcttaaacgtaaataaaaatgcaattcactcacaactct

SEQ ID NO: 11669 - protein, 147 aa, Homo sapiens
MALKRIQKELTDLQRDPPAQCSAGPVGDDLFHWQATIMGPNDSPYQGGVFFLTIHFPTDYPFKPPKVAFTTKIYHPNINSNGSICLDILRSQWSPALTVSKVLLSICSLLCDPNPDDPLVPEIAHTYKADREKYNRLAREWTQKYAM

SEQ ID NO: 11670 - DNA, 827 bp, Homo sapiens
  CDS (210)..(800)
gttgcctgagcagtgggctgcttaggaagagaaggtcagagttcgcgggggcagaggcattcttgccgctggcccagtcactatgtagtggaggggcagacaccctcccgcaaattctggaaggttcttagtctcgactagggcagtagccccaggactcctagtcgccggcttcaggtcactgccggctgaacggagctgccgtcgccatgtttggctgcttggtggcggggaggctggtgcaaacagctgcacagcaagtggcagaggataaatttgtttttgacttacctgattatgaaagtatcaaccatgttgtggtttttatgctgggaacaatcccatttcctgagggaatgggaggatctgtctacttttcttatcctgattcaaatggaatgccagtatggcaactcctaggatttgtcacgaatgggaagccaagtgccatcttcaaaatttcaggtcttaaatctggagaaggaagccaacatccttttggagccatgaatattgtccgaactccatctgttgctcagattggaatttcagtggaattattagacagtatggctcagcagactcctgtaggtaatgctgctgtatcctcagttgactcattcactcagttcacacaaaagatgttggacaatttctacaattttgcttcatcatttgctgtctctcaggcccagatgacaccaagcccatctgaaatgttcattccggcaaatgtggttctgaaatggtatgaaaactttcaaagacgactagcacagaaccctctcttttggaaaacataatttgaataaaataatttttaatgg

SEQ ID NO: 11671 - protein, 197 aa, Homo sapiens
MFGCLVAGRLVQTAAQQVAEDKFVFDLPDYESINHVVVFMLGTIPFPEGMGGSVYFSYPDSNGMPVWQLLGFVTNGKPSAIFKISGLKSGEGSQHPFGAMNIVRTPSVAQIGISVELLDSMAQQTPVGNAAVSSVDSFTQFTQKMLDNFYNFASSFAVSQAQMTPSPSEMFIPANVVLKWYENFQRRLAQNPLFWKT

SEQ ID NO: 11672 - DNA, 1605 bp, Homo sapiens
  CDS (340)..(1524)
gttgtttctgaggagttcaggaatcagattgtacgtgaacttgtgactttgcctgcaaatcgttggagggagcagttagactattacgctcgctgcagccaggctcctggctgtggggaactcctctttgacactgacacttggagcttgcagataaggaagacaggggctcagacagctactgactttcctcatgctatcaggatatggtacaaaactaaacctgaagggcgatcggttacatggacctcagaccagagtggcaggccatgtgtttatactgtgggatctcccataaacaacagggccctttttccatgccaggagccacccgttgccatgtcaacatggcaggctacagttcgagcagctgcatcttttgttgttttaatgagtggggaaaattctgccaaaccaacgcagctttgggaagagtgctcaagctggtattactatgtaactatgccaatgccagcctccaccttcacaattgcagtgggatgctggacagaaatgaagatggagacatggtcatcaaatgatttggcaacagagagacccttctcaccttctgaggccaacttcaggcatgttggtgtttgcagtcacatggaatacccctgccgcttccagaatgcttctgccaccacccaggagatcattcctcatcgggtctttgcccctgtgtgcctcacgggtgcctgccaagagacccttctgcggctgatccctccttgcctctcagcagcacattctgttctgggagcacacccgttctctcggctggatgttctcatcgtccctgccaactttccaagtctggggatggccagacccagtaaagacaaaactggccacacaagtgactcgggagcatctgttatcaagcatggacttaatccggagaagatcttcatgcaggtgcattatttaaagggctacttccttcttcggtttcttgccaaaagacttggagatgaaacctatttttcatttttaagaaaatttgtgcacacatttcatggacagctgattctttcccaggatttccttcaaatgctactggagaacattccagaagaaaaaaggcttgagctgtctgttgaaaacatctaccaagactggcttgagagttccggaataccaaagccgctgcagagggagcgtcgcgccggggcggagtgcgggcttgcgcggcaagtgcgcgccgaggtcacgaaatggattggagtgaaccggagaccccgaaaacggaagcgcagggagaaggaagaggtgtttgaaaagcttcttccagaccagctggtcttgcttctggagcatctcttggagcagaagactctgagcccccgaactctgcaaagcctccagaggacataccacctccaggatcaggatgcagaggttcgccatcggtggtgtgaactcattgttaagcacaagttcacgaaagcctacaaaagtgtggagaggttccttcaggaggatcaggtaggtgtcatctttcagcagatggggattctgtaaaggctgtccctgcacttcacacaggaatccacgttctcggtatctctttcataacaaataattaaatctgttacagag

SEQ ID NO: 11673 - protein, 395 aa, Homo sapiens
MSTWQATVRAAASFVVLMSGENSAKPTQLWEECSSWYYYVTMPMPASTFTIAVGCWTEMKMETWSSNDLATERPFSPSEANFRHVGVCSHMEYPCRFQNASATTQEIIPHRVFAPVCLTGACQETLLRLIPPCLSAAHSVLGAHPFSRLDVLIVPANFPSLGMARPSKDKTGHTSDSGASVIKHGLNPEKIFMQVHYLKGYFLLRFLAKRLGDETYFSFLRKFVHTFHGQLILSQDFLQMLLENIPEEKRLELSVENIYQDWLESSGIPKPLQRERRAGAECGLARQVRAEVTKWIGVNRRPRKRKRREKEEVFEKLLPDQLVLLLEHLLEQKTLSPRTLQSLQRTYHLQDQDAEVRHRWCELIVKHKFTKAYKSVERFLQEDQVGVIFQQMGIL

SEQ ID NO: 11674 - DNA, 1384 bp, Homo sapiens
aaaaatggagattctccagggacccttccgtatctgcctaggcattttgctgtctcctcctaatacgctgttgctgtactggacacttgctcccatctactctcttctctggaatccacggggattcctaaggatgtcaccacagtgttggccagatgcacaggtcacaggggactgaacctcatcaccccacaaacataccattcaggttttgccaagaatgacactgtaaatgtaacaaagcttctgtgcttgttagtgaacaccaactcagctcctctcctgtattcagaaatcaggatgagatgaaaacaacaagcaggccaggcacggtggctcatgcctgtaatcccagcactttgggaggccgaggcgggcggatcacctgaggtcgggagctcgagaccaccctgatcaaaacagagaaaccccatctctactgaaaatacaaaattagccaggcgtggtggcaaatgcctgtaataccagctactcaggagctgaggcaggagaattgcttgaacccgggaggtggaggctgcagtgagccaggatcacaccactgcgctctagcctgggcaacaagagcgaaactctgtctcaaaagaaaaaaattaaaaataaaagaacaaggaaacaaaagtaacaaggcttgaagccagatgagcctgaatctaagcaagaaaagcccagaagaaatcccattttgggtcactggctgcatggtagtaataccatacacataagggaagagaggaggatgtggctttcactttgaattttttgagcttaaggtaacttttgcgtagctacaaagaagaattcaacagagatttaaacctacgatggaaagactgaaggggtccaagctgtagagaaacaggactgcaaaccacaaagggcagaatcagtcaaggagagcttcagggtgggatgaacagggaccaatggaacatttggacaagctgttgagaagaaaggaaaattcagagaaaaagaactgtcagtgaggtcataataggaactgttacagtgaactaaatatggcctgggaaggactctgtacttctagatttgagtccctgtggacgaactgcaacctaacttaataggtagaaagactgataacctaactttggagtatgcacctgtaactatagctgagtcctggccaatcccaacagccaaacttctgccactcacacactgctgagtgttcagctgtgttcaaataaggcaaatgctgagcaccgtaaccagtccagttgtttctggacctcactgctgagaactgtaacggacccagttgcttctggaccttactcctcacttcagatttctgtacatcatgttccctttattacctataaatcttccaccatgt

SEQ ID NO: 11675 - DNA, 2398 bp, Homo sapiens
  CDS (239)..(2164)
actcaatggagccctcaaggtagaacctcctcggaaccaagacccagctcatccagacaagcccaagaaacattctcccaaaaggaggctgcagcatgccctggaggaccagatctatagaatcttccggaagagtcgtgtcttgactaatcagagcatcaactgcctctttactgtgcctgccaaccaagctttcgtgtacatagtaccgggaagccaggaggaggacccagtaggtatgttgctggaccaacttaggagtcattgtactgtgaaggacccggaatctttgctggtgcctgcacccctttctgggcctaggcgataccaggtgatgaggcagcacagccgacaacaactttcctttcacattgacagcagcagttccagttcttcaggccagctagtggatttcactcttcgggaattcctatggcagcatgtggagctagttctaagcaagaaaggtttcgatgacagtgtgggcaggaacccacagccttcccattttgaacttcctacttatcagaagtggatctcagcagcttcaaaactgtatgaggtggctattgatgggaaagaagaggacttggggtcacccactggagagctaacatctaagattttaagcagtattaaagtcttggaaggatttttggatattgacacaaaattctcagaaaaccgatgccaaaaagctttacccatggcccacagtgcctaccagtcaaatttgcctcataattacacaatgactgtccataagaatcagcttgcccaggctcttcgagtgtacagtcaacatgctagaggtccagcatttcacaaatacgccatgcagttacatgaggactgctacaaattttggagcaatggccatcagctctgtgaggagaggagtttgactgatcaacactgtgtgcacaaatttcactcattacctaaatcaggagaaaaaccagaggctgatagaaatccgcctgtgctatatcacaatagccgagctcgatctactggcgcttgcaactgtggaaggaaacaagcacctcgagatgatccctttgatatcaaagcagccaattatgacttctatcagcttctggaagaaaagtgttgtggaaaattggatcatatcaatttcccagtatttgaaccaagtactccagatcctgctcctgctaaaaatgaatcctctcctgctcctccagattcggatgctgataaacttaaagaaaaagaacctcaaacccaaggagagagcacgagcctgagtttagctttgagtttgggccaatccacagatagcttaggtacctatccagctgatccacaagcaggaggagataatccagaagttcatggtcaagtagaagtgaaaactgagaagaggccaaacttcgttgatcgacaggcatccacagttgagtatctcccaggcatgctacattcaaattgccctaaaggtctcctacccaaattctccagctggtctttggttaaactaggccctgctaagtcttataactttcatacaggtttggaccaacagggctttattccaggaacaaattatcttatgccttgggacattgtcatcaggactagagctgaagatgaaggagacttagacacaaactcttggcctgctccaaataaagctattcctggaaagagaagtgcggttgtaatgggaagaggaagacggcgagatgacatagctcgagcttttgtgggctttgaatatgaagactctcgaggtcggagattcatgtgctctgggcctgacaaagtaatgaaagtaatgggaagtgggccaaaggaatcagctttaaaagccctaaatagtgacatgcccttatatattctgtcatcctctcaaggtagagggctgaaacctcattatgctcaacttatgaggctttttgttgtggttcctgatgctcctttgcagataatactaatgcctcaggttcagccaggcccaccaccatgtccggtattctacccagaaaaacaagaaatcacccttccacctgatggcctttgggttttgagatttccttatgcatatgtgactgagagaggaccttgtttcccccctaaggaaaatgtgcagttaatgagctacaaggtgctccgtggggttcttaaggcagtaacacaataagtgttttccagccagttcaatcctatacttgagctggtttttgtttttggtatttgtggctgtgtttttggtatgtgtttactgtgttttcccaaatccaaaatgtgttttggttacaggagttcagtatttggaaactaatttgttctactttttcattatattgttgatatttattgtaaacgtgactacaactttctaataaagattggttgttctagcaaagaatat

SEQ ID NO: 11676 - protein, 642 aa, Homo sapiens
MLLDQLRSHCTVKDPESLLVPAPLSGPRRYQVMRQHSRQQLSFHIDSSSSSSSGQLVDFTLREFLWQHVELVLSKKGFDDSVGRNPQPSHFELPTYQKWISAASKLYEVAIDGKEEDLGSPTGELTSKILSSIKVLEGFLDIDTKFSENRCQKALPMAHSAYQSNLPHNYTMTVHKNQLAQALRVYSQHARGPAFHKYAMQLHEDCYKFWSNGHQLCEERSLTDQHCVHKFHSLPKSGEKPEADRNPPVLYHNSRARSTGACNCGRKQAPRDDPFDIKAANYDFYQLLEEKCCGKLDHINFPVFEPSTPDPAPAKNESSPAPPDSDADKLKEKEPQTQGESTSLSLALSLGQSTDSLGTYPADPQAGGDNPEVHGQVEVKTEKRPNFVDRQASTVEYLPGMLHSNCPKGLLPKFSSWSLVKLGPAKSYNFHTGLDQQGFIPGTNYLMPWDIVIRTRAEDEGDLDTNSWPAPNKAIPGKRSAVVMGRGRRRDDIARAFVGFEYEDSRGRRFMCSGPDKVMKVMGSGPKESALKALNSDMPLYILSSSQGRGLKPHYAQLMRLFVVVPDAPLQIILMPQVQPGPPPCPVFYPEKQEITLPPDGLWVLRFPYAYVTERGPCFPPKENVQLMSYKVLRGVLKAVTQ

SEQ ID NO: 11677 - DNA, 1262 bp, Homo sapiens
ttttttaagcaacatcatgaattttatctactccagaagtctctacaatagaaaaaaaagtgcagtgcttctaggatataaaattcacattacttttgaaagccaagaagttggtcttatccagttaggtcttcttatgaagagttttcatccagggatataactccttggtcagtgattttattgtttacatcctgagactgttctacagtttctttgactcctggcatttgccttaaggacctatagcaagctgtttctaggatcagaaactcaagagaggcatttctctgctttttcactaaaggtcagttgttttaatttgaaacctgaaatgcctctttagcaaaagcctgtggtatggggtaaagccatgtaagaagagaatagtctcagtcacatatgaagaggaaaatttgcagctgccagtgctttccttgtggccctgccaaccagctcttccaggacgaactcagtccagcatggttttgatgtaaccatccatgcttttatttttgttaagtcttttgtgactgggacagttaattttagtagctgaagaacgtctagttgtttgcttgatatttgtgaacatttactgcatggatcacaaaacaatataccctgtatttcttacacgccacttatatgcagcaaggagtaaatgtgttactagattcgggtagtgcattttgtcactgaatctgaccttgagaatgtacattaattcttatattttacataatgtatgtgttgtttaagaaatgtataaaaaacctgaaaaaaatgagtaagaactggcagaagttaaaaccctttgtatcaaaagatctttattggtagagcactggttatcttctggatactaaaaagttgtattacaaagccaaacacttgcattcacaactttaaaaaaagatccaaggaactattcataatgatgaaattccaactacatacaaggaggagaaaataagaacccagtcataacagaggaattctataggagtctgcatcaattcattcttaaggttgcctactctctgttatgtgaattagcgtctgtgtttcacccattgtctgtgtttagtccttgttcaccactagggcaaggaattcttaactaggcctctgtttaccaacttctctttctcctcctttccctcttattcctccttctcctcttccttcttatataatgctagtatattctcaaaattgcaaagctgtgagaatattaaaataatcatggctaatgttcc

SEQ ID NO: 11678 - DNA, 963 bp, Homo sapiens
  CDS (541)..(789)
cacagctaacatggcggcgccctgtgtgtcctacggcggagcagtttcgtaccggcttcttctctggggtaggggtagcctcgcccggaagcaaggcctctggaaaaccgcggcccctgagttgcaaacaaatgtcagatcccagatattaaggctaagacatactgcatttgtaataccaaagaaaaacgttcctacctcaaaacgtgaaacttacacagaggattttattaaaaagcagattgaagagttcaacataggaaagagacatttagccaacatgatgggagaagatccagaaactttcactcaagaagatattgacagagctattgcttaccttttcccaagtggtttgtttgagaaacgagccaggccagtaatgaagcatcctgaacagatttttccaagacaaagagcaatccagtggggagaagatggccgtccatttcactatctcttctatactggcaaacagtcatactattcattaatgattaccagctttacttcccgatcacacaggacagagaacagctgatgttccctttccactttgttgaccggctgggaaagcacgacgtgacctgcacagtctcagggggcgggaggtcagcgcaggctggagcaatacgactggcaatggcaaaagccttgtgcagctttgtcaccgaggacgaggtcgagtggatgagacaagctggactacttactactgatccacgtgtgagggaacggaagaagccaggccaagagggagcccgcagaaagtttacgtggaagaaacgctaagggtttgctcccaggaaaggagaggaagagctatatatatgtgccgacatgtggcagacacacagtaaataatggctgaccagcatgagggcagtactgtcagaaatttctttgagctgtgagatggatttatttttaaatgctactttgtaaaggtgacctttaaaaaat

SEQ ID NO: 11679 - protein, 83 aa, Homo sapiens
MFPFHFVDRLGKHDVTCTVSGGGRSAQAGAIRLAMAKALCSFVTEDEVEWMRQAGLLTTDPRVRERKKPGQEGARRKFTWKKR

SEQ ID NO: 11680 - DNA, 2467 bp, Homo sapiens
  CDS (27)..(2180)
gagaagtagagtccttagaaaaaaatatggccattcttgatccaccagatgctgaccacttatacagtgcaaaggtaatgctgatggctagccctagtatggaagatttatatcataagtcatgtgctcttgctgaggacccacaagaacttcgagatggattccaacatcctgctagacttgttaagtttttagtgggcatgaaaggcaaggatgaagctatggccattggaggccactggtctccttcgttggatggaccagacccagaaaaagatccctctgtgttgattaagactgctattcgttgttgtaaggctctgacaggcattgatctaagtgtgtgcacacaatggtaccgttttgcagagattcgctaccatcgccctgaggagacccacaaggggcgtacagttccagctcatgtggagacagtggttttatttttcccggatgtttggcattgccttcccacccgctcagagtgggaaaccctctcccgaggatacaagcagcagctggtcgagaagcttcagggtgaacgcaaggaggctgatggagaacaggatgaagaagagaaggatgatggtgaagctaaagaaatttctacacctacccattggtctaaacttgatccaaagacaatgaaggtaaatgacctccgaaaagaattagaaggtcgagctcttagttccaaaggattaaaatcccagttaatagcccgattgacaaaacagcttaaagtagaggaacaaaaagaagaacagaaggagttagagaaatctgaaaaagaagaggatgaggatgatgataggaaatctgaagacgataaagaggaagaagaaaggaaacgtcaagaggaaatagaacgccagcgtcgagaaagaagatatattttgcctgatgaaccggccatcattgtacatccaaattgggctgcaaaaagtggcaagtttgattgtagcatcatgtctttgagtgtcctattggactacagattagaggataataaagaacattcatttgaggtttcattgtttgcggaacttttcaacgaaatgcttcaaagagattttggtgtccgtatatacaaatcattactgtctcttcctgagaaagaggacaaaaaagaaaaggataaaaaaagcaaaaaagatgagagaaaagataaaaaagaagaaagagatgatgaaactgatgaaccaaaacccaaacggagaaaatcaggcgatgataaagataaaaaagaagatagagatgaaaggaagaaagaagataaaagaaaaggtgattctaaagatgatgatgaaactgaagaagataacaatcaagatgaatatgaccctatggaagcagaagaagctgaggatgaagaagatgatagggatgaggaagaaatgaccaaacgagatgacaaaagagatatcaacagatactgcaaggagaggccctctaaagataaggaaaaagaaaagactcaaatgatcacaattaacagagatctgttaatggcttttgtttattttgatcaaagtcattgtggttaccttcttgaaaaggatttggaagaaatactttatactcttggactacatctttctcgggctcaggtaaagaagcttcttaataaagtagtgctccgtgaatcttgcttttaccggaaattaacagacacctcaaaagatgaagagaaccatgaagagtctgagtcattgcaggaagatatgctaggaaacagattattacttccaacaccaacagtaaagcaggaatcaaaggatgtggaagaaaatgttggcctcattgtgtacaatggtgcaatggtagatgtaggaagcctcttgcaaaaattggaaaagagcgaaaaagtaagagctgaggtagaacagaagctgcagttactagaagaaaaaacagatgaagatgaaaaaaccatattaaatttggagaattccaacaaaagcctctctggtgaactcagagaagttaaaaaggaccttagtcagttacaagaaaacttaaagatttcagaaaacatgagtttacaatttgaaaaccaaatgaataagacaatcagaaacttatctacggtaatggatgaaatccacactgttctcaagaaggataatgtaaagaatgaagacaaagatcaaaaatccaaggagaatggtgccagtgtatgataaaatccatgtagtgatgaggaatggtgttaaataatgtaatatataaaaatcatgatataagaatgtttgaaggtgatgcatgtttgattttagtagtataaatgtattttagttcaaatgatgtataaagttttatgaatgtgagtttctgcttttgaaaattgcttgtaattcctagccttcaaattattaaacactccttgagtgaaataattttgcattgcaaagtgttttaggatgaactttgttatagttttaactccaataaagttcatcagttt

SEQ ID NO: 11681 - protein, 718 aa, Homo sapiens
MAILDPPDADHLYSAKVMLMASPSMEDLYHKSCALAEDPQELRDGFQHPARLVKFLVGMKGKDEAMAIGGHWSPSLDGPDPEKDPSVLIKTAIRCCKALTGIDLSVCTQWYRFAEIRYHRPEETHKGRTVPAHVETVVLFFPDVWHCLPTRSEWETLSRGYKQQLVEKLQGERKEADGEQDEEEKDDGEAKEISTPTHWSKLDPKTMKVNDLRKELEGRALSSKGLKSQLIARLTKQLKVEEQKEEQKELEKSEKEEDEDDDRKSEDDKEEEERKRQEEIERQRRERRYILPDEPAIIVHPNWAAKSGKFDCSIMSLSVLLDYRLEDNKEHSFEVSLFAELFNEMLQRDFGVRIYKSLLSLPEKEDKKEKDKKSKKDERKDKKEERDDETDEPKPKRRKSGDDKDKKEDRDERKKEDKRKGDSKDDDETEEDNNQDEYDPMEAEEAEDEEDDRDEEEMTKRDDKRDINRYCKERPSKDKEKEKTQMITINRDLLMAFVYFDQSHCGYLLEKDLEEILYTLGLHLSRAQVKKLLNKVVLRESCFYRKLTDTSKDEENHEESESLQEDMLGNRLLLPTPTVKQESKDVEENVGLIVYNGAMVDVGSLLQKLEKSEKVRAEVEQKLQLLEEKTDEDEKTILNLENSNKSLSGELREVKKDLSQLQENLKISENMSLQFENQMNKTIRNLSTVMDEIHTVLKKDNVKNEDKDQKSKENGASV

SEQ ID NO: 11682 - DNA, 820 bp, Homo sapiens
  CDS (170)..(481)
cctttgcgcggcacctggcggtggcgggagccgttgggctgagtcgggatcggggacgtcgcccgagagcggggacgaggaggtgtcgggcgcgggttcgagcccggtgtcgggcggcgtgaacttgttcgccaacgacggcagcttcctggagctgttcaagcggaagatggaggaggagcagcggcagcggcaggaggagccgcccccgggtccgcagcgacccgaccagtcggccgccgccgctggccccggggatccgaagaggaagggcggtccgggctccacacttagcttcgtgggcaaacgcagaggcgggaacaaactagccctcaagacgggaatagtagccaagaagcagaagacggaggatgaggtattaacaagtaaaggtgacgcgtgggccaagtacatggcagaagtgaaaaagtacaaagctcaccagtgcggtgacgatgataaaactcggcccctggtgaaatgacgcccctcccccacctgcccatggcctgggactctctgcgatgtacataactatttaatgcagcggcagcggcgacagccttccctgagaggacttaaaagcagaaggaaaccgagatgcttcccgcagccgtggacgattctccaggactctttttttaccttgagcacttgcctcgtgagacttcatagaacagtggtttactgtcccccccttctcacctcctcattctctctggctctttctgtcttcctcttctcaccctcctccctccccttagccatcacttctgggaagtaaagaacttgacttagtgccggaaaaaaaaaaaaaaac

SEQ ID NO: 11683 - protein, 104 aa, Homo sapiens [sequence omitted]

SEQ ID NO: 11684 - DNA, 912 bp, Homo sapiens
acagatgtttgggagctcttactctgacatgaagttataattggtaatggagactcagacaatgttgtagattacagagtgaactatgctttttagtgttaaatgcaatagcttgagatacaatgttttacttggtacataaatgctggttttctttcagatttaaggacatacacttttttttttttttttttaagagacagggtcttctatgttgcccaggctgtctttgaactcctgggatcaagtgatcctcctgcctcagccttcgaagtagttgggactacaggcccacgccaccgtgcctggctggacatgtaaatttgaagtgaatggttaaacatccagctagctgaaagcatggcagaccctaacagaaaagctacagtgtgtttttgcagctatgaagtgaatggtttcctggggaaaattgtgactttgtataactgttgttgaaaccagaataaattatatttcacttgcatatgcataaattattaaaattttcagaagtcagtgatacagaagtactattttgcaatgttaatctgtttgagtctttggagaaagtggtttcattgtaggtacatagtgcactgttaatattttaaacaagtagttcactcttccatttaagggatagcagttccttgtataaaatgactggatgagtataaaggaattatgttgtcatgtgcctttaaccagctttagtaattactataatctcatatttatgatagttctgttaggtgacaggaccaaatgaaaatattttatgttttctcatcactttagattttatcattatgtacattactgggtttttagcatttcctaatgtgaagttttaatcacttttaagtatacatttttttctgtatcatttaaataaaatatttttataacttt

SEQ ID NO: 11685 - DNA, 2040 bp, Homo sapiens
  CDS (151)..(1905)
cagaagaagcacaaatgctcagtgtattacagtaaacacaaaaccagcacagctgcggccagcagcaccagcacgactactgaggaaaaacagacttcacccctgggcagctcactgcctgctgctaaagaggacatttgcactgatgccatgcgtgagaactggatcagcctcagatatgcaagtggcataaatgtcaacctgcagaagaatttaacccttcccaaaaacttactgaataaagaagaaaacacactgaaaaacacaattgttttcagtaatccttcttcagaatgtagtatgaaggagggagtacagacatgtatgtttcctaaggaaactgacattaaaacttcagagaacacagccgagttcaaggaacgggagctctgtccactgaagacctccaagaaactacctgaaaaccatttaccaagaaactcacctcagtaccaccagccagacttgccagaaatttccaggaaaaataatgggaataaccagcaagtacctgtcaagaatgaagtagatcattgtgaaaatttgaagaaggtggacacaaagccttcttcagaaaagaagattcacaaaacatctagagaagacatgttttctgagaaacaggacatacctttcgtagagcaagaagatccttataggaagaaaaagcttcaggagaaaagagaaggaaatttacaaaatttaaattggggtaaaagtcgaacatgtagaaagaacaagaaaaggggtgttgctccagtctcaaggcctcctgaacagagtgatctaaagcttgtgtgcagtgactttgagaggtctgagctgagcagtgacatcaatgtaagaagctggtgtatacaggaaagcactagggaggtttgtaaagcagatgccgaaattgcaagcagtttacctgctgcccagagagaggcagaaggttactaccagaagcctgagaagaaatgtgtggacaagttctgctccgattccagctctgactgtgggagctcctctggcagcgtgcgtgccagccggggcagctgggggagctggagcagcaccagcagctccgacggggataagaagcccatggtggacgcccagcacttcctgccggccggagacagtgtttcacaaaatgattttccttctgaagctcccatctccttgaatctttctcataacatctgcaatcccatgaccgtgaatagtctcccacaatacgcagagccttcctgtcccagccttcctgccgggcccacaggtgttgaagaagataaaggtctttactcacctggagacctgtggcccactccgccagtgtgtgtgacaagcagcttaaactgcaccctggagaacggcgtgccttgtgtgattcaggagtcagccccggttcataatagtttcattgattggagtgcaacatgcgaaggccagttttccagcgcatactgtccattggaattgaacgattacaatgcctttccagaagaaaacatgaactatgccaatggcttcccctgtcctgcagatgttcagacagactttattgatcacaactctcagtctacctggaacaccccacccaacatgcctgctgcctggggacatgccagtttcatcagctctccgccctacctcacaagcacccgaagcttgtctccaatgtctggactttttggttccatctgggccccgcaaagcgatgtgtatgaaaattgctgccccatcaaccccaccacggaacattcgacccacatggaaaaccaagcggtcgtgtgcaaggaatactacccggggttcaacccgtttcgcgcctatatgaacctggacatatggactaccacagcgaataggaatgcaaatttcccactgtctagagactcgagttactgtgggaatgtgtgaaaataattggatttttaaacaatgtgaataaagaggcttgtgttttgattactagtgtaaactggttattgagatagattatgacattggtggatattttggcacttttatatgaaaataaattttttaatg

SEQ ID NO: 11686 - protein, 585 aa, Homo sapiens [sequence omitted]

SEQ ID NO: 11687 - DNA, 1088 bp, Homo sapiens
  CDS (92)..(955)
attgcccgcgcggtgagggagcgtggtctcgcgcaagccggcgtgcggtccggcggcgctgcagttgtgtccagccggtcacggggcggctatggcggccacgttcttcggagaggtggtgaaggcgccgtgccgagctgggactgaggacgaagaggaggaggaggaggggcggagggagacgcccgaggacagggaggtgcgtctgcagctggcgcggaagagggaagtgcggctccttcgaagacaaacaaaaacatctttggaagtttctttgctagaaaaatatccgtgctccaagtttataattgctataggaaataatgcagtagcatttctgtcatcatttgttatgaattcaggagtctgggaggaagttggttgtgctaaactctggaatgaatggtgtagaacaacagacactacacatctgtcctccacagaggctttttgtgtgttttatcatctaaaatccaatccctcggtttttctctgtcggtgcagttgctatgttgcagaagatcaacagtatcagtggctggaaaaggtttttggctcttgtccaaggaagaacatgcagataactattctcacatgtcgacatgttaccgattataaaacctcagaatccaccggcagccttccttctcctttcctgagagccctaaaaacacagaatttcaaagactcggcgtgttgtccattgctagaacaaccgaatatagtacacgaccttcctgcagcagttctaagctactgtcaagtatggaaaatcccggcaattctgtacttgtgttatactgatgtgatgaaattagacctaatcacagtggaagcttttaagcctatactttctaccagaagcttgaagggtttggttaagaatattccccaaagcactgagatactaaagaaattgatgacaacaaatgagattcagagtaacatttatacatgatcttaaacattgttttgtagtgtatattacttgtccattcctttaaggggagcagcctgcactcttttgtagattacttttgggggatatattttgagaatgatgaaacggaataaaattgtaaaaaact

SEQ ID NO: 11688 - protein, 288 aa, Homo sapiens
MAATFFGEVVKAPCRAGTEDEEEEEEGRRETPEDREVRLQLARKREVRLLRRQTKTSLEVSLLEKYPCSKFIIAIGNNAVAFLSSFVMNSGVWEEVGCAKLWNEWCRTTDTTHLSSTEAFCVFYHLKSNPSVFLCRCSCYVAEDQQYQWLEKVFGSCPRKNMQITILTCRHVTDYKTSESTGSLPSPFLRALKTQNFKDSACCPLLEQPNIVHDLPAAVLSYCQVWKIPAILYLCYTDVMKLDLITVEAFKPILSTRSLKGLVKNIPQSTEILKKLMTTNEIQSNIYT

SEQ ID NO: 11689 - DNA, 3097 bp, Homo sapiens
  CDS (267)..(2750)
gagaatggctcaactctccaaatagagagaatttctatcagttgcaagtacgaaaatttcctgccgattatataaaatactgggagtttgcagtttatctggaagaatgtgaactggctaaacagctttatccaaaggaaaacgatttggtgtttttagctcctgagagaataaatgaagagaagaaagatacagagagaaatgacatacaagatctccacgaatatcattctggttatgttcataaatttcgccgcacgtcagtcatgcgtaatgggaaaactgagtgttacctttccatccagactcaagagaactttccggccaatttaaacgaacttgtgaattgtattgtaatcagttctctggtaactacacaaaggaagttgaaagccatgtctctgttgggtagtcggaaccaactggctagagctgttctgaatccaaaccctatggacttctgtacaaaagatttactgactacaacatctgagagaattattgcgtacttaagagatttcaatgaagatcaaaagaaagcaatagaaactgcatatgctatggtgaaacactcaccatcagttgccaaaatctgcttgattcatggaccacctggaacaggaaaatcaaaaactattgttggcctcctctatcgtctactgacagagaaccagaggaaggggcattcagacgaaaactccaatgccaaaatcaaacaaaaccgtgtcctcgtgtgtgcaccttccaatgcagctgttgatgaactcatgaaaaaaattatccttgaattcaaagaaaaatgtaaagacaagaagaatcctttaggaaactgtggagatataaatttagtacgactgggtccagaaaagtctattaatagtgaggttctaaagttcagtttggacagccaagtaaaccacagaatgaaaaaagagttaccttctcatgttcaggcgatgcataaaagaaaggaatttctagattatcagctggatgagctttcccggcagcgagctctatgccgaggtggacgggaaatacagaggcaagaattagatgaaaacatttccaaagtttctaaggaaaggcaggaacttgcttctaaaattaaagaggttcaaggacgcccacagaaaacacagagtatcatcatcttagagtcccatatcatctgctgcacgttgagcacaagtggtggtttactacttgagtctgctttccgtgggcaagggggtgtccccttcagctgtgtcattgttgatgaggctggacagtcttgtgaaattgagactcttactccactcatccatcgctgcaataagctcatcctagtaggagatcctaagcagctccctccgacagtcatctctatgaaagcacaggagtatggctacgaccagtcaatgatggctcgcttctgcagactgctggaagagaatgtagaacacaacatgatcagcaggctgcccattctacagctcactgttcagtacaggatgcatccagacatatgcctcttcccttctaattatgtttataacagaaacttaaaaacaaatagacagacagaagccattcgatgttcatcagattggccatttcagccataccttgtgtttgatgttggagatggttcagaaagacgggataatgactcatatataaatgttcaagaaataaaactggtgatggaaataattaagcttattaaagacaaaagaaaggatgttagttttcgaaacattggcataataactcattacaaggcccagaagacgatgattcagaaggatttggacaaagagttcgatagaaaaggaccagcagaagtagacactgtggatgcattccagggtcggcagaaggattgtgttattgttacgtgtgtcagagcaaatagcatccaaggttcaattggattcctggcaagtttgcagagattgaatgtcaccatcacacgagccaagtacagcctcttcatcctcggacatttgaggaccctgatggaaaaccagcattggaatcagctgattcaggatgctcagaagcgtggtgccattattaagacctgtgacaaaaactatagacatgatgcagtgaagattctgaaactcaagcctgtgctgcagagaagtctcactcaccctcctaccatagccccagaggggtccagaccccagggtggtttgcccagcagcaagctagacagtggatttgccaagacatctgttgctgcttctctataccacacaccctctgactccaaggaaattactcttactgttacttcaaaggaccctgaaagacctcctgttcatgaccaacttcaggacccacgactgctgaagaggatgggcattgaggtcaaaggaggaatattcctttgggatccacaaccctcgagcccccagcatcctggagcaacacctcctacgggcgagccgggcttccctgtcgttcaccaggacctgagccatatacagcagcccgctgctgtagtggctgctctgagcagccacaaacctcccgtgcggggcgaacctccagctgccagtcccgaggcttccacgtgtcagagcaaatgtgatgacccggaagaggagctctgtcacaggagagaggccagggctttcagtgaaggggagcaggagaagtgtggttccgagacccatcacaccaggaggaactctaggtgggacaagaggacactggagcaggaggacagcagttccaagaaaagaaagcttttataggaaagcccagtgacatgggccagcagccacagcatattgtaaactgaagatgaccagctcgtgggaccatctagataagcttgttttttgtaaggagtttgtgtgctgttggaaaacatggaaaatgcatccttaacacctgagcctctggtcatcttcagtattttctgtcatttgcaaaagctttcagagggcattgtgtatccgtaataatgtccttgaagtcagagactggaaatgttgatctcttagtcttctatagacaaggaggtcagactggagtgaatgttgtaaaagttgaaatgtatatttgtatagcaaataacaaaatccttttaaaattt

SEQ ID NO: 11690 - protein, 828 aa, Homo sapiens
MRNGKTECYLSIQTQENFPANLNELVNCIVISSLVTTQRKLKAMSLLGSRNQLARAVLNPNPMDFCTKDLLTTTSERIIAYLRDFNEDQKKAIETAYAMVKHSPSVAKICLIHGPPGTGKSKTIVGLLYRLLTENQRKGHSDENSNAKIKQNRVLVCAPSNAAVDELMKKIILEFKEKCKDKKNPLGNCGDINLVRLGPEKSINSEVLKFSLDSQVNHRMKKELPSHVQAMHKRKEFLDYQLDELSRQRALCRGGREIQRQELDENISKVSKERQELASKIKEVQGRPQKTQSIIILESHIICCTLSTSGGLLLESAFRGQGGVPFSCVIVDEAGQSCEIETLTPLIHRCNKLILVGDPKQLPPTVISMKAQEYGYDQSMMARFCRLLEENVEHNMISRLPILQLTVQYRMHPDICLFPSNYVYNRNLKTNRQTEAIRCSSDWPFQPYLVFDVGDGSERRDNDSYINVQEIKLVMEIIKLIKDKRKDVSFRNIGIITHYKAQKTMIQKDLDKEFDRKGPAEVDTVDAFQGRQKDCVIVTCVRANSIQGSIGFLASLQRLNVTITRAKYSLFILGHLRTLMENQHWNQLIQDAQKRGAIIKTCDKNYRHDAVKILKLKPVLQRSLTHPPTIAPEGSRPQGGLPSSKLDSGFAKTSVAASLYHTPSDSKEITLTVTSKDPERPPVHDQLQDPRLLKRMGIEVKGGIFLWDPQPSSPQHPGATPPTGEPGFPVVHQDLSHIQQPAAVVAALSSHKPPVRGEPPAASPEASTCQSKCDDPEEELCHRREARAFSEGEQEKCGSETHHTRRNSRWDKRTLEQEDSSSKKRKLL

SEQ ID NO: 11691 - DNA, 2652 bp, Homo sapiens
  CDS (128)..(496)
gattgcaaaggaaaaattagatcaattaaagcaggagtttgaattctggtatcctgttgatcttcgcgtctctggcaaggatcttgttccaaatcatctttcatattacctttataatcatgtggctatgtggccggaacaaagtgacaaatggcctacagctgtgagagcaaatggacatctcctcctgaactctgagaagatgtcaaaatccacaggcaacttcctcactttgacccaagctattgacaaattttcagcagatggaatgcgtttggctctggctgatgttggtgacactgtagaagatgccaactttgtggaagccatggcagatgcaggtattctccgtctgtacacctgggtagagtgggtgaaagaaatggttgccaactgggacagcctaagaagtggtcctgccagcactttcaatgatagagtttttgccagtgaattgaatgcaggaattataaaaacagatcaaactatgaaaagatgatgtttaaagaagctttgaaaacagggttttttgagtttcaggccgcaaaagataagtaccgtgaattggctgtggaagggatgcacagagaacttgtgttccggtttattgaagttcagacacttctcctcgctccattctgtccacatttgtgtgagcacatctggacactcctgggaaagcctgactcaattatgaatgcttcatggcctgtggcaggtcctgttaatgaagttttaatacactcctcacagtatcttatggaagtaacacatgaccttagactacgactcaagaactatatgatgccagctaaagggaagaagactgacaaacaacccctgcagaagccctcacattgcaccatctatgtggcaaagaactatccaccttggcaacataccaccctgtctgttctacgtaaacactttgaggccaataacggaaaactgcctgacaacaaagtcattgctagtgaactaggcagtatgccagaactgaagaaatacatgaagaaagtcatgccatttgttgccatgattaaggaaaatctggagaagatggggcctcgtattctggatttgcaattagaatttgatgaaaaggctgtgcttatggagaatatagtctatctgactaattcgcttgagctagaacacatagaagtcaagtttgcctccgaagcagaagataaaatcagggaagactgctgtcctgggaaaccacttaatgtttttagaatagaacctggtgtgtccgtttctctggtgaatccccagccatccaatggccacttctcaaccaaaattgaaatcaggcaaggagataactgtgattccataatcaggcgtttaatgaaaatgaatcgaggaattaaagacctttccaaagtgaaactgatgagatttgatgatccactgttggggcctcgacgagttcctgtcctgggaaaggagtacaccgagaagacccccatttctgagcatgctgttttcaatgtggacctcatgagcaagaaaattcatctgactgagaatgggataagggtggatattggcgatacaataatctatctggttcattaaactcatgcacattggagatttatcctggtttcttaggaatactactactctgattgtgtctactgattggctatcagaaccttaggctggacctaaatagattgatttcatttctaaccatccaattctgcatgtattcataattctatcaagtcatctttgattcctggacctaataaattttttttccctttctttgggtgtccaagagaaatggtttttgccaaactctttttaaaaaacaaattgttgctatttcctagaagtttctggtttttaagatgaacataaaagtgtcagtatgcttcttttatgaggtgtactttatactttgatgaaggctaaggtgtacctaacagctttttatagtatattcatttatggagttagctgtatttttttttaaaaaagaaaagtagtaaattagcagcttttttttttaaatgaagagaacttcatgatgatttaaaagaactaatgagaatattttgacttgacttcaattactaagtattttgtataaagaacaaataggtcctgcattttataagactttttaaagctttaattattcaactaagaaccaataatggcttcttcaaggctaatatcaatagtttataagcagtatatttcacctacactaaatatgggcattttaaaagaagattccccccttcccccccagaaatctgcatttactaaatttgtcttaagtccaattgtgtttaaaggtcatgctggtcgggtgtggtggctcacacctataatcccagcactttgggaggccaaggtgggcagtcacctgaggtcaggagtttgagaccagcctgaccaacatggtgaaaccccgtctctactaaaaatacaaaaattagcttggcatggtggcgggtacctgtaatcccagctgcttgggagtgtgaggcaggagaatcgcttgaacctgggagaccgaggttgcagtgagctgaaaccgtgccattgcactccagcttaggcaacaagagtgaaactctgtctcaatcaatccatcaatcaatcaataaaatagaggtcatgctgact

SEQ ID NO: 11692 - protein, 123 aa, Homo sapiens
MWPEQSDKWPTAVRANGHLLLNSEKMSKSTGNFLTLTQAIDKFSADGMRLALADVGDTVEDANFVEAMADAGILRLYTWVEWVKEMVANWDSLRSGPASTFNDRVFASELNAGIIKTDQTMKR

SEQ ID NO: 11693 - DNA, 2076 bp, Homo sapiens
  CDS (22)..(1344)
gggacggggtccgactcagaaatggcggcctccatgttctacggcaggctagtggccgtggccacccttcggaaccaccggcctcggacggcccagcaacagcaaaggaatctctcactacatgaatacatgagtatggaattattgcaagaagctggtgtctccgttcccaaaggatatgtggcaaagtcaccagatgaagcttatgcaattgccaaaaaattaggttcaaaagatgtcgtgataaaggcacaggttttagctggtggtagaggaaaaggaacatttgaaagtggcctcaaaggaggagtgaagatagttttctctccagaagaagcaaaagctgtttcttcacaaatgattgggaaaaaattgtttaccaagcaaacgggagaaaagggcagaatatgcaatcaagtattggtctgtgagcgaaaatatcccaggagagaatactactttgcaataacaatggaaaggtcatttcaaggtcctgtattaataggaagttcacatggtggtgtcaacattgaagatgttgctgctgagactcctgaagcaataattaaagaacctattgatattgaagaaggcatcaaaaaggaacaagctctccagcttgcacagaagatgggatttccacctaatattgtggaatcagcagcagaaaacatggtcaagctttacagcctttttctgaaatacgatgcaaccatgatagaaataaatccaatggtggaagattcagatggagctgtattgtgtatggatgcaaagatcaattttgactctaattcagcctatcgccaaaagaaaatctttgatctacaggactggacccaggaagatgaaagggacaaagatgctgctaaggcaaatctcaactacattggcctcgatggaaatataggctgcctagtaagtggtgctggtttggctatggccacaatggatataataaaacttcatggagggactccagccaacttccttgatgttggtggtggtgctacagtccatcaagtaacagaagcatttaagcttatcacttcagataaaaaggtactggctattctggtcaacatttttggaggaatcatgcgctgtgatgttattgcacagggtatagtcatggcagtaaaagacttggaaattaaaatacctgttgtggtacggttacaaggtacacgagtcgatgatgctaaggcactgatagcggacagtggacttaaaatacttgcttgtgatgacttggatgaagctgctagaatggttgtaaagctctctgaaatagtgaccttagcgaagcaagcacatgtggatgtgaaatttcagttgccaatatgatctgaaaacccagtggatggctgaaggtgttaaatgtgctataatcattaagaatactgtgttctgtgttattgttctttttctttttagtgtgtggagattgtaattgccatctaggcacacaaacatttaaaaggatttggactgcatttaattgtaccattcagaatggactgtttgtacgaagcatgtataatgcagttatcttctttctttcgtcgcagccagtcttttttgcttctcctacaaaacgtaacttgcaatttgccagtttattattgttggatacaaagttcttcattgataagagtcctataaataagataaatacgaagataaagctttattctttagtgttaaaatacagtatatctaataactagcctcattagtagagcagtatattaaaacaatgttttatgtaaaaagtgtttatcttcagcaccaaatacatgataaatgtatcaatcactatttataaacagagctttcaaacactcctcagaatattcttctaagtattttgatgaagtaactttgtaattatttgaacattgttttaatcattaggaaacactgattaactgcaagtcttcatgattctgtcatattaagaaacacctgtaggtttgcttcaaataaaggcatatataccaaggacttacagacaaaattaagaatgtcaatttaagttaataaaaatctcccaatatgaaaaaaaaaaaaaac

SEQ ID NO: 11694 - protein, 441 aa, Homo sapiens [sequence omitted]

SEQ ID NO: 11695 - DNA, 2494 bp, Homo sapiens
  CDS (63)..(797)
agtagacctttctgcgagtacgagccaaccggcagacccgactgaatgctcggattgggaaaatgaaacggaggaagcaagatgaagggcagagggaaggctcctgcatggctgaggatgatgctgtggacatcgagcatgagaacaacaaccgctttgaggagtatgagtggtgtggacagaagcggatacgggccaccactctcctggaaggtggcttccgaggctctggcttcatcatgtgcagcggcaaagagaacccggacagtgatgctgacttggatgtggatggggatgacactctggagtatgggaagccacaatacacagaggctgatgtcatcccctgcacaggcgaggagcctggtgaagccaaggagagagaggcacttcggggcgcagtcctaaatggcggccctcccagcacgcgcatcacacctgagttctctaaatgggccagtgatgagatgccatccaccagcaatggtgaaagcagcaagcaggaggccatgcagaagacctgcaagaacagcgacatcgagaaaatcaccgaagattcagctgtgaccacgtttgaggctctgaaggctcgggtcagagaacttgaacggcagctatctcgtggggaccgttacaaatgcctcatctgcatggactcgtactcgatgcccctaacgtccatccagtgttggcacgtgcactgcgaggagtgctggctgcggaccctggtgaggtggcatgggggtcggggaatgggaggccgctccgggcactgcccagatgtctgtgcttatgcctgagcctgcctgggggaagtggggagcatggcgcaaaggagaacagagccaggagccaggatatttacccgcaggatatttacccccaggctcgctgcctctcctccccaactgcaggtttaggaacttctccccctccatgagttcactgcattctcccttccccgccccggtccccgaaggcccactgcatcacacagactggtgaggcctggggtcaggaggaggctggctgtaggtaaacaggaccagggccttggcccctccccctcccattactaagctccttctgctcctgcccctgttcttcgctcaggagcagccattaaaatgtcgcccggagacagtaataaaaggctcggacgtgggctctgtgtcctgatcaaaggccgcgtgtaatctcgttagggctgcggctgccacagctggacccagccttgttctcattactggggctcctgctgcggggctggccaggcggtttgatcctggcgtccccccaacacaggagcgtgcctgcctgctcacagaagctgcctatgcgtccccagcctgggctgacaggaccaaggtctcagcacacactggtgcagagagacatggctgcaggcccaggtgctcacatgcgcacacatggctcattgtgtagaccagagccctccctgttctccctgcagggtgccaagaagctctgccctcagtgcaacacgatcacagcgcccggagacctgcggaggatctacttgtgagctatctgccccaggcaggcctcgcctccagcagccccacctgcccccagcctctgtgacagtgaccgtctccctttgtacatacttgcacacaggttccccatgtacatacatgcacatactcaaacatgcgtacacacacacacatttacacacgcaggactctggagccagagtagaggctgtggcccaggcactacctgctggctcccacctatggtttgggggccatacctgttccagctctgttcccagggtggggcagggaggtgggggttgggggagtagtggggcacggctcctaagatccagcccccatactgacagacggacagacagacatgcaaacaccagactgaagcacatgtaatatagaccgtgtatgtttacaatgttgtgtataaatgggacaactcctcgccctctacctgtcccctccccctttggttgtatgattttcttcttttttaagaacccctggaagcagcgcctccttcagggttggctgggagctcggcccatccacctcttggggtacctgcctctctctctcctgtggtgtcccttccctctcccatgtgctcggtgttcagtggtgtatatttcttctcccagacatggggcacacgccccaagggacatgatcctctccttagtcttagctcatggggctctttataaggagttggggggtagaggcaggaaatgggaaccgagctgaagcagaggctgagttagggggctagaggacagtgctcctggccacccagcctctgctgagaaccattcctgggattagagctgcctttcccagggaaaaagtgtcgtctccccgaccctcccgtgggccctgtggtgtgatgctgtgtctgtatattctatacaaaggtacttgtcctttccctttgtaaactacatttgacatggattaaaccagtataaacagtt

SEQ ID NO: 11696 - protein, 245 aa, Homo sapiens
MKRRKQDEGQREGSCMAEDDAVDIEHENNNRFEEYEWCGQKRIRATTLLEGGFRGSGFIMCSGKENPDSDADLDVDGDDTLEYGKPQYTEADVIPCTGEEPGEAKEREALRGAVLNGGPPSTRITPEFSKWASDEMPSTSNGESSKQEAMQKTCKNSDIEKITEDSAVTTFEALKARVRELERQLSRGDRYKCLICMDSYSMPLTSIQCWHVHCEECWLRTLVRWHGGRGMGGRSGHCPDVCAYA

SEQ ID NO: 11697 - DNA, 2590 bp, Homo sapiens
  CDS (984)..(1643)
acttttccagatctaggagcaccatggacacctcgtcagagatgctggtacggtttggacggcgctgtggacgggcgaaggaaagtacagtcttaggtatgtctttatcagcagtgtgaaaacggactaatacagtaaattggtaccagcagagtggggcattgctgaaaagataactgaaaatgtggaagcgactttggcactgggtaacaggcagagattggaacagtttgaagagctcagaagaagacaggaaaatgtgggaaagtttggaacttcctagagacttgttgaatgcctttgaccaaaatgctgatagcgacatggacaataaaatgcaggctgagatggtctcagatggagatgaggaactttctggaaactggagtaaaggtgattcttgctatgttttagcaaaaagactagcgtcattttacctctgccctagagatttgtggaactttgagaaagatgatttagggtacctcgcagaagaaatttctaagcagcaaagcattcaagaggtgagttggatactgttaagggcagtcagttttaaaagggaaacagagcataaaaattcagaaaatttgtagcctgatctggcagaagaaatttctaagcagcaaagcattcaagaggtgagttgggtactgttaagagcattcagtttcaaaagggaaacagagcataaaaattcagaaaatttgtagcctgactatgcaatagaaaagaaaaaccagttttctggggagaaattcaagccagctgcagaaatctgcataagcatcaagaagcctaatgttaatccccaggaccatggggaaaatgtctccaggccatgtcagagaccttcacagcagcccctcctgtcacaggcccagagatccaggaggaaaaaatggttttatgggccaggaccagggtccctgtgctgtgtgcagcctatagacttggtgccctgtgtcccagctgctccagccatggctgaaaggggccaatgtagagctcatgctgtggcttcagagggtggaagccccaagccttggcagcttccacatggtgttgagcctgtaggtacacagaagtcaagaattgaggtttgggaacctccacctagatttcagaagatgtatggaaatgcctggatgtccaggcaaaagtttgctgcagtggcagggccctcatggagaacctctgctagggcaatgcagaagggaattgtggggccggagctcccacgtagagtccctaatggggcattatctagtggagctgtgagaagagggccaccgtccttcagaccccagcatggtggatccactgacagcttgcaccatgcgcctggaaaagccgcagacactcaatgccagtccgtgaaagcagccaggagggaggctgtaccctgcaaggccacaggggcagaactgccaaaggccatgggtccccaccttttgcatcagcgtgacctgaatgtgagacctagagtcaaaggagatcattttggagctttaaaatttgattgtcctgctggattttggacttgcatgggtcctgcagcccctttgttttggccaatgtctcccatttggaatggctgtatttacccaatacctgtacccctatcgtatctaggaagtaactagcttgcttttcattttacaggctcataggcagaagggacttgccttgtctcaaatgagactttggactatggacttttgggttaatgctgaaatgagttaagactttgggggactgttgtgaaggcatgattggttttgaaatgtgaggacatgagatttagagggggccaggggcagaatgatatggttgggctgtgtccccacccaaatctcaacttgaattgtatctcccagaattcctacacgttgtgggagggacccagggagaggtaattgaatcatgggggctggtctttaccatgccattcttataatagtgaatacgtctcatgagatctgatgggattatcagggacttccgcttttgcttcttcctcgttttctcttgctgccaccatgtaagaagtgcctttcgcctctcaccatgattctgaggcctccccagccatgtggaactgtaagtccaactaaacctttttttctctccagtctcaggtatgtctttatcagcagcatgaaaatatactaatacatatttcatgttaatgggctgggagatttagtattgttaagatggtttgaatatttgtccccttcaaaactcatgttgaaaattaattcccaaaatgacagtattgagaggtggggcctttaagaagtgattgggtcatgagggatctgctttcatgaatggattagaaatggggtcttgctgtgaatggattaatggcttatgctggaattgagactgttggcttcataagaagaggaagagagacctgagctagcatcctcagcccccttgccatatgatgccctgcattacttccagactctgcagagagaccttaccagcaagaaagccctcaccaaatgcagcccctcaaccttgcacttctgagcctctataattctaagaaataaaatcctgttctttataaatt

SEQ ID NO: 11698 - protein, 220 aa, Homo sapiens [sequence omitted]

SEQ ID NO: 11699 - DNA, 1072 bp, Homo sapiens
  CDS (74)..(1006)
gtggcccggatgttcggtgcagctgccagatccgctgatctagcgcttctcgaaaaaaaccttcaggcggcccatggctgtcgatattcaaccagcatgccttggactttattgtgggaagaccctattatttaaaaatggctcaactgaaatatatggagaatgtggggtatgcccaagaggacagagaacgaatgcacagaaatattgtcagccttgcacagaatctcctgaactttatgattggctctatcttggatttatggcaatgcttcctctggttttacattggttcttcattgaatggtactcggggaaaaagagttccagcgcacttttccaacacatcactgcattatttgaatgcagcatggcagctattatcaccttacttgtgagtgatccagttggtgttctttatattcgttcatgtcgagtattgatgctttctgactggtacacgatgctttacaacccaagtccagattacgttaccacagtacactgtactcatgaagccgtctacccactatataccattgtatttatctattacgcattctgcttggtattaatgatgctgctccgacctcttctggtgaagaagattgcatgtgggttagggaaatctgatcgatttaaaagtatttatgctgcactttacttcttcccaattttaaccgtgcttcaggcagttggtggaggccttttatattacgccttcccatacattatattagtgttatctttggttactctggctgtgtacatgtctgcttctgaaatagagaactgctatgatcttctggtcagaaagaaaagacttattgttctcttcagccactggttacttcatgcctatggaataatctccatttccagagtggataaacttgagcaagatttgccccttttggctttggtacctacaccagcccttttttacttgttcactgcaaaatttaccgaaccttcaaggatactctcagaaggagccaatggacactgagtgtagacatgtgaaatgccaaaaacctgagaagtgctcctaataaaaaagtaaatcaatctt

SEQ ID NO: 11700 - protein, 311 aa, Homo sapiens
MAVDIQPACLGLYCGKTLLFKNGSTEIYGECGVCPRGQRTNAQKYCQPCTESPELYDWLYLGFMAMLPLVLHWFFIEWYSGKKSSSALFQHITALFECSMAAIITLLVSDPVGVLYIRSCRVLMLSDWYTMLYNPSPDYVTTVHCTHEAVYPLYTIVFIYYAFCLVLMMLLRPLLVKKIACGLGKSDRFKSIYAALYFFPILTVLQAVGGGLLYYAFPYIILVLSLVTLAVYMSASEIENCYDLLVRKKRLIVLFSHWLLHAYGIISISRVDKLEQDLPLLALVPTPALFYLFTAKFTEPSRILSEGANGH

SEQ ID NO: 11701 - DNA, 2608 bp, Homo sapiens
  CDS (52)..(2607)
gttattaatcaaaatgcaaagcagttggaaaataaggagcatctctggaaaatgtggagtgttatagtcaccccattaactgaattgattaatcagaccaatgaagtaaatcaaggtgatgccttagaacataattttagtgccatctatggtgcattgactttaccagtaaaccacattttttcagaacagagatttccagtgcccaccatgaagactttgcttagaacttggtcagaattatatagagcatttgctcgttgtgctgctttggtggcaacagcagaagagaacttgtgctgtgaggaactttcttccaagataatgtccagtttggaagatgaaggcttttctaatttgttgttcgtggatagaattatttatattattactgtaatggttgattgcattgacttctcaccatataatattaaatatcagcccaaagttaaatcaccacagagaccttcagattggtccaaaaagaagaatgagcccctagggaaattgacttctttatttaaacttattgtgaaagtgatctattctttccacacactgagcttcaaggaagcacattctgataccctcttcactattggcaactcaatcaccggcattatttccagtgtacttgggcatatttctttgccttctatgatccgaaaaatatttgcaactttaacaagacctctggcattattttatgaaaactcaaagcttgatgaagttcctaaagtatatagttgtctgaacaacaagttagaaaagctactgggagaaattattgcttgtctgcaattcagctacaccggaacttatgatagtgaacttcttgaacaactctccccactattatgcataatatttctgcacaagaataaacagattcgaaaacagagtgctcagttctggaatgccacttttgccaaagtgatgatgttggtttatcctgaagagttaaaaccagtactaacacaagccaaacaaaaatttctgctcctgttgcctggtttggaaactgttgaaatgatggaggaatccagtggaccatattctgatggaacagaaaattcacaactaaatgtgaagataagtggcatggagagaaaatcaaatggaaaaagagattcatttttggcacaaacaaagaataaaaaagaaaatatgaaaccagcagccaaactgaaacttgaatcttcgtctttaaaagtaaagggtgaaattcttttggaagaggaaaagtctactgactttgtgtttatacctccagaaggaaaagatgcaaaggaaagaatattaactgatcatcaaaaagaagttctcaaaacaaagcggtgtgatattcctgccatgtataataatctggatgtttcccaagataccttatttactcagtatagtcaggaagagcctatggaaattcctactttaaccagaaaaccaaaggaggattctaagatgatgattacggaggagcaaatggacagtgacattgtcattcctcaagatgtcacggaagactgtggtatggctgaacatcttgaaaagtcctccctttcgaataatgagtgtggttctcttgacaaaaccagtccagaaatgtcaaacagtaataatgatgaaagaaaaaaagctttaatttcatcaaggaaaacatcaactgaatgtgcatctagtacagaaaattctttcgttgtcagcagtagttcagtttctaataccactgttgctggaactcccccataccctacaagtcggaggcaaacctttattactttggagaagtttgatggttcagaaaatagaccttttagtccatcccccttgaataatatttcatcaactgttacagtgaaaaataaccaggaaaccgtgattaaaacagattttctaccaaaagcaaagcaaagagaagggactttttcaaaatctgattctgaaaaaatagtgaatggaactaagagatcaagccggagagctggtaaagctgaacaaacagggaataaaaggtctaagcccttaatgagatctgagccggagaaaaatactgaggaatctgttgaaggcattgtagtcttagaaaataacccacctggtttgcttaatcaaacagaatgtgtgtcagataatcaggttcatctttctgaatctacaatggagcatgacaatacaaagcttaaagcagcaacagtggaaaatgctgtattattggaaactaatactgtagaggagaaaaatgtagaaattaatttggaatccaaagagaatacacccccagtagtaatatcagcagatcaaatggtaaatgaggatagtcaggttcagataactccaaatcagaaaacccttagacggtcttcaaggcgacgttcagaagtagtagagtctaccactgaaagccaagataaggaaaatagtcatcaaaaaaaggaacgacgtaaggaagaagaaaaacctcttcagaagagtccattgcatataaaagatgatgtgttacctaaacaaaaactgattgctgaacaaactctacaggagaatttaattgagaaaggaagtaatttacatgagaagactcttggggaaactagtgctaatgcagaaactg

SEQ ID NO: 11702 - protein, 852 aa, Homo sapiens
MWSVIVTPLTELINQTNEVNQGDALEHNFSAIYGALTLPVNHIFSEQRFPVPTMKTLLRTWSELYRAFARCAALVATAEENLCCEELSSKIMSSLEDEGFSNLLFVDRIIYIITVMVDCIDFSPYNIKYQPKVKSPQRPSDWSKKKNEPLGKLTSLFKLIVKVIYSFHTLSFKEAHSDTLFTIGNSITGIISSVLGHISLPSMIRKIFATLTRPLALFYENSKLDEVPKVYSCLNNKLEKLLGEIIACLQFSYTGTYDSELLEQLSPLLCIIFLHKNKQIRKQSAQFWNATFAKVMMLVYPEELKPVLTQAKQKFLLLLPGLETVEMMEESSGPYSDGTENSQLNVKISGMERKSNGKRDSFLAQTKNKKENMKPAAKLKLESSSLKVKGEILLEEEKSTDFVFIPPEGKDAKERILTDHQKEVLKTKRCDIPAMYNNLDVSQDTLFTQYSQEEPMEIPTLTRKPKEDSKMMITEEQMDSDIVIPQDVTEDCGMAEHLEKSSLSNNECGSLDKTSPEMSNSNNDERKKALISSRKTSTECASSTENSFVVSSSSVSNTTVAGTPPYPTSRRQTFITLEKFDGSENRPFSPSPLNNISSTVTVKNNQETVIKTDFLPKAKQREGTFSKSDSEKIVNGTKRSSRRAGKAEQTGNKRSKPLMRSEPEKNTEESVEGIVVLENNPPGLLNQTECVSDNQVHLSESTMEHDNTKLKAATVENAVLLETNTVEEKNVEINLESKENTPPVVISADQMVNEDSQVQITPNQKTLRRSSRRRSEVVESTTESQDKENSHQKKERRKEEEKPLQKSPLHIKDDVLPKQKLIAEQTLQENLIEKGSNLHEKTLGETSANAET

SEQ ID NO: 11703 - DNA, 2683 bp, Homo sapiens
  CDS (144)..(1652)
ttcaaagggagacagactttctcaagtgtgcccactgccttgccccccggccatcagatccctttgctcgcttctgtcaagaatgtggctctcctgtcccacccatatttggctgtcgtctcccacccccagaaggagctcagatgggcttgtgtgcagaatgcagaagcttggtacccatgaacactcccatctgcgtggtgtgtgaggcccctcttgctctacagctgcagccacaggcaagcctccacttgaaggagaaggtaatttgccgggcctgtggtacaggaaatcctgctcacctgagatactgtgtcacctgtgagggggccctgccttcatcacaagagtcgatgtgcagtggggataaagcccctcctccgcccactcagaaaggggggaccatttcctgctacagatgtggtcgctggaatctctgggaggcgtccttctgcggctggtgtggagccatgctcggcattcctgctggctgttctgtttgccctaaatgtggggccagcaatcacctgtctgcccgattctgtggctcctgtggtatttgtgtgaagtccctagtgaaacttagcttggacagaagcctggctctagctgctgaggaacctcgccctttttctgagtccctgaatattcctttgcccagatctgatgttgggactaagagggacataggaacacagactgttggcctcttctacccatctggcaagctgctagcaaaaaaggaacaggaactagcctctcaaaagcagaggcaggagaaaatgagtgaccataaacccctcctgacagccatcagcccaggaagagggtactggagaagacagctggatcacatctctgctcacctcaggtgttatgctcagaacaaccctgaattccgggccttgattgcagaacccaggatgggaaagcttatctctgctactgtccacgaagatggttgtgaagttagcatcagactgaattatagtcaagtctcaaacaagaacctttacctgaacaaggcagtgaatttcagcgatcaccttctgagcagtgctgccgagggtgatggggggctgtgcggcagcaggtccagctgggtgagtgactacagccagagtacctcagatactattgaaaaaatcaaaaggataaagaatttcaagaccaaaacttttcaagaaaagaaggagcagcttatacctgaaaacagactcctgctgaaggaagtcggacccacgggggaaggaagagtctctgtgattgaacagctgctggatgagggagcagaccccaactgctgtgatgaagacaatcgacccgtcataaccgtggctgttatgaataagcaccatgaagcgattccagttctcgtgcagagaggagcaaacatcgaccagcagtgggggccgctcagaaatacagctcttcatgaagcaactctgcttggccttgcaggaagagagagcaccgccactttactgggatgcaatgcaagcatccaaaagaagaatgcaggaggccagacagcatacgacctggctctgaacactggagatgaccttgtcacctcactctttgctgccaagtttggccaagggcttgaggaccaactcgctcaaactaggagcctcagcctggatgactgttagccctgaggcctccacgggacttcatttaagaatacgtgcatggctggcacagtggcttacgcctgtaatcccagcactttgggaggctgaggctggcgtatcacctgaggtcgggagttcaagaccagcctgaccaacatggagaaaccccgtctctactaaaaatacaaaattagtcgggcgtagtggtgcatgcctgtaatcccagttactcgagaggctgaggcaggaaaatcgcttgaacccgggaggcagaggttacagtgagccaagatcgcgccatcgcactccagcctgggcaacaagagcaaaactccatctcaaaaaaaaaaaagaatatgtgcagctctggctattctttaatcatgtctttctgaaatgtgtatttgagattagaaattgaggttgagaggaactcaggagattttttttttaaatcatatgacagtataagccatcagtactaaatggacagctcccagtatactgtggactgtgataaactgaatgtatgttttttaatggtttattgctgcaggctttttgtgtatttgatttttagtttttaacttatttttcaataggtaataattgcacatggttcaaagctaaaaggtatgaagtattatgtagggatacgtccctcccattctgtcccacagccaccacctctctcctcagccagcaatgacatcagcgtcgacttgcctttcccggggttgtgcagagttagatatgcacatacatgtggtataagcacatgtacagaggagtacacatagcatataaacatgtctgtagcacatatatattctttcccctcttttaaaacaaatggtagcaaaccaaccacacactgttctgtatcttgctctgtttgcttgatacatcttgtaagtggctcctaattactatgtaaagattgaccttatttaaatttttttatgttgaaatcatcaatattcccatcattatggtgtgttctttgattgacaaatcagctctcaataaaccacttataagaatgt

SEQ ID NO: 11704 - protein, 503 aa, Homo sapiens
MGLCAECRSLVPMNTPICVVCEAPLALQLQPQASLHLKEKVICRACGTGNPAHLRYCVTCEGALPSSQESMCSGDKAPPPPTQKGGTISCYRCGRWNLWEASFCGWCGAMLGIPAGCSVCPKCGASNHLSARFCGSCGICVKSLVKLSLDRSLALAAEEPRPFSESLNIPLPRSDVGTKRDIGTQTVGLFYPSGKLLAKKEQELASQKQRQEKMSDHKPLLTAISPGRGYWRRQLDHISAHLRCYAQNNPEFRALIAEPRMGKLISATVHEDGCEVSIRLNYSQVSNKNLYLNKAVNFSDHLLSSAAEGDGGLCGSRSSWVSDYSQSTSDTIEKIKRIKNFKTKTFQEKKEQLIPENRLLLKEVGPTGEGRVSVIEQLLDEGADPNCCDEDNRPVITVAVMNKHHEAIPVLVQRGANIDQQWGPLRNTALHEATLLGLAGRESTATLLGCNASIQKKNAGGQTAYDLALNTGDDLVTSLFAAKFGQGLEDQLAQTRSLSLDDC

SEQ ID NO: 11705 - DNA, 1436 bp, Homo sapiens
  CDS (380)..(1033)
aattgcttccggggagttgcgagggagcgagggggaataaaggacccgcgaggaagggcccgcggatggcgcgtccctgagggtcgtggcgagttcgcggagcgtgggaaggagcggaccctgctctccccgggctgcgggccatggccacggcggagcggagagccctcggcatcggcttccagtggctctcacggccactctggtgctcatctgcgccgggcaagggggacgcagggaggatgggggtccagcctgctacggcggatttgacctgtacttcattttggacaaatcaggaagtgtgctgcaccactggaatgaaatctattactttgtggaacagttggctcacaaattcatcagcccacagttgagaatgtcctttattgttttctccacccgaggaacaaccttaatgaaactgacagaagacagagaacaaatccgtcaaggcctagaagaactccagaaagttctgccaggaggagacacttacatgcatgaaggatttgaaagggccagtgagcagatttattatgaaaacagacaagggtacaggacagctagcgtcatcattgctttgactgatggagaactccatgaagatctctttttctattcagagagggaggctaataggtctcgagatcttggtgcaattgtttactgtgttggtgtgaaagatttcaatgagacacagctggcccggattgcggacagtaaggatcatgtgtttcccgtgaatgacggctttcaggctctgcaaggcatcatccactcaattttgaagaagtcctgcatcgaaattctagcagctgaaccatccaccatatgtgcaggagagtcatttcaagttgtcgtgagaggaaacggcttccgacatgcccgcaacgtggacagggtcctctgcagcttcaagatcaatgactcggtcacactcagtaagtccttgcagagtccatgggtttcttcgacaagtggcttcaaggaagggaattcccacccttgtcttccagcaaggccacacacatgaaaccagcagaaaagagtcttatttgctggaaagacccccagcaagggcatagtgagcccttacagtggttccagtcagaaaaggcaccacttgggtgggcacagccccatgggtgtccaacttggtaagcagagcaaggctggacttgagtccccgtcctccacaaaacacagagccacaagccccagccctgcagcagccctccggaagcagcggggcactggtttccttgtcccctgccatctaccgagtggctcactctcaggtgggagtgctggtgatggttaattaggactgcagaaacatgagcctccttaacaaagtattgggactcttaagggtaagtgtgaaaaaggaatggtctaaatgcattaatcttgaataaaccgaaaaccaaacc

SEQ ID NO: 11706 - protein, 218 aa, Homo sapiens
MSFIVFSTRGTTLMKLTEDREQIRQGLEELQKVLPGGDTYMHEGFERASEQIYYENRQGYRTASVIIALTDGELHEDLFFYSEREANRSRDLGAIVYCVGVKDFNETQLARIADSKDHVFPVNDGFQALQGIIHSILKKSCIEILAAEPSTICAGESFQVVVRGNGFRHARNVDRVLCSFKINDSVTLSKSLQSPWVSSTSGFKEGNSHPCLPARPHT

SEQ ID NO: 11707 - DNA, 1694 bp, Homo sapiens
  CDS (259)..(1335)
aaaccatgtacctcaaattgtagaattaatactttcagaacagtgccaatagaacagaaacatgaagtctggggttcaaaccagaactacatttgtaacacagaccctgaaactgatggcctttcaccttctgttgcctctccaagtcccaaagaagtcaattttgtttcaaggggagcttcaagtcaccagcccagagttccactttttcctgaaaatggtttacaccagcagccagaacccttgcttccaaataatatgaaatctgcctgtgaaaaacgtttagaatgttgtagttctcctcattctaagccaaattgctcaaccctttctccaccaatgccactgccccagctgttaccttcggttactgatgcaaggtcggcaggaccttctgatcatattgattcctcagttactggggttcaaaggtttcgagatactctaaaaataccctacaagctggaattaaaaaatgaaccagggagaacggatttgaaacacattgttatagatgggagcaatgttgcaattacccatggtctgaaaaagttcttttcttgtcgtggaattgcaattgcagttgaatatttttggaagcttggcaacagaaacatcactgtatttgtccctcagtggagaacaaggcgtgatcctaatgtcacagaacagcacttcttaacccagctccaggagctcggaatattatctttaactcctgcccggatggtctttggagaaagaattgcttctcatgatgacaggtttctactacacttagcggacaaaactggtggcataattgtgacaaatgataatttcagagaatttgtgaatgagtcagtctcttggagagaaattattacaaaaaggctgctgcagtacacgttcgtgggggacatatttatggttcccgatgatcctctgggaagaagtggacctcgattagaggagtttcttcagaaggaagtctgtcttagagatatgcagcccctactcagtgccctgccaaatgtgggcatgtttgaccccagcttcagagtccctggcacccaggcagccagcaccagccaccagcctccgacccggattcagggagccccttcaagccactggctccctcagcagccccacttcccactgctgccagccctccccagtctccagcagaacctgcccatgccagctcagagatcttctgcagaaaccaacgagctgagggaagcccttctgaagatcttccctgactcagagcaaagactgaaaatagaccagatcttggtggcccacccatacatgaaagatctaaatgcgctttctgccatggtgttggattgaagattgtgctgagcgctgagcttgcgctcagggctggctgatcaaactcaagctcacacctgtacctgatgggaatgaacataatgtgaagaaacttatttcccagtgtaaacgcagttgtacagaaaaaaaatgttttgggtataaatctgggttttcaaaaccagcttttttctatatataaattatgctgctattacagatttaacattttctgttaaaggaaagtctacattttctgcctgttcagaactgtttaatagcagttactcttgagtgtatttacctttttatgttttttaaactattttccttaaagccgaaaatattgacaaatggatatggttagcctttat

SEQ ID NO: 11708 - protein, 359 aa, Homo sapiens [sequence omitted]

SEQ ID NO: 11709 - DNA, 1727 bp, Homo sapiens
  CDS (133)..(1725)
gtgggggcggggaggagaggcggcggcggcagtgtccaagctacgccactcgggctggggcgttgggagcgggagtgcagagcgtggtcgtggcggcggcggtgagaagagcgaggcggaggagggggtgccatggccgggcagcagttccagtacgatgacagtgggaacaccttcttctacttcctcacctccttcgtggggctcatcgtgatcccggcgacatactacctctggccccgagatcagaatgccgagcaaattcgattaaagaatatcagaaaagtatatggaaggtgtatgtggtatcgtttacggttattaaaaccccagccaaatattattcctacagtaaagaaaatagttctgcttgcaggatgggcattgttcttattccttgcatataaagtttccagaacagaccgagaataccaagaatacaatccttatgaagtattaaatttggatcctggagccacagtagcagaaattaaaaaacaatatcgtttgctgtcacttaaatatcatccagataaaggaggtgatgaggttatgttcatgaggatagcaaaagcttatgctgctttaacggatgaagagtcccggaaaaattgggaagaatttggaaatccagatgggcctcaagccacaagctttggaattgccctgccagcttggatagttgaccagaaaaattcaattctggttttacttgtatatggattggcatttatggttatccctccagttgttgtgggctcttggtggtatcgctcaatacgctatagtggagaccagattctaatacgcacaacacagatttatacatactttgtttataaaacccgaaatatggatatgaaacgtcttatcatggttttggctggagcttctgaatttgatcctcagtataataaagatgccacaagcagaccaacggataatattctaataccacagctaatcagagaaattggcagcattaatttaaagaagaatgagcctccacttacctgcccatatagcctgaaggccagagttcttttactgtctcatcttgctagaatgaaaattcctgagacccttgaagaagatcagcaattcatgctaaaaaagtgtcctgccctacttcaagaaatggttaatgtaatctgccaactaatagtaatggcccggaaccgtgaagaaagggagtttcgtgctccaactttggcatccctagaaaactgcatgaagctttctcagatggccgttcagggacttcagcaatttaagtctccccttctgcagctccctcatattgaagaggacaatcttagacgggtttctaatcataagaagtataaaattaaaactatccaggatttggtgagtttaaaagaatcagatcgtcacactctactgcacttccttgaagatgaaaaatatgaagaggttatggctgtccttgggagttttccatatgtgaccatggatataaaatcacaggtgttagatgatgaagatagcaacaacatcacagtaggatccttagttacagtgttggttaagttgacaaggcaaacaatggctgaagtatttgaaaaggagcagtccatctgtgctgcagaggaacagccagcagaagatgggcagggtgaaactaacaagaacaggacaaaaggaggatggcaacagaagagtaaaggacccaagaaaactgctaaatcaaaaaaaaagaaaccttt

SEQ ID NO: 11710 - protein, 531 aa, Homo sapiens
MAGQQFQYDDSGNTFFYFLTSFVGLIVIPATYYLWPRDQNAEQIRLKNIRKVYGRCMWYRLRLLKPQPNIIPTVKKIVLLAGWALFLFLAYKVSRTDREYQEYNPYEVLNLDPGATVAEIKKQYRLLSLKYHPDKGGDEVMFMRIAKAYAALTDEESRKNWEEFGNPDGPQATSFGIALPAWIVDQKNSILVLLVYGLAFMVIPPVVVGSWWYRSIRYSGDQILIRTTQIYTYFVYKTRNMDMKRLIMVLAGASEFDPQYNKDATSRPTDNILIPQLIREIGSINLKKNEPPLTCPYSLKARVLLLSHLARMKIPETLEEDQQFMLKKCPALLQEMVNVICQLIVMARNREEREFRAPTLASLENCMKLSQMAVQGLQQFKSPLLQLPHIEEDNLRRVSNHKKYKIKTIQDLVSLKESDRHTLLHFLEDEKYEEVMAVLGSFPYVTMDIKSQVLDDEDSNNITVGSLVTVLVKLTRQTMAEVFEKEQSICAAEEQPAEDGQGETNKNRTKGGWQQKSKGPKKTAKSKKKKP

SEQ ID NO: 11711 - DNA, 1700 bp, Homo sapiens
  CDS (164)..(769)
agatttgaaggcggcgcgcggactaggtgcgcacttcagttctcggagagaagaggcgggagtggacctggtcagccctaccccactgaccccaccggacccaggcgcggcctccgccacagccacagcccctgcccctgctgcggcgcggcgaggcgaggcgatggccaaggtgtcggtgctgaacgtggcggtcctggagaacccgagccctttccacagccccttccggttcgagatcagcttcgagtgcagtgaagccctggcggacgacctggagtggaagatcatttatgttggctcggctgagagtgaggaatttgatcagatcctagactcggtgctggtgggccctgtgccagcagggagacacatgtttgtctttcaggccgacgcccccaacccatccctcatcccagagactgatgccgtgggtgtgactgtggtcctcatcacctgcacctaccatggacaggagttcatccgagtgggctactacgtcaacaacgagtacctcaaccctgagctgcgtgagaacccgcccatgaagccagatttctcccagctccagcggaacatcttggcctcgaacccccgggtgacccgcttccatatcaactgggacaacaacatggacaggctggaggccatagagacccaggacccctccctgggctgcggcctcccactcaactgcactcctatcaagggcttggggctccctggctgcatccctggcctcctccctgagaactccatggactgcatctaactgcaggaacccagagtgtcccagcacgccgggaggggcaaccaggcctcccagcgagtcctgcagggcccatctagaggactttgggggccatcagctgcaatccaggtctgtcaaactcagcccctaggaaagaacaggccttgggtctcccctagtcctggccagaaggatgatctcgcttttcctctacaggcctataagaagcaggtacttcagttctaaattctgacttgtgttcttttcgtcttcataaattctaactaaggccactgtgccactgtgcacccttgagtaccattgatccaaagctttcccacagacctccctggcccacctagaggctttcttggtcagtgcctgtcaaggctccagtcctgctgagccaaaggctttgtcattcctttctcttcctgtacatctgagcagacccactccagctttctggtgtcacaggcgggaatgttagttagtaggtagacttagatcccatttctgtcctgctcccaggaagattcttaggtcctcttcaatccagcagcccctcccagaggtgtgatcagcaggatgctgaggaaccatgttgcctttcctgtcaatcacagccaccttcctgttatctcctaaatggatctggcttttcctggaggctgccatggttggaagatggtatcagagggcctgcctgggcagtctgtctccgggccagggtcagggaccctctgcctctggcagccttaacctgtcctctgctaggaccagggtgatttcaagccagggaagcaactgggaccctgaaaactgtccctccccagcccgctccccctctctgtgccctggtccccttgccgccatgtggatgctgttgtgattgctgtttgtatattatcaaaatgtttttatattaaaaatgtttggtctgaaaatt

SEQ ID NO: 11712 - protein, 202 aa, Homo sapiens
MAKVSVLNVAVLENPSPFHSPFRFEISFECSEALADDLEWKIIYVGSAESEEFDQILDSVLVGPVPAGRHMFVFQADAPNPSLIPETDAVGVTVVLITCTYHGQEFIRVGYYVNNEYLNPELRENPPMKPDFSQLQRNILASNPRVTRFHINWDNNMDRLEAIETQDPSLGCGLPLNCTPIKGLGLPGCIPGLLPENSMDCI

SEQ ID NO: 11713 - DNA, 2753 bp, Homo sapiens
  CDS (72)..(2081)
taagtaacgtcagcctgagaactgagtagctgtactgtgtggcgccttattctaggcacttgttgggcagaatgtcacacctgccgatgaaactcctgcgtaagaagatcgagaagcggaacctcaaattgcggcagcggaacctaaagtttcagggggcctcaaatctgaccctatcggaaactcaaaatggagatgtatctgaagaaacaatgggaagtagaaaggttaaaaaatcaaaacaaaagcccatgaatgtgggcttatcagaaactcaaaatggaggcatgtctcaagaagcagtgggaaatataaaagttacaaagtctccccagaaatccactgtattaaccaatggagaagcagcaatgcagtcttccaattcagaatcaaaaaagaaaaagaagaaaaagagaaaaatggtgaatgatgctgagcctgatacgaaaaaagcaaaaactgaaaacaaagggaaatctgaagaagaaagtgccgagactactaaagaaacagaaaataatgtggagaagccagataatgatgaagatgagagtgaggtgcccagtctgcccctgggactgacaggagcttttgaggatacttcgtttgcttctctatgtaatcttgtcaatgaaaacactctgaaggcaataaaagaaatgggttttacaaacatgactgaaattcagcataaaagtatcagaccacttctggaaggcagggatcttctagcagctgcaaaaacaggcagtggtaaaaccctggcttttctcatccctgcagttgaactcattgttaagttaaggttcatgaccaggaatggaacaggagtccttattctctcacctactagagaactagccatgcaaacctttggtgttcttaaggagctgatgactcaccacgtgcatacctatggcttgataatgggtggcagtaacagatctgctgaagcacagaaacttggtaatgggatcaacatcattgtggccacaccaggccgtctgctggaccatatgcagaataccccaggatttatgtataaaaacctgcagtgtctggttattgatgaagctgatcgtatcttggatgtggggtttgaagaggaattaaagcaaattattaaacttttgccaacacgtagacagactatgctcttttctgccacccaaactcgaaaagttgaagacctggcaaggatttctctgaaaaaggagccattgtatgttggcgttgatgatgataaagcgaatgcaacagtggatggtcttgaacagggatatgttgtttgtccttctgaaaagagattccttctgctctttacattccttaagaagaaccgaaagaagaagcttatggtcttcttttcatcttgtatgtctgtgaaataccactatgagttgctgaactacattgatttgcccgtcttggccattcatggaaagcaaaagcaaaataagcgtacaaccacattcttccagttctgcaatgcagattcgggaacactattgtgtacggatgtggcagcgagaggactagacattcctgaagtcgactggattgttcagtatgaccctccggatgaccctaaggaatatattcatcgtgtgggtagaacagccagaggcctaaatgggagagggcatgccttgctcattttgcgcccagaagaattgggttttcttcgttacttgaaacaatccaaggttccattaagtgaatttgacttttcctggtctaaaatttctgacattcagtctcagcttgagaaattgattgaaaagaattactttcttcataagtcagcccaggaagcatataagtcatacatacgagcctatgattcccattctctgaaacagatctttaatgttaataacctaaatttgcctcaggttgctctgtcatttggtttcaaggtgcctcccttcgttgatctgaacgtcaacagtaatgaaggcaagcagaaaaagcgaggaggtggtggtggatttggctaccagaaaaccaagaaagttgagaaatccaaaatctttaaacacattagcaagaaatcatctgacagcaggcagttctctcactgaacacatgccttcctttcatcttgaataactttgtcctaaaatgaattttttttccccttgatttaacaggatttttgtagactttagaatttggacttacctaacaagagtataaattgacttgggttgcaagcactgagcactgttacttctatcacgtctctcttttatttctgggatataaaacaggctttaagtttcttggttgcccaagggcagagcaaggaatatctggtgtttcttgtgatgataatattttaattttaaatatccctccctcatacaagtgtatgttaccattttaatataattctttttgtacctttccttcttgttttgtgaggatttttgtggcatggattgctgtgctcactgctgtaaaaggtgacctagtgtactgggcagctggtggcggtgcagaaaagagtctcaggttattttttgtttttagttatttcttggaccttgacagtatctaatgactcctcctgaaaatgctgcagtataaaagagcaaagagctttgggaaatacctaagaagcaccttaagattagggtggcattgcttttatagattcttgattttaaagcaacaggcctttctcaggtgttgcattttttggagcaaaaactatgggttgtaatttgaataaagtgtcactaagcagt

SEQ ID NO: 11714 - protein, 670 aa, Homo sapiens
MSHLPMKLLRKKIEKRNLKLRQRNLKFQGASNLTLSETQNGDVSEETMGSRKVKKSKQKPMNVGLSETQNGGMSQEAVGNIKVTKSPQKSTVLTNGEAAMQSSNSESKKKKKKKRKMVNDAEPDTKKAKTENKGKSEEESAETTKETENNVEKPDNDEDESEVPSLPLGLTGAFEDTSFASLCNLVNENTLKAIKEMGFTNMTEIQHKSIRPLLEGRDLLAAAKTGSGKTLAFLIPAVELIVKLRFMTRNGTGVLILSPTRELAMQTFGVLKELMTHHVHTYGLIMGGSNRSAEAQKLGNGINIIVATPGRLLDHMQNTPGFMYKNLQCLVIDEADRILDVGFEEELKQIIKLLPTRRQTMLFSATQTRKVEDLARISLKKEPLYVGVDDDKANATVDGLEQGYVVCPSEKRFLLLFTFLKKNRKKKLMVFFSSCMSVKYHYELLNYIDLPVLAIHGKQKQNKRTTTFFQFCNADSGTLLCTDVAARGLDIPEVDWIVQYDPPDDPKEYIHRVGRTARGLNGRGHALLILRPEELGFLRYLKQSKVPLSEFDFSWSKISDIQSQLEKLIEKNYFLHKSAQEAYKSYIRAYDSHSLKQIFNVNNLNLPQVALSFGFKVPPFVDLNVNSNEGKQKKRGGGGGFGYQKTKKVEKSKIFKHISKKSSDSRQFSH

SEQ ID NO: 11715 - DNA, 2586 bp, Homo sapiens
  CDS (301)..(1515)
gtaagtccagagagtttagtgtccacacctagactggaattgaaagacaccagcagaagtgatgaaagtccaaaaccaggaaaattccaaagaactcgtgtccctcgagctgaatctggtgatagccttggttctgaagatcgtgatcttctttacagcattgatgcatatagatctcaaagattcaaagaaacagaacgtccatcaataaagcaggtgattgttcggaaggaagatgttacttcaaaactggatgaaaaaaataatgcctttccttgtcaagttaatatcaaacagaaaatgcaggaactcaataacgaaataaatatgcaacagacagtgatctatcaagctagccaggctcttaactgctgtgttgatgaagaacatggaaaagggtccctagaagaagctgaagcagaaagacttcttctaattgcaactgggaagagaacacttttgattgatgaattgaataaattgaagaacgaaggacctcagaggaagaataaggctagtccccaaagtgaatttatgccatccaaaggatcagttactttgtcagaaatccgcttgcctctaaaagcagattttgtctgcagtacggttcagaaaccagatgcagcaaattactattacttaattatactaaaagcaggagctgaaaatatggtagccacaccattagcaagtacttcaaactctcttaacggtgatgctctgacattcactactacatttactctgcaagatgtatccaatgactttgaaataaatattgaagtttacagcttggtgcaaaagaaagatccctcaggccttgataagaagaaaaaaacatccaagtccaaggctattactccaaagcgactcctcacatctataaccacaaaaagcaacattcattcttcagtcatggccagtccaggaggtcttagtgctgtgcgaaccagcaacttcgcccttgttggatcttacacattatcattgtcttcagtaggaaatactaagtttgttctggacaaggtcccctttttatcttctttggaaggtcatatttatttaaaaataaaatgtcaagtgaattccagtgttgaagaaagaggttttctaaccatatttgaagatgttagtggttttggtgcctggcatcgaagatggtgtgttctttctggaaactgtatatcttattggacttatccagatgatgagaaacgcaagaatcccataggaaggataaatctggctaattgtaccagtcgtcagatagaaccagccaacagagaattttgtgcaagacgcaacacttttgaattaattactgtccgaccacaaagagaagatgaccgagagactcttgtcagccaatgcagggacacactctgtgttaccaagaactggctgtctgcagatactaaagaagagcgggatctctggatgcaaaaactcaatcaagttcttgttgatattcgcctctggcaacctgatgcttgctacaaacctattggaaagccttaaaccgggaaatttccatgctatctagaggtttttgatgtcatcttaagaaacacacttaagagcatcagatttactgattgcattttatgctttaagtacgaaagggtttgtgccaatattcactacgtattatgcagtatttatatcttttgtatgtaaaactttaactgatttctgtcattcgtcaatgagtagaagtaaatacattatagttgattttgctaaatcttaatttaaaagcctcattttcctagaaatctaattattcagttattcatgacaatatttttttaaaagtaagaaattctgagttgtcttcttggagctgtaggtcttgaagcagcaacgtctttcaggggttggagacagaaacccattctccaatctcagtagttttttcgaaaggctgtgatcatttattgatcgtgatatgacttgttactagggtactgaaaaaaatgtctaaggcctttacagaaacatttttagtaatgaggatgagaactttttcaaatagcaaatatatattggcttaaagcatgaggctgtcttcagaaaagtgatgtggacataggaggcaatgtgtgagacttgggggttcaatattttatatagaagagttaataagcacatggtttacatttactcagctactatatatgcagtgtggtgcacattttcacagaattctggcttcattaagatcattatttttgctgcgtagcttacagacttagcatattagttttttctactcctacaagtgtaaattgaaaaatctttatattaaaaaagtaaactgttatgaagctgctatgtactaataatactttgcttgccaaagtgtttgggttttgttgttgtttgtttgtttgtttgtttttggttcatgaacaacagtgtctagaaacccattttgaaagtggaaaattattaagtcacctatcacctttaaacgcctttttttaaaattataaaatattgtaaagcagggtctcaacttttaaatacactttgaacttcttctctgaattattaaagttctttatgacctcatttataagcact

SEQ ID NO: 11716 - protein, 405 aa, Homo sapiens
MQELNNEINMQQTVIYQASQALNCCVDEEHGKGSLEEAEAERLLLIATGKRTLLIDELNKLKNEGPQRKNKASPQSEFMPSKGSVTLSEIRLPLKADFVCSTVQKPDAANYYYLIILKAGAENMVATPLASTSNSLNGDALTFTTTFTLQDVSNDFEINIEVYSLVQKKDPSGLDKKKKTSKSKAITPKRLLTSITTKSNIHSSVMASPGGLSAVRTSNFALVGSYTLSLSSVGNTKFVLDKVPFLSSLEGHIYLKIKCQVNSSVEERGFLTIFEDVSGFGAWHRRWCVLSGNCISYWTYPDDEKRKNPIGRINLANCTSRQIEPANREFCARRNTFELITVRPQREDDRETLVSQCRDTLCVTKNWLSADTKEERDLWMQKLNQVLVDIRLWQPDACYKPIGKP

SEQ ID NO: 11717 - DNA, 3296 bp, Homo sapiens
gatgaatgcagaggaaagcagcttggcaaattgttattatcaacccttactttgctaagcaagaaactgaactgttacaagattacccttgaatgtctaccacaaaatgttggtttctataaaaagtttggatatactgtatctgaagaaaactacatgtgtcggaggtttctaaagtaaaaatcttgtaggaaaattgtcaaaggggctaatgctacaaggctacactcttcctagagttgaaatattttgttgctgcagccgagtgacctccataaatactggactgaaaaaacattgtaatactacaagtataatgacatttagaagattactttgggctggtgggacatgctgtgaatttagattacaaatgaatattataaaggggatgatttttaaccaaaggaatatatttttaacttgaatcttttcttgcattgtatttttctaaaagtttggcttcctttcttggtagtcaagagtatgggtaataaggagttatatgtctgctatctgtgttgctcatttaaaaaaagtatacattgaataaggctgtttatcacatgcataaaattaaatatttttgtttccaagaaacatctcaatacacttaggggtgtattgtttcccacatattaagtcagggtggataaattagttattataactaaacatagtatagtccaacattcgttgatcccaatacaggcaaacaacctggtcaaccttttgaagtagaagaaatgaaaattacttgacaagattaaaagtaaaacaatttaaatgttttactgaaagtttatatagtatagtctatgtagataaaaagtaccacttgtcttttctgtgaattatgactattcatttgttaaaaatacctaagagcaattatagtgggacatctaaggtcctctgtaaacagtgaattagcaaacctcagcctatgtgtttctaccctgatttttttcttttcatgggtatctgaagcctctaagttttttcaaaaatggagtatcacaaaattgagtgaaacacaatacttaatgtattgtactagattgccaaattcataaaatgttaatggaagctttttgatgtgattataatggcactattctggtcattatcctattttgattttatttaattttttaaagttgaagaattaaatattttaatggttctaatcttttgcattccatgttgcattaaacctgtttatataagtagtcttctgttagaatcacatctgtgcttttcttgagtctgccgttgaactattagattaagtcataattcataaaattttagtttaatgtgctctttgtaaaatgaaattgtaaagaaaataccagtgtttctcatcccattgactcacaccacgtcatctggattttggatttccctccatgcagccagctatagttggctttccaaaacaacagaaatccttcaccaatagagtgcactacttacctgcttatagcctatacagacgaactgatctgtccttcgtgaaacgcaacaaagctagttctgtcttttcagaagtcctacaaccttgacaaagagtagttttatcaggtaaatcctggtaattaaaaacgcatgtttttaaaaattagcctggtaaggccgggtgcagtggctcacgcctgtgatcccagcactttgggaggctgaggtgggcagatcacaaggtcaggagtttgagaccggcctgaccaaaatggtgaaaccctgtctctactaaaaaaaagaaaaattagccagacgtggtggcatgcgcctgtgatcccggctactcaggaggctgaggcgagagaatcgcttgaacccgggaggcaaaggttgcagtgagctgagatcacaccactgcactccagcctggcgacagagagagactccatctcaaaacaaaacaaaaaaaattagcctacttaaaggcacaactaaatgctttattacctttcttaccactggacaatttgaggtaaaatcattcacaaggttggcacttcagtaaatccctttaaatagtgttcctaagatatctcttaaatcctcccataggaaatagaattacaggtaaggtacaccatacaaaaattgtgtcattgaggacaatggtgatctgtaattttagttgagtatgtttatgatttttgaagccatatggtgagtaaatgtaaatatgaaaaaagtgctacataaaacacttcttaaactttttttttttaaaaactgctccttgtggagcaggactaccccataggcagtgtacccacaatagatagccttttgttgttgttgttgttgagacaaggtctcgctgttgcccaggctagagcgcaggagcacaatcaccacacactgccgcttcaatctcctgggctcaaatgatccttccacctcagcctcccatgtggctgggactataggtgcatgccaccacacccagctaattaaaaaaattttttgtgtggagtctatgttgcccaggctggtctcttaactcctaggctcaagtgatcctcccacctcagcctcccaaagtgcttggatgacaggtgcgagccactgcacctggcccacattttttaaagagacactgtcccactccatcacccaggctggagtccagtggtgtgatcatagctcactgcatcctccagttcctgggttcaggccatccctcctgcctcagcctccccagtagctggaactgcaggtgtgtgccatcacacctggctttacatttttctgtggggtcttgctatattgcccaagccggtctcaaactcctgagctcaagtgatcctctgcctcagcctccagagtatctgggattgcatatgtcggctaccgtgtctggccgttcacatctttggccactatttgcttgtgaaaaggtataatgaggtggtacttatcatttttactgtgtctcatgttttgtatatttttgtttcatcaactaagatgcactgtaacatctctgaaatctggatatattatcaatggtttatcatagttttgttagcaatacactgtcttttagtggtgcctaaaataatggtatagttgtgaggtgatcttagatttgatgaagcacagtatgcaggtaggcctaatgggggaagatggtaatataaaagcaagaagtatttttttttgtaatgactgaaagctgttctgtggatgacctaccctttcctttaaacacgattctctcacttccaactccaaacttgctcaactaatccttaaaaataaacttgagctggaatttg

SEQ ID NO: 11718 - DNA, 930 bp, Homo sapiens
  CDS (221)..(661)
gcgaggcccggtccctgcagcgggcgaaaggagcccgggcctggaggtttgcgtaccggtcgcctggtcccggcaccagcgccgcccagtgtggtttcccataaggaagctcttcttcctgcttggcttccacctttaacccttccacctgggagcgtcctctaacacattcagactacaagtccagacccaggagagcaaggcccagaaagaggtcaaaatggggtttatattttcaaaatctatgaatgaaagcatgaaaaatcaaaaggagttcatgcttatgaatgctcgacttcagctggaaaggcagctcatcatgcagagtgaaatgagggaaagacaaatggccatgcagattgcgtggtctcgggaattcctcaaatattttggaactttttttggccttgcagccatctctttaacagctggagcgattaaaaaaaagaagccagccttcctggtcccgattgttccattaagctttatcctcacctaccagtatgacttgggctatggaacccttttagaaagaatgaaaggtgaagctgaggacatactggaaacagaaaagagtaaattgcagctgccaagaggaatgatcacttttgaaagcattgaaaaagccagaaaggaacagagtagattcttcatagacaaatgaaatcatgcttaccaatcaaatctcaaagcacagaattattgacttgaatcatggtttttacagttttttaaatgctcaagattttgatattatagattttattttaaaatattaaaatgcaagatagttttgagctattttaaaataaaatttataacattcaacacaaaatcatggaggtgctctaaataacttttagatttcctctctctgtgtgcattaccaatatctaagtgtaaaattaataaattgttttgaattcctgg

SEQ ID NO: 11719 - protein, 147 aa, Homo sapiens
MGFIFSKSMNESMKNQKEFMLMNARLQLERQLIMQSEMRERQMAMQIAWSREFLKYFGTFFGLAAISLTAGAIKKKKPAFLVPIVPLSFILTYQYDLGYGTLLERMKGEAEDILETEKSKLQLPRGMITFESIEKARKEQSRFFIDK

SEQ ID NO: 11720 - DNA, 2380 bp, Homo sapiens
  CDS (74)..(1444)
aaaaaaaaaaaaaaaaagagcctggggcccaggactgcagcggcttcggaaggtgggctctgccagcgggaccatgctgctccgagccgcttggaggcgggcggcagtggcggtgacagcggctccagggccgaagcccgcggcgcccactcgggggctgcgcctgcgcgttggagaccgtgctcctcagtctgcggttcccgcagatacagccgctgccccggaggtggggccagtgctgcgacctctctatatggatgtgcaagctacaactcctctggacccccgggtgcttgatgccatgctcccttacctaatcaactactatgggaacccacactcccggacacatgcttatggctgggagagtgaggcagccatggaacgtgctcgtcagcaagtagcatctctgattggagctgatcctcgtgagatcatttttactagtggtgctactgaatccaacaacatagcaattaagggggtggcccgattctacaggtcacggaaaaagcacttgatcaccacccagacagaacacaaatgtgtcttggactcctgccgttcactggaagctgagggctttcaggtcacctacctcccagtgcagaagagtgggatcattgacctaaaggaactagaggctgctatccagccagatactagcctggtgtcagtcatgactgtgaacaatgagattggagtgaagcagcctattgcagaaatagggcggatttgcagttccagaaaggtatatttccatactgatgcagcccaggctgttggaaaaatcccacttgatgtcaatgacatgaaaattgatctcatgagcattagtggtcacaaaatctacggtcccaaaggggttggtgccatctacatccgtcgccggccccgtgtgcgtgtggaggccctgcagagtggaggggggcaggagcggggtatgcggtctgggacagtgcccacacccttagtggtggggctgggggctgcgtgtgaggtggcacagcaagagatggagtatgaccacaagcgaatctcaaagttgtcagagcggctgatacagaatataatgaagagccttccagatgtggtgatgaatggggaccctaagcaccattatcccggctgtatcaacctctcctttgcatatgtggaaggggaaagtctgctgatggcactgaaggacgttgccttatcctcagggagtgcctgcacctctgcatccctggagccctcttatgtgcttagagcaattggcactgatgaggatttagcgcactcttctatcaggtttggaattggccgcttcactacagaggaggaagtggactacacagtggagaaatgcattcagcatgtgaagcgtcttcgagaaatgagccctctctgggagatggttcaggatggcattgacctcaagagcatcaagtggacccaacactagaagaatagggccctgactttgtgctggtctggcccctcctgcctcaccaacccgtgcacaaccagacaccttgttacacctagtggatgctctagattggtatagaccagttgacttcagcatcagtccacctctatgacagaaacacaagaaaactgtctttccctagcttcagttccttgggtgtggagcactccccatttcttctcgggtcttaaagtgtgtggacattttcatcccgaagccatagagacatttgctgtcatattgctgctgggcacatctgtgctcttggtgaggagagcaagaggaaccagaagaagtctctttggtcagggaccatgatgctctacatggacatttgagtcttcgtcttctgctgctgctcggctggaccagcttctttaacagcaagcataatccacttcaatgtaatattttctgtagctccaaaggctatctcttcatattgactgcagacagactgaatggacagtttcttagagggcttgtctcctttctacccttgtcctctttcctttcctttgacctaatggagctagaaatatgtctgtgactccaccagttattctaataatttgttttcttgaaaattgttaatttcaagactggagaaataaactcaccttctatttactctgtgactttatgagaggttgagggaaaagtggaagctgtacttgggaattgtggagaagaccgccactccatctgatttgcataaatgactcagtgggcttttgtatctcttcatttaagaattatttgaatgcctgccaggagccagatttgttctgggtattaggaatacactggttaacaggaccaaaaaagaccctgccctcactgagttttaaattttagtggagagatggaaaataattaaacaaataaacaatgttatagattgtg

SEQ ID NO: 11721 - protein, 457 aa, Homo sapiens
MLLRAAWRRAAVAVTAAPGPKPAAPTRGLRLRVGDRAPQSAVPADTAAAPEVGPVLRPLYMDVQATTPLDPRVLDAMLPYLINYYGNPHSRTHAYGWESEAAMERARQQVASLIGADPREIIFTSGATESNNIAIKGVARFYRSRKKHLITTQTEHKCVLDSCRSLEAEGFQVTYLPVQKSGIIDLKELEAAIQPDTSLVSVMTVNNEIGVKQPIAEIGRICSSRKVYFHTDAAQAVGKIPLDVNDMKIDLMSISGHKIYGPKGVGAIYIRRRPRVRVEALQSGGGQERGMRSGTVPTPLVVGLGAACEVAQQEMEYDHKRISKLSERLIQNIMKSLPDVVMNGDPKHHYPGCINLSFAYVEGESLLMALKDVALSSGSACTSASLEPSYVLRAIGTDEDLAHSSIRFGIGRFTTEEEVDYTVEKCIQHVKRLREMSPLWEMVQDGIDLKSIKWTQH

SEQ ID NO: 11722 - DNA, 2200 bp, Homo sapiens
  CDS (21)..(1856)
gcgggggctgaggggctgccatggcggcggcgggccggctcccgagctcctgggccctcttctcgccgctcctcgcagggcttgcactactgggagtcgggccggtcccagcgcgggcgctgcacaacgtcacggccgagctctttggggccgaggcctggggcacccttgcggctttcggggacctcaactccgacaagcagacggatctcttcgtgctgcgggaaagaaatgacttaatcgtctttttggcagaccagaatgcaccctattttaaacccaaagtaaaggtatctttcaagaatcacagtgcattgataacaagtgtagtccctggggattatgatggagattctcaaatggatgtccttctgacatatcttcccaaaaattatgccaagagtgaattaggagctgttatcttctggggacaaaatcaaacattagatcctaacaatatgaccatactcaataggacttttcaagatgagccactaattatggatttcaatggtgatctaattcctgatatttttggtatcacaaatgaatccaaccagccacagatactattaggagggaatttatcatggcatccagcattgaccactacaagtaaaatgcgaattccacattctcatgcatttattgatctgactgaagattttacagcagatttattcctgacgacattgaatgccaccactagtaccttccagtttgaaatatgggaaaatttggatggaaacttctctgtcagtactatattggaaaaacctcaaaatatgatggtggttggacagtcagcatttgcagactttgatggagatggacacatggatcatttactgccaggctgtgaagataaaaattgccaaaagagtaccatctacttagtgagatctgggatgaagcagtgggttccagtcctacaagatttcagcaataagggcacactctggggctttgtgccatttgtggatgaacagcaaccaactgaaataccaattccaattacccttcatattggagactacaatatggatggctatccagacgctctggtcatactaaagaacacatctggaagcaaccagcaggcctttttactggagaacgtcccttgtaataatgcaagctgtgaagaggcgcgtcgaatgtttaaagtctactgggagctgacagacctaaatcaaattaaggatgccatggttgccaccttctttgacatttacgaagatggaatcttggacattgtagtgctaagtaaaggatatacaaagaatgattttgccattcatacactaaaaaataactttgaagcagatgcttattttgttaaagttattgttcttagtggtctgtgttctaatgactgtcctcgtaagataacaccctttggagtgaatcaacctggaccttatatcatgtatacaactgtagatgcaaatgggtatctgaaaaatggatcagctggccaactcagccaatccgcacatttagctctccaactaccatacaacgtgcttggtttaggtcggagcgcaaattttcttgaccatctctacgttggtattccccgtccatctggagaaaaatctatacgaaaacaagagtggactgcaatcattccaaattcccagctaattgtcattccataccctcacaatgtccctcgaagttggagtgccaaactgtatcttacaccaagtaatattgttctgcttactgctatagctctcatcggtgtctgtgttttcatcttggcaataattggcattttacattggcaggaaaagaaagcagatgatagagaaaaacgacaagaagcccaccggtttcattttgatgctatgtgacttgcctttaatattacataatggaatggctgttcacttgattagttgaaacacaaattctggcttgaaaaaataggggagattaaatattatttataaatgatgtatcccatggtaattattggaaagtattcaaataaatatggtttgaatatgtcacaaggtctttttttttaaagcactttgtatataaaaatttgggttctctattctgtagtgctgtacatttttgttcctttgtggaatgtgttgcatgtactccagtgtttgtgtatttataatcttatttgcatcatgatgatggaaaaagttgtgtaaataaaaataattaaatgagcagg

SEQ ID NO: 11723 - protein, 612 aa, Homo sapiens
MAAAGRLPSSWALFSPLLAGLALLGVGPVPARALHNVTAELFGAEAWGTLAAFGDLNSDKQTDLFVLRERNDLIVFLADQNAPYFKPKVKVSFKNHSALITSVVPGDYDGDSQMDVLLTYLPKNYAKSELGAVIFWGQNQTLDPNNMTILNRTFQDEPLIMDFNGDLIPDIFGITNESNQPQILLGGNLSWHPALTTTSKMRIPHSHAFIDLTEDFTADLFLTTLNATTSTFQFEIWENLDGNFSVSTILEKPQNMMVVGQSAFADFDGDGHMDHLLPGCEDKNCQKSTIYLVRSGMKQWVPVLQDFSNKGTLWGFVPFVDEQQPTEIPIPITLHIGDYNMDGYPDALVILKNTSGSNQQAFLLENVPCNNASCEEARRMFKVYWELTDLNQIKDAMVATFFDIYEDGILDIVVLSKGYTKNDFAIHTLKNNFEADAYFVKVIVLSGLCSNDCPRKITPFGVNQPGPYIMYTTVDANGYLKNGSAGQLSQSAHLALQLPYNVLGLGRSANFLDHLYVGIPRPSGEKSIRKQEWTAIIPNSQLIVIPYPHNVPRSWSAKLYLTPSNIVLLTAIALIGVCVFILAIIGILHWQEKKADDREKRQEAHRFHFDAM

SEQ ID NO: 11724 - DNA, 2968 bp, Homo sapiens
  CDS (136)..(1530)
cattactagaaagaactcttacaaacaaagttgaaggatatagtttctttggtcccacgcctgcggcacatcatcactgttgatggaaagccaccgacctggtccgagttccccaagggcatcattgtgcataccatggctgcagtggaggccctgggagccaaggccagcatggaaaaccaacctcatagcaaaccattgccctcagatattgcagtaatcatgtacacaagtggatccacaggacttccaaagggagtcatgatctcacatagtaacattattgctggtataactgggatggcagaaaggattccagaactaggagaggaagatgtctacattggatatttgcctctggcccatgttctagaattaagtgctgagcttgtctgtctttctcacggatgccgcattggttactcttcaccacagactttagcagatcagtcttcaaaaattaaaaaaggaagcaaaggggatacatccatgttgaaaccaacactgatggcagcagttccggaaatcatggatcggatctacaaaaatgtcatgaataaagtcagtgaaatgagtagttttcaacgtaatctgtttattctggcctataattacaaaatggaacagatttcaaaaggacgtaatactccactgtgcgacagctttgttttccggaaagttcgaagcttgctagggggaaatattcgtctcctgttgtgtggtggcgctccactttctgcaaccacgcagcgattcatgaacatctgtttctgctgtcctgttggtcagggatacgggctcactgaatctgctggggctggaacaatttccgaagtgtgggactacaatactggcagagtgggagcaccattagtttgctgtgaaatcaaattaaaaaactgggaggaaggtggatactttaatactgataagccacaccccaggggtgaaattcttattgggggccaaagtgtgacaatggggtactacaaaaatgaagcaaaaacaaaagctgatttctttgaagatgaaaatggacaaaggtggctctgtactggggatattggagagtttgaacccgatggatgcttaaagattattgatcgtaaaaaggaccttgtaaaactacaggcaggggaatatgtttctcttgggaaagtagaggcagctttgaagaatcttccactagtagataacatttgtgcatatgcaaacagttatcattcttatgtcattggatttgttgtgccaaatcaaaaggaactaactgaactagctcgaaagaaaggacttaaagggacttgggaggagctgtgtaacagttgtgaaatggaaaatgaggtacttaaagtgctttccgaagctgctatttcagcaagtctggaaaagtttgaaattccagtaaaaattcgtttgagtcctgaaccgtggacccctgaaactggtctggtgacagatgccttcaagctgaaacgcaaagagcttaaaacacattaccaggcggacattgagcgaatgtatggaagaaaataattattctcttctggcatcagtttgctacagtgagctcagatcaaataggaaaatacttgaaatgcatgtctcaagctgcaaggcaaactccattcctcatattaaactattacttctcatgacgtcaccatttttaactgacaggattagtaaaacattaagacagcaaacttgtgtctgtctcttctttcattttccccgccaccaacttactttaccacctatgactgtacttgtcagtatgagaatttttctgaatcatattggggaagcagtgattttaaaacctcaagtttttaaacatgatttatatgttctgtataatgttcagtttgtaactttttaaaagtttggatgtatagagggataaataggaaatataagaattggttatttgggggcttttttacttactgtatttaaaaatacaagggtattgatatgaaattatgtaaatttcaaatgcttatgaatcaaatcattgttgaacaaaagatttgttgctgtgtaattattgtcttgtatgcatttgagagaaataaatatacccatacttatgttttaagaagttgagatcttgtgaatatatgcctgtcagtgtcttctttatatatttattttttattagaaaaaatgaagtttggttggtgatgcatgaaacaaaatagcaagagagggttatagtttaatagtaagggagataacacagcatgtgtagcaccagttgataattggtctctagtagcttactgtcaaaatgttcaatgaagtcttctgttcatctgttgaaactaggaaaatacccaaacttaaatggaagaattctgaaagagaggatagaatttaaagaacaagagtatataaagttattctttgaatatttcgttgactatatgtacattgagttatctatatttgtaaacaaattagtcatggaaaattattctattccaaagtctccttttagtctagataatcattatttcattttaaaattagtgtttttcatagtttgcactgatgcgtgtatggatgtgtgtgagtcagtggtagcttatttaaaaagcaccttatcctttctcccataacctttgtacactaaaaaatgaaagaatttagaatgtatttgatgatagcattctcactaagacacatgagaatttaactttataaccgcgtgagttaagatttaattcataggttttgatgtcattgttgaagttatttgtaattcagaaaccttgcttgtgtgatacatagtaagtctcttcatttattactgcttgcctgttgttatatctggattatcaaaagcaatagtgcaccaattaagatgtgctcaaatcaggacttaaatcataggcaccacatttttcatgtcagactagttactttgttgattctcagttactgtaggcatcaaaaggcaaaaatc

SEQ ID NO: 11725 - protein, 465 aa, Homo sapiens
MAAVEALGAKASMENQPHSKPLPSDIAVIMYTSGSTGLPKGVMISHSNIIAGITGMAERIPELGEEDVYIGYLPLAHVLELSAELVCLSHGCRIGYSSPQTLADQSSKIKKGSKGDTSMLKPTLMAAVPEIMDRIYKNVMNKVSEMSSFQRNLFILAYNYKMEQISKGRNTPLCDSFVFRKVRSLLGGNIRLLLCGGAPLSATTQRFMNICFCCPVGQGYGLTESAGAGTISEVWDYNTGRVGAPLVCCEIKLKNWEEGGYFNTDKPHPRGEILIGGQSVTMGYYKNEAKTKADFFEDENGQRWLCTGDIGEFEPDGCLKIIDRKKDLVKLQAGEYVSLGKVEAALKNLPLVDNICAYANSYHSYVIGFVVPNQKELTELARKKGLKGTWEELCNSCEMENEVLKVLSEAAISASLEKFEIPVKIRLSPEPWTPETGLVTDAFKLKRKELKTHYQADIERMYGRK

SEQ ID NO: 11726 - DNA, 3455 bp, Homo sapiens
  CDS (545)..(2263)
tgtgaagtcaactttatcccagacagttccatccaagggagaattaagtagagaaatttgtctgcaatctcaatctaaagacaaatctacgacaccaggaggaacaggaattaagcctttcctggaacgctttggagagcgttgtcaagaacatagcaaagaaagtccagctcgtagcacaccccacagaacccccattattactccaaatacaaaggccatccaagaaagattattcaagcaagacacatcttcatctactacccatttagcacaacagctcaagcaggaacgtcaaaaagaactagcatgtcttcgtggccgatttgacaagggcaatatatggagtgcagaaaaaggcggaaactcaaaaagcaaacaactagaaaccaaacaggaaactcactgtcagagcactcccctcaaaaaacaccaaggtgtttcaaaaactcagtcacttccagtaacagaaaaggtgaccgaaaaccagataccagccaaaaattctagtacagaacctaaagaagtgatacgtgaaattgagatgagtgtggatgatgatgatatcaatagttcgaaagtaattaatgacctcttcagtgatgtcctagaggaaggtgaactagatatggagaagagccaagaggagatggatcaagcattagcagaaagcagcgaagaacaggaagatgcactgaatatctcctcaatgtctttacttgcaccattggcacaaacagttggtgtggtaagtccagagagttcagtgtccacacctagactggaattgaaagacaccagcagaagtgatgaaagtccaaaaccaggaaaattccaaagaactcgtgtccctcgagctgaatctggtgatagccttggttctgaagatcgtgatcttctttacagcattgatgcatatagatctcaaagattcaaagaaacagaacgtccatcaataaagcaggtgattgttcggaaggaagatgttacttcaaaactggatgaaaaaaataatgcctttccttgtcaagttaatatcaaacagaaaatgcaggaactcaataacgaaataaatatgcaacagacagtgatctatcaagctagccaggctcttaactgctgtgttgatgaagaacatggaaaagggtccctagaagaagctgaagcagaaagacttcttctaattgcaactgggaagagaacacttttgattgatgaattgaataaattgaagaacgaaggacctcagaggaagaataaggctagtccccaaagtgaatttatgccatccaaaggatcagttactttgtcagaaatccgcttgcctctaaaagcagattttgtctgcagtacggttcagaaaccagatgcagcaaattactattacttaattatactaaaagcaggagctgaaaatatggtagccacaccattagcaagtacttcaaactctcttaacggtgatgctctgacattcactactacatttactctgcaagatgtatccaatgactttgaaataaatattgaagtttacagcttggtgcaaaagaaagatccctcaggccttgataagaagaaaaaaacatccaagtccaaggctattactccaaagcgactcctcacatctataaccacaaaaagcaacattcattcttcagtcatggccagtccaggaggtcttagtgctgtgcgaaccagcaacttcgcccttgttggatcttacacattatcattgtcttcagtaggaaatactaagtttgttctggacaaggtcccctttttatcttctttggaaggtcatatttatttaaaaataaaatgtcaagtgaattccagtgttgaagaaagaggttttctaaccatatttgaagatgttagtggttttggtgcctggcatcgaagatggtgtgttctttctggaaactgtatatcttattggacttatccagatgatgagaaacgcaagaatcccataggaaggataaatctggctaattgtaccagtcgtcagatagaaccagccaacagagaattttgtgcaagacgcaacacttttgaattaattactgtccgaccacaaagagaagatgaccgggagactcttgtcagccaatgcagggacacactctgtgttaccaagaactggctgtctgcagatactaaagaagagcgggatctctggatgcaaaaactcaatcaagttcttgttgatattcgcctctggcaacctgatgcttgctacaaacctattggaaagccttaaaccgggaaatttccatgctatctagaggtttttgatgtcatcttaagaaacacacttaagagcatcagatttactgattgcattttatgctttaagtacgaaagggtttgtgccaatattcactacgtattatgcagtatttatatcttttgtatgtaaaactttaactgatttctgtcattcatcaatgagtagaagtaaatacattatagttgattttgctaaatcttaatttaaaagcctcattttcctagaaatctaattattcagttattcatgacaatatttttttaaaagtaagaaattctgagttgtcttcttggagctgtaggtcttgaagcagcaacgtctttcaggggttggagacagaaacccattctccaatctcagtagttttttcgaaaggctgtgatcatttattgatcgtgatatgacttgttactagggtactgaaaaaaatgtctaaggcctttacagaaacatttttagtaatgaggatgagaactttttcaaatagcaaatatatattggcttaaagcatgaggctgtcttcagaaaagtgatgtggacataggaggcaatgtgtgagacttgggggttcaatattttatatagaagagttaataagcacatggtttacatttactcagctactatatatgcagtgtggtgcacattttcacagaattctggcttcattaagatcattatttttgctgcgtagcttacagacttagcatattagttttttctactcctacaagtgtaaattgaaaaatctttatattaaaaaagtaaactgttatgaagctgctatgtactaataatactttgcttgccaaagtgtttgggttttgttgttgtttgtttgtttgtttgtttttggttcatgaacaacagtgtctagaaacccattttgaaagtggaaaattattaagtcacctatcacctttaaacgcctttttttaaaattataaaatattgtaaagcagggtctcaacttttaaatacactttgaacttcttctctgaattattaaagttctttatgacctcatttataaacactaaattctgtcacctcctgtcattttattttttattcattcaaatgtattttttcttgtgcatattataaaaatatattttatgagctcttactcaaataaatacctgtaaatgtctaaagg

SEQ ID NO: 11727 - protein, 573 aa, Homo sapiens [sequence omitted]

SEQ ID NO: 11728 - DNA, 2190 bp, Homo sapiens
  CDS (71)..(811)
aggaagtggaagtgaggagagaggagaggagaaggggaccagctctccggactatcggcactaccttcgaatgtgggccaaggagaaagaggctcagaaggagacgattaaggatcttcccaagatgaaccaggagcagttcattgagctgtgcaagacgctttacaacatgttcagtgaagaccccatggagcaggacctgtaccacgccatcgccaccgtggccagcctcctgctccgcatcggagaggtggggaagaagttctcagcccgcacaggcaggaagcccagggactgtgccactgaggaggacgagccaccagcacccgaactgcatcaggacgcagccagggagcttcagcccccagctgcaggagacccccaagccaaagcaggcggagacacacccctcggaacagccccacaggagagccaggtggtggtggaggggggcagcggcgagggacagggctcaccctcccagctgctgtctgacgatgaaaccaaagacgacatgtccatgtcctcctactcggtggtcagcacgggctccctgcaatgtgaagaccttgcagacgacacggtgctggtgggcggggaggcctgcagccccacagcgcgcatcggcggcaccgtcgacaccgactggtgcatctcctttgagcagatcctggcctccatcctgacggagtccgtgctggtgaacttctttgagaagagagtggacattggactcaagatcaaggaccaaaagaaagtggagagacagttcagcaccgccagtgaccatgagcagcctggagtttccggctgatgcctgcagctgtgaggcctggcccaaggtgtcatcagtggggctggcctcatctcctcctgcctttcctcccttatcagtttctctttaaaggtgtgcccctcctgctctcccaggagcagtgagttgtgagtggaaagaaggctggtgcagacccagctgccttagacagattccctgggcctgcatctcctggcgccggctgcttctgggcccaggaagaggctgtggctcccaccttccttacacctggtgggagcccgcctcgcaccagctgcacctgcctagcattagaggctctcagatctgcccttgcttgcctcatacctctgtgctccacactgcggccaggccagctgagtccctccatccgtggatgctttcctgcagctatgtggtatgggggtcattcctgcctcttggcaccaggttggggggcatgtgcttgttgggcaccaaagtgatggaaccctcaggtgctctccgggagcctgaacctcctgactgaggaacatgggcagaacatgtttattgcacagagtgggcgctgcgcacaggcgtggctgtacacgtgctctcagctcatcatcctttccagtaactttaaaaaaacatccctcaggtcctgatatatttccttggattcatttcacttggctagaaattacactgtgcccaatgccttaataaatccctgaaagaaataaaaaccactgtgtgcaatgccttgctgtggcccccaaccactgcttaggcctcccaacttctccccaggccaagtatggggccctggctgtgttctggaagttcaagacacttagtcctccacagtgggtggaagagtgcaaggtctgcctggtcagatggagacgcagaacctgctggtgcaagctgggcaggtcctgaccaacctgcatcaggggatgccctgagctccacaggtcttcatgggcaggggttgtgggtcctggtgaaggaagtgcatcctcaggcctgggctgtagcaagctgtctgcccttgggttcaagaaccagactgtggagccaaaggtgaccgcagggggccccagggctggagccacaaggataccctcactttgcatgaggagctgaaactgaccagtgtccagtgttagcccccacatggggctgctcttgcttctactaaaagatacagcagttacccccttatccacaggggatacagtggatatctaaaaccagacccccagtggatgtctaaaaccacagataataacaaaccttatacatactgtttttttcctatgcatacatacctgtgattaagtttatgaattaggcaccttaagagattgacaacaataactaataataaaatgtaacggttatactgt

SEQ ID NO: 11729 - protein, 247 aa, Homo sapiens [sequence omitted]

SEQ ID NO: 11730 - DNA, 2198 bp, Homo sapiens
  CDS (35)..(703)
ggacctgagcaccttcgacttccgcacgggcaagatgctgatgagcaagatgaacaagagccgccagcgcgtgcgctacgactcctccaaccaggtcaagggcaagcccgacctgaacacggcgctgcccgtgcgccagacggcgtccatcttcaagcagccggtgaccaagattaccaaccaccccagcaacaaggtcaagagcgacccgcagaaggcggtggaccagccgcgccagctcttctgggagaagaagctgagcggcctgaacgccttcgacattgctgaggagctggtcaagaccatggacctccccaagggcctgcagggggtgggacctggctgcacggatgagacgctgctgtcggccatcgccagcgccctgcacactagcaccatgcccatcacgggacagctctcggccgccgtggagaagaaccccggcgtatggctcaacaccacgcagcccctgtgcaaagccttcatggtgaccgacgaggacatcaggaagcaggaagagctggtgcagcaggtgcggaagcggctggaggaggcgctgatggccgacatgctggcgcacgtggaggagctggcccgtgacggggaggcgccgctggacaaggcctgcgctgaggacgacgacgaggaagacgaggaggaggaggaggaggagcccgacccggacccggagatggagcacgtctagggcagaggccctgccgagagcccgtgctgcctgctggagccgcctgcagacgcggtcctcggccccacgtgaaccaggctcggcggcgaagcccagccttggagacacccaggaggaaggccgtgctcctggctccctcctcggcccgtccccacttcccggggcctcggggcacacagctggggctgcccccacccgaaagaccctccacgctcgtcctctacagagtccggcttcgggaagtgccgggtgctcctgggccctgcctggctccctacgacctttgggctcgaggccagctcctccccatgcccgctgtcccagctccttgagactggagagcagccagcaggtgcccggcagctcggcgccacggcttgctgacagctgggagggtttctcggtctggaggcgtagttttgaaactcacatcacccactgtgcagcgtgaggacgggactctggtctgctgtggggggcatgcaggacggcgccactctctgccctgccatgcggctggtggtgccacagagcctcaccgtgcctgagtggcgtgcccaggaggccgctctccttcagtaaatgtaacacagtcgaggcacgtcatcgggcagccttccctgtgtgccaacgccagccttcgcttctgaaaaccaaactccagccgctgccagtcgggacttggtcgcccggcgctgccagaatgctccactgccagccggcccccctgcctcggtttcccttctgtttagtggcgacacaggcacccagctttggggtggtgctgacgctcccaggggtgccaggagccactgggacagggtgaggctcccagacgctcctcgaggtgcccagctctccagggagcttctggcccaaggccgtctgagggatctgctccttaaccccccagtgccttggcgagggcaggttccaagccacagacgcctgccccgagtggactctgcggccagtccctggtgccctcctggccctgctgcccagtgagggctcctacgggtgggttcattggcctgggcccagcgagcccccacctgcattgaccttaggcccatagagagggcctgtcccggtgctgccccagccaggatctggtcgctgccccagggggactgatgggcagagtcgcccctgtggctggactgtgaccatccctgatggggcctgaccgcgggagctgaggaagcgccgctccaccgtctgccctccaaggacccgcatggaggcagtgggctggcagcttcctgctgctccctgtcagagtcaaagcacaaatcctcaggacgggctcaagggccagggcagccgagggaagctccaggtggggaccacgtcttcctgaggttggtgcccactggctgggaccctttgcagtggggtggcctcccctctgtctgcctggtggagggagccgtgggcgtggggacgtgactgaataaagccaccatgggtggatgtgcttggagcctgg

SEQ ID NO: 11731 - protein, 223 aa, Homo sapiens
MLMSKMNKSRQRVRYDSSNQVKGKPDLNTALPVRQTASIFKQPVTKITNHPSNKVKSDPQKAVDQPRQLFWEKKLSGLNAFDIAEELVKTMDLPKGLQGVGPGCTDETLLSAIASALHTSTMPITGQLSAAVEKNPGVWLNTTQPLCKAFMVTDEDIRKQEELVQQVRKRLEEALMADMLAHVEELARDGEAPLDKACAEDDDEEDEEEEEEEPDPDPEMEHV

SEQ ID NO: 11732 - DNA, 2357 bp, Homo sapiens
  CDS (140)..(1885)
gatccggaagtcggagcctagctgcgcgagagtttctgctcgctcaaccgagttgtcgtgttgccctcgcttctcagatccccgccggaagtgaagagagcaagcagatttgaacctatctgctttcaagctggtcatcatgatgaaacttagacacaaaaataaaaagccaggtgaaggttccaagggccacaagaagataagttggccctaccctcagcctgcaaagcaaaatgggaagaaagcaacctccaaagtgccctctgcacctcattttgttcaccccaatgatcatgccaatcgagaggctgaattaaagaagaagtgggttgaggagatgagggagaagcagcaagccgcccgggagcaagaaagacaaaaacgcaggaccattgagagctactgtcaggatgtcctaagacgccaggaggagtttgagcataaggaggaagttttgcaggaattaaatatgtttcctcagctggatgacgaggccacgaggaaggcttattacaaggagttccgtaaggtggtggaatactctgatgtgattctggaagtcctggatgccagagacccattaggctgccgctgcttccaaatggaggaggctgtcctgcgagcacaaggcaacaagaagctggtcctggtcttgaacaagattgacctggtccccaaggaggttgtggagaaatggctggattaccttcggaatgagttgccaaccgtggctttcaaggccagtacccagcatcaggtcaaaaacctgaatcgttgcagtgtgccagtagatcaggcctctgagtcactgctgaaaagcaaagcctgctttggagctgaaaacctcatgagggttctggggaactattgccgccttggtgaagtgcgcacccacattcgtgtgggtgttgtgggtcttcccaatgttgggaagagcagcctgatcaatagcctgaagcgcagccgcgcatgcagcgtgggagctgttcctggaattaccaaattcatgcaggaggtctacctggacaagttcatccggctcttggatgctccaggcattgtcccagggcccaactcagaggtgggcaccatcctgcgtaactgcgtccacgtgcagaagctggcagaccctgtgaccccagtggagaccatcctgcagcgctgcaacctggaggagatttccaactattatggcgtctctgggttccagaccactgagcactttctgacggcagtggcccaccgtttggggaagaagaagaagggaggcttatatagtcaggaacaggcggccaaagctgtcctagctgactgggtgagcgggaagatcagcttctatataccaccaccagccactcacactctgcccacccatctcagtgctgagatcgttaaggaaatgaccgaggtctttgacatcgaggatactgagcaggccaatgaagacaccatggaatgcttggccaccggagaatctgatgagctgttgggtgacacggacccacttgaaatggagatcaagttgctccattctccgatgacgaaaatagcagatgccattgaaaataaaaccaccgtgtataagattggagatctcactgggtattgcaccaatccaaaccgtcatcagatggggtgggctaaacgcaatgtggaccaccgccctaagagcaacagtatggtggatgtctgctcagtggaccgccgctcagtgctgcagaggatcatggagacggaccccctgcaacagggccaggctctggcatctgccctgaaaaataagaagaagatgcagaaacgtgcagataaaatcgccagcaagctgtctgattccatgatgtctgctctcgacctctctggcaatgctgatgatggtgttggtgactaatcgactgatctcacttcccttccgctccaagcaccagttccggtggtacgggggaataccagtgaaatagtttggttctccctgaagcatctgcatattgaaagaacgctttccccactgtgtgtcttctccccctcctccagtaaaaacagtcccggctgggtgctgtggctcacgtctgtaatcccagcactttgggaggccgaggtgggcggatcacctgaggtcgggagttcgagaccagcctggccaacatggtgaggccccgtctctactaaaaatacaaaaaaatttagccgtgcttggtggcacctgtaatcccagctacttgggaggctgaggcaggagaatcgcctgaacctgggagactaaggcaggagaatcgcctgaacctgggaggcagaggttgcagtgagcccagacggcaccattgcactctagcctgggcaacaacacgaaactccgtccc

SEQ ID NO: 11733 - protein, 582 aa, Homo sapiens
MMKLRHKNKKPGEGSKGHKKISWPYPQPAKQNGKKATSKVPSAPHFVHPNDHANREAELKKKWVEEMREKQQAAREQERQKRRTIESYCQDVLRRQEEFEHKEEVLQELNMFPQLDDEATRKAYYKEFRKVVEYSDVILEVLDARDPLGCRCFQMEEAVLRAQGNKKLVLVLNKIDLVPKEVVEKWLDYLRNELPTVAFKASTQHQVKNLNRCSVPVDQASESLLKSKACFGAENLMRVLGNYCRLGEVRTHIRVGVVGLPNVGKSSLINSLKRSRACSVGAVPGITKFMQEVYLDKFIRLLDAPGIVPGPNSEVGTILRNCVHVQKLADPVTPVETILQRCNLEEISNYYGVSGFQTTEHFLTAVAHRLGKKKKGGLYSQEQAAKAVLADWVSGKISFYIPPPATHTLPTHLSAEIVKEMTEVFDIEDTEQANEDTMECLATGESDELLGDTDPLEMEIKLLHSPMTKIADAIENKTTVYKIGDLTGYCTNPNRHQMGWAKRNVDHRPKSNSMVDVCSVDRRSVLQRIMETDPLQQGQALASALKNKKKMQKRADKIASKLSDSMMSALDLSGNADDGVGD

SEQ ID NO: 11734 - DNA, 2328 bp, Homo sapiens
  CDS (309)..(1484)
ctctggcgggtggcggtgttgaaggcgagagcttgcttggcccgtgtcgcttctgtcccaagaaccggacggagagtgagggcacgagggtcgctgtcgggggctgtcgtcttccacgtacacgtcgtcgtgaggagcgcagtccggactcttcccgcaacccctccggctccctttccgcacgcctcgaggcggcggcggccaccgagacagcagcgcaccttcccccatcccttccccttatcccccagcccaaaagggcccggtctgcgccccacccccgcccgtccgcccgctacgccgccgccatgtcggcgcaggcccagatgcgcgcgatgctggaccagttgatgggcacctcccgggacggagatacaactcgtcaacgaatcaaattcagtgatgacagagtatgcaagagtcaccttctcaactgttgtcctcatgatgtcctttctggaactagaatggatcttggagaatgtctgaaagtccatgacctggctttaagagcggattatgaaattgcatccaaagaacaagattttttctttgaacttgatgccatggatcatctgcagtcattcattgcagattgtgatcgtagaacagaagtggccaagaaaagattagcagaaactcaagaagagattagtgctgaagtagcagcaaaggcagaacgtgttcatgagttaaatgaagaaattggtaaattgttagccaaggtggaacaactaggagctgaagggaatgtggaggaatcccagaaagtaatggatgaagtagagaaagcacgggcaaagaaaagagaagcagaggaagtttatcggaattctatgccagcttccagttttcagcagcagaaacttcgagtctgtgaagtctgctctgcctatttaggacttcatgataatgacagacgactggctgatcattttgggggtaaactgcacctgggatttattgaaataagagagaagcttgaagaattaaagagagtcgtagctgagaagcaggagaaaagaaaccaggaacggctgaaacgaagagaagagagagagagagaagaaagggagaagctgaggaggtcccgatcacacagcaagaatccaaaaagatccaggtccagagagcatcgcagacatcgatctcgctccatgtcacgtgaacgcaagaggagaactcgatccaaatctcgggagaaacgccatcgccacaggtcccgctccagcagccgtagccgcagccgtagccaccagagaagtcggcacagttctagagataggagcagagaacgttccaagaggagatcctcaaaagaaagattcagagaccaagacttagcatcatgtgacagagacaggagttcaagagacagatcacctcgtgacagagatcggaaagataagaagcggtcctatgagagtgctaatggcagatcagaagacaggaggagctctgaagagcgcgaagcaggggagatctaactagctgtgtacatttcttcagtccttaagcttcctacggagttacgtactattgtttagttcacagctgttcagggtgacagtgagcagatccagacaccagatccagctaggctagatgtacagtatctaacttgatctgaactgaacctgttttccttgatgatgcctaaaactacatccatagtttctggtgaacctgtaatacagttctgaaagtacagttttatataataagatgctgatctctttattctttcaagtaagagtgctagtgaacaaattgtgttacttgccttgggattttttgaacgtttgtaaaatgctgtcttcctagtccaaacagctgcagctttgggcatttttctttttaattattcttcctctgactttgtatcccttaatacctacactctccaattgtaagagaaagggggcagggaagcaatatagcttccattctaaggctgtattcccgttatgaattactagctgattacagttcagagcattgatcctggaatgtgtgctggagaaatttaaaatactggggttttttgtttaatggtgcctatttagagttggaagttgaacagctgttgcattacatacttttgcttttttattgaaattttgaaatcaaacgtcttgatttttctgttctgttgaattgctatgttcaggatgttctagggggtgggggcagggactcttttcgtaataagcacttgttttattttgtgtgtgtggagtataaaggctacacccttattgtaaaaaaataataataataaaatgaaagaaacaatcaccaccaccattattaaactgtaacttgtct

SEQ ID NO: 11735 - protein, 392 aa, Homo sapiens
MSAQAQMRAMLDQLMGTSRDGDTTRQRIKFSDDRVCKSHLLNCCPHDVLSGTRMDLGECLKVHDLALRADYEIASKEQDFFFELDAMDHLQSFIADCDRRTEVAKKRLAETQEEISAEVAAKAERVHELNEEIGKLLAKVEQLGAEGNVEESQKVMDEVEKARAKKREAEEVYRNSMPASSFQQQKLRVCEVCSAYLGLHDNDRRLADHFGGKLHLGFIEIREKLEELKRVVAEKQEKRNQERLKRREEREREEREKLRRSRSHSKNPKRSRSREHRRHRSRSMSRERKRRTRSKSREKRHRHRSRSSSRSRSRSHQRSRHSSRDRSRERSKRRSSKERFRDQDLASCDRDRSSRDRSPRDRDRKDKKRSYESANGRSEDRRSSEEREAGEI

SEQ ID NO: 11736 - DNA, 995 bp, Homo sapiens
  CDS (113)..(784)
cttccggggaccaggcccgcttttggctgcatcagccggggattgccggcgccaggcatctgcatctgggaccgacctcctgggctggctgatcaaagaggaagcagcagcaatgtctgctgtgggggctgcaactccatacctgcatcatcctggtgatagtcacagtggccgagtgagtttcttgggggcccagcttcctccagaggtggcagcaatggcccggctactaggggacctagacaggagcacgttcagaaagttgctgaagtttgtggtcagcagcctgcagggggaggactgccgagaggctgtgcagcgtcttggggtcagcgccaacctgccggaggagcagctgggtgccctgctggcaggcatgcacacactgctccagcaggccctccgtctgccccccaccagcctgaagcctgacatcttcagggaccagctccaggagctctgcatcccccaagacctggtcggggacttggccagcgtggtatttgggagccagcggcccctccttgattctgtggcccagcagcagggggcctggctgccgcatgttgctgactttcggtggcgggtggatgtagcaatctccaccagtgccctggctcgctccctgcagccgagcgtcctgatgcagctgaagctttcagatgggtcagcataccgctttgaggtccccacagccaagttccaggagctgcggtacagcgtggccctggtcctaaaggagatggcagatctggagaagaggtgtgagcgcagactgcaggactgacccctcacttgaccagtcccattcagatccggcttggacaggcacctgagatggtgccaaagtgcagctgactcttcccacgacagccctgcccttcccatgaggcaggctcttcagtgagtgtttgaacgtaattatgtagttttctgtttaattgaaaaagagagctatgcctttttttctttttggaagtaaagcagctaaaaac

SEQ ID NO: 11737 - protein, 224 aa, Homo sapiens [sequence omitted]

SEQ ID NO: 11738 - DNA, 2421 bp, Homo sapiens
gaaaaaaagtgagagacctctgcctacaaaacctcaaaccagtcacttttgtcaattgctaatacccagttacttatgatttaaaaacaaccaacagaaaacatcccactgactgtatggcactctatagtcaaaaaaggaaacttccttattgggacttttctttcttagtccagttgtgttgacacatatgaacacagacaaagtgctatgcggaggaaagcaagtgttggtcagtagtttcatgttttagggagtggttcctgtggagatcagaaagtgacatttgctttcggtactgtaatacgtgcaccaaactgcctcaatcctaggtaacgagggcaacagggagcacctgtctggattgtttttaaacctccatactcaagctgtctcttcggcagggaggtgaatactcttgaaaggccaacagcaagtgtttgtgggacacaacacagataattttttcttaagtcggccaagatgtacttctctgtgtgcacacccatgcacactcatgcacacagatacataggtctgtatggctgtatttgctgttgattcagactttcacaccattaatggggaaaagcgtggccacaaaaacagatgctaggaagcttggcttcctcttcttgttgacccttttttgaaccaacatcttttttattatattcagagtatgtttttaagtgtatcttaatatatacattttttaggacatcttaaatctaaacaaaaaataaaatgaacatctcttgaaacctgttaaaacaaccagttaaagccacagatggctttcagggcagtagcagcagaggccagtggactctgaggactcctgaggggcggggcgtgtagccagccaggtgcatgccgggaccatggcccccatacttggctgcttcctgtgacagtgaaatacatccttcaaggtggcagctgttagggctgaatcttctggagaaaaaggtgccatctcaggagaatagcttttactctggtaggaatgcttccgagacaccacaaggcagcctgaacactcagttgcagggtcgggcttgcggtgggtgacccagagccaccaaagtcacatccacaactaatgagggaaatctgtaaagccagttagatagaagaattttatttttctgtgggttttgtgttgtcttttttatgttaaaaagaaatccagtttgtgtttttctataggaaaagtaaaagatcaggttatactttaggttaggggttctatttattcctgttagtaaataaaattaacaaatttctttgtttaacaaaagattaatctttaaaccactaaaatacatagactgattgattattcaacacattggaattgatgtcggtcatagtttcctgaagcatttagttacaacctgaaggaataaaatgatttgtggaaatgcttaaaatagacctaactgaatacagtctcatcttgccgcgcctggcttacctatctgtggaaagctaggcttcccaggctgggctctgcctgtctggtgcctggaggtgtgggagggaagatgagttatttaactggtaagcgatttgaaacactatttttatattaaagtaaatggcatggagtatagtgcaaattcatttttaagatagaacacaaaacttgaaagaagttttatgcgtgtgacagtgtatggggctgcagttggtctccctggaggggacttccacacctcctgcctttaggccatgggtggaaagtgctcagtgaagtacacctgtgtggcccagttctgaaagctttatacagttgaattttaagtggggttgataacaccttggactgttagtgttaaaaatctagtgggttgacctttaaatgcaacagtttttaaaatatattgctgcattttatagaatagtaaaggtacgattatacttgagattttcctccatttttatttcttcgtgaacatagagtttggggccgaaaatgtttttaaagtatgtgtttgagttaaatataaagttggttcacttcaaagctaaaaaattgttaaacttgcagcttggtattgcagagaagattttataagaattttgctttagagaatgccactttggctgaactacaagtgtaggccaccattataatttataaatacagcatacttcaaaactgtttgttatctcttgttaccatgtatgtataaatggaccttttataaccttgttctctgcttgacagactcaagagaaactacccaggtattacacaagccaaaatgggagcaaggccttctctccagactatcgtaacctggtgccttaccaagttgtgcttttctgttttcaagtgtaaatgatgttgagcagaatgttgtacttgaaaatgctataagtgagatggtatgaaataaattctgacttatg

SEQ ID NO: 11739 - DNA, 2247 bp, Homo sapiens
tacaccacatgcagtttacatctgtcttaactactccttcccaggtaaattccaattatatttgacatccagctaagagggcccatctcttctcacctctttcctagtcagtatattcagcaaatatttattgagcccttactgtgggcaaatcattgtactggataattgagaaaaatagataattcccttattcagtaaatgtctactgagcacaatctagtgaatcattacagtatggcctcattgttttgtttgaggtgtgttattcataacaatattttacaccattcgtatcaatgtaattatagaacacaatatacgatcaaggataagtaattgtgtggttatctgccatttaaaagtatccagtatttgatcacattattatatataatgaaaaaatgatttaatctgtaataaactggtttattgtgcagtgactgtaatatactagagttataataaattgtttactctgcctcaccaaacacatgctaggatataacccccaaaataagtatttaactttgcattaggtataaaggagactgggtgctataattagattattttgaggcagacagagagctgttatcctaactgatttagtatgttctgtaattgagaaaatgttcaccaaattatactttttagtgatttacatgtacattttataggggacatgttctgtgtatagcgaataaataacttttatagtatcacaaaatgttttggattccttagtttcttattaggatatgatgtttctttacctatacattgatttcatcacatttgatttttgtcatcttttttgccacatacttaaaactttccatataaaattaactaaaaatctggaagtggagtttaagcttttaatttgtagcaattttgaaaatatagcagaggtatattttcaagggaggtgtgaaatggaggtattattgtttgtattttattttagaaattttgtttgaacttgcccaagatcacacagcaagtgtcagatcctaggttacagcccataatttttcacttgtttcatcttttgttaccatgtttgttgtttaatccaatggggaagtgtttttatagctttattttcatggagatagtaacattgatataatgggatctagaatttacttagagtcaaagtgactagatttaattacaaaaagtattttgttgtataccgttatacactcattaacataggggttcttattgacagaggttctatgtatttttaaaagaatatgtagaggctatagacttttttgccctctacctcccttctccatttccttttgaagttaagacatttaagggggagaattaaggtgcatattgagttggggttttgtttaaaaaaaattaggtaaatacatatataactacaataacaacagttggtagttctctaaaatatttaattatggtaaatcagaaaaggccctttaatttttgcatctgttgaatgaattgctttaggatctcttctgtggttgtttctctttatactgaatgctgtcaatattattgagcacttactgtgccgaaccatgtgcttttcaaatatttctatttaatcctaaaaacactcctgggaaatgggtattattcccattttacagatgagaaaattgtcctttgtagaatacccatcatgtgatagcttcttgcatattatgctattcatttctcacaaccttacaaggtaaatggataatgttcctggatgagagattaaacgtactcgaagatcttatggttgtgtggctcagagactctaagcatggctttccaaatctcattctcttgtagagattttccattgtattgcattttgaccatgttcctgtttacaaaacctaagattatattctgaagtatctgtgacttgagtgatagctcaggaataatctgagggcattctattaggaaggaggactagcaaagcctatagttagcctatcctaggcatgaactattctcattttagataggatgacttgataaataggatgaagtgagcaacctgtttgtcttcggtcattggtatctacaagacattctgctagtcactgtggaaaagtttccttctcttgggttttttcctcttccccttcctcttaacagtgttggttatctttattatgtttctgtgtatttgtaacagctgtttcacccttgtattgcataatggggatttttcttggaataaaaagtgaggcatgt

SEQ ID NO: 11740 - DNA, 2001 bp, Homo sapiens
  CDS (210)..(1139)
gaagggcggcgcgcttaggcaggcggtggcgcggctggagtgccgcggggagggctgtgccggttgctttctgcagccgcatctcggccagctctcctcgccgtccccggggcgctgtgcgtctccagtccgggaccgaagccgcctgccgtagcgggcggccagatccgcgtcccgcctcagcggccggaggacatgcgggagagagaatgagccagagggacacgctggtgcatctgtttgccggaggatgtggtggtacagtgggagctattctgacatgtccactggaagttgtaaaaacacgactgcagtcatcttctgtgacgctttatatttctgaagttcagctgaacaccatggctggagccagtgtcaaccgagtagtgtctcccggacctcttcattgcctaaaggtgatcttggaaaaagaagggcctcgttccttgtttagaggactaggccccaatttagtgggggtagccccttccagagcaatatactttgctgcttattcaaactgcaaggaaaagttgaatgatgtatttgatcctgattctacccaagtacatatgatttcagctgcaatggcaggttttactgcaatcacagcaaccaaccccatttggcttataaagactcggttacagcttgatgcaaggaaccgcggggaaaggcgaatgggtgcttttgaatgtgttcgtaaagtgtatcagacagatggactaaaaggattttataggggcatgtctgcttcatatgctggtatatcagagactgttatccattttgttatttatgaaagtataaaacaaaaactactggaatataagactgcttctacaatggaaaatggtgaagagtctgtgaaagaagcatcagattttgtgggaatgatgctagctgctgccacctcaaaaacttgtgccacaactatagcatatccacatgttgtaagaacaagactacgtgaagagggaacaaaatacagatctttttttcagactctatctttgcttgttcaagaagaaggttatgggtctctttatcgtggtctgacaactcatctagtgagacagattccaaacacagccattatgatggccacctatgaattggtggtttacctactcaatggatagcagcacgaggactgctgtactgcaaaaaaagaagaccaaaagattacagtggaccatgggatacagaagccagcatggcagacagaagaaaaatagtttgggaacatgtaactattctaagtggaagttttgttgtaggaattatagtaatcacaccacattacttggcctttcggtaatgtgaaaaaaaaaaaaaaacctcagagcctccaaggaaatgcctttagaagcactcctctctcaaaattgccattttctctaccatgtcccccagacacagttgggttttgttgatttatggcagtcttctaaacaaagccatccttaattttacatactgtattgtaactatccaaagatagtattggcagtcataaatttataacttctggcctttgtttaattccagtaaaataacagcaatgacaatgagatcgtcagtattattttcacatttccctgagaggacctggcacaatattttaaatttaattatttggcagtagtcactgtttttgacaaccaatgaaatagcgtctaaatatcttgtatattttttagcatcaaaatgttttggtttccactgctgacaggtgcttgttgtttagcctaatgtggatatttaaattgttaacataccaaacacacatggtaatagtttgggacaaaataactagtaaaatgttgatttctcggctatttcactgactgcggcatgtcctcgtgtcttctctgattttgtggtacatgaatgaatgcatttatctttttagtgacttactagttacgaacttgaattatcacctctttgtcatacttaagtatcatttacataaagtgtaaaagattttttcacttt

SEQ ID NO: 11741 - protein, 310 aa, Homo sapiens
MSQRDTLVHLFAGGCGGTVGAILTCPLEVVKTRLQSSSVTLYISEVQLNTMAGASVNRVVSPGPLHCLKVILEKEGPRSLFRGLGPNLVGVAPSRAIYFAAYSNCKEKLNDVFDPDSTQVHMISAAMAGFTAITATNPIWLIKTRLQLDARNRGERRMGAFECVRKVYQTDGLKGFYRGMSASYAGISETVIHFVIYESIKQKLLEYKTASTMENGEESVKEASDFVGMMLAAATSKTCATTIAYPHVVRTRLREEGTKYRSFFQTLSLLVQEEGYGSLYRGLTTHLVRQIPNTAIMMATYELVVYLLNG

SEQ ID NO: 11742 - DNA, 3989 bp, Homo sapiens
  CDS (65)..(1891)
gtataaatacaagctgatccgcggcttattagagaacaacctgggagaacccatagaggaatttatgcggccttatgatttacaagatccaagaattcatactgtcctgagtggagaagtgtacacctgtatgtgcttcctcattgatatggtgaatgtaagtctggagcttaaagatccaaaaagaaaagaaggtgctgggtccctagccagatttgacttcaagaaatgcaaactgctctatgaaagtttttccaaccaaaccaagtccattaacttggtttcccattccatgatggcttttgacacccgttatgctgggcagaagaccagccctggcatgacgaatgtgttcagctgtatctttcagcccgctaagaacagcagcaccacccaagggtccattcagattgaactacatttcagatctaccaaggattcctcctgctttacagtagttctcaacaatctccgtgtgtttctcatatttgactggctactgttagtccatgattttctccacactcccagtgatattaagaaacaaaatcatgttactccttctcgccaccgtaactctagcagcgaatctgctatagttcccaaaactgtgaagagtggagtagttaccaagcggtcttcccttcctgtgtccaatgaaaggcacctggaggtcaaggtcaatgtaacaggtacggaatttgtggtcattgaagatgtgtcctgcttcgacaccaatgccattattctgaaaggcaccacagtgctcacctataagccccggtttgttgatcgccccttttcaggaagtttgtttggcattgaggtgttttcatgccgactagggaatgagcatgatacagctctttcaattgtggatcccgtacaaattcaaatggagttggtggggaattcttcttatcaaaatagttcaggattgatggatgcattcaatagtgaagatttcccacctgtcctggagattcagttacaagccctggatatcagactctcctataatggtgttcagctgtttcttgccattgcaaaatccatcccagagcaagctaatgctgcagtgccagactcagtggccctggagtcagactccgttggcacttaccttccaggtgcatctcgcgttggagaggaaatcagagaagggacaagacacaccttagatcctgtcttggagttacagctggctaggctgcaggagctgggattcagcatggatgattgtcgcaaagctcttttggcgtgtcaaggccaattgaaaaaggcagcaagttggttgtttaagaatgcggaacctctgaagtctctttccttggcctccaccagccgagatagcccaggggctgtggcagcgccattgatctctggcgtggagatcaaagctgagagtgtgtgcatctgtttcatcgatgactgcatggattgtgatgttcctctcgctgaactcaccttttcccgtctgaattttcttcagcgtgtaagaactagccctgaaggctatgcccacttcaccctttctggagattattataaccgtgctctttcaggctgggagccatttattgagccttggccatgctctgtatcctggcaacagcaggcagctggtcgtctccatcctcctcgactgaagctagaagccaaggccaaacctcgtttggatatcaatatcacttctgtgctaattgaccagtatgtaagtaccaaggaatcgtggatggcagattactgtaaagatgacaaggacatagagtcagctaaatcagaagactggatgggctcttcggtggatcctccatgttttggacaaagtaagagttttcactacatgtgtttaactaaatcacttttgacctacaaagcaatgcttcactgagaaattcaaatggaaccatcattctgcgtggaaaaacctacaggaaattctgactatcttctgtagttctgttttagtctttgcaggagacagttttctggcatgaactactgaacttataaatgtgggctgtaattccacctttgcgggggagaaaagatctgcaacacgtaattcctaaatcctggtaataatgcatatgaactggtgcacctgagaatgcatcaggatcagctgtggtttgtgttttactctgcaaaacattggttttctaattgatcggatttttttggccagatttttaaaagcatctaaaatggtcttctaaatctagagatagagggtttggacatattcttgaaaagagggcgagcaggagcccatgtggaaaaagttgttaaaaagggagccctgtgctgttcatagagtataaaagaattgaatgccctgcctcttgaagaaagaggagtcagcttgctctctattgatgatgctttctttccttatttaatgcctcgccggctctgttttcctcagagctggggagatggtgatggacaactgcatggtcttagttgttccacaagccattgtcatccaaattcaactcagctccaactcttacaatgtggtttctttggggagtcttggctggacttcacatagctcatgaatacttaaatattccatctggtctgcaaacgtgtcatgggaagattgggtgttcttagtgtgtgaagtaattgtactggttcatctctcctcagggtgaataagtggactttctgtctgccttgtacttctagaaagagacacaaagaaatgtcagctgtgcttgttctctgttttcccaggctgttgcttctgagtctcaaggtcattacttaggagccagggcttttcagatattgtcagctttgattttagctcctcctccaaccttcccaatttgtgtgtcaagaaaatgtaacatagtctacccagaagactctagataatctttgtaatatgtccaagagagtgtgtttctaaaacattattcatgcaggggcatcttcaattcagagtcaaactctagcaaggcctggtctgcaagattctgatgaaagattttcttgtccctctctttcttctttccttcttccctccctgcctccctttcttccttcctttttaaaattttgtccctctctctttctctatagttaaaaggcttcctcatctatattaaatgctggtgctgagttaaagcttgatttttatttatttaaagatttttatgattacttaggcttataaaagtgtaatctatctttttaataagacataacttgaatatgcataaatttccaaacctcttttcttattggaaattcctggatggtagtacagtacattccaggattgtattcttttagcaggcctactaaaatgatcattgggaatttattttgaaagtgagtagggttcaaccttgttgaactaatcataaactttcaggtcttattcaagaatagtaagtcatattcctacaaaagttatgcttcttattcagactggccttaaaacaagctcttgggaatagcccttaacatgaaatttagcctaagggacctgctgctttctcactgtttctttatcaggggaaagaaaataccagcctccttttgacaaaattgttggctttgttcagtcagggctgagattttgcaggtaaacctgggcggtgtggcacttcattgaatttattagttttgtattccaaggacattttatgaaaatatcaaatattctgaaaacttccatgcttgatttagaatttaaataaacactatgaggcaactccttggtagagattgtttaaatttggaacacatactgactcttcccctgaatttttgagatcccctgagactggcattttacttctgtgttttaccagttggaatggagcaaccttcactaaaatctgtactgatggattttcgtaactttttaatgccatttaagaacataacacctttaaattaaaaatcttcaaaaggctcgtcattctgttcaagagaaggttcaatacatattcttctaattcagg

SEQ ID NO: 11743 - protein, 609 aa, Homo sapiens
MRPYDLQDPRIHTVLSGEVYTCMCFLIDMVNVSLELKDPKRKEGAGSLARFDFKKCKLLYESFSNQTKSINLVSHSMMAFDTRYAGQKTSPGMTNVFSCIFQPAKNSSTTQGSIQIELHFRSTKDSSCFTVVLNNLRVFLIFDWLLLVHDFLHTPSDIKKQNHVTPSRHRNSSSESAIVPKTVKSGVVTKRSSLPVSNERHLEVKVNVTGTEFVVIEDVSCFDTNAIILKGTTVLTYKPRFVDRPFSGSLFGIEVFSCRLGNEHDTALSIVDPVQIQMELVGNSSYQNSSGLMDAFNSEDFPPVLEIQLQALDIRLSYNGVQLFLAIAKSIPEQANAAVPDSVALESDSVGTYLPGASRVGEEIREGTRHTLDPVLELQLARLQELGFSMDDCRKALLACQGQLKKAASWLFKNAEPLKSLSLASTSRDSPGAVAAPLISGVEIKAESVCICFIDDCMDCDVPLAELTFSRLNFLQRVRTSPEGYAHFTLSGDYYNRALSGWEPFIEPWPCSVSWQQQAAGRLHPPRLKLEAKAKPRLDINITSVLIDQYVSTKESWMADYCKDDKDIESAKSEDWMGSSVDPPCFGQSKSFHYMCLTKSLLTYKAMLH

SEQ ID NO: 11744 - DNA, 3389 bp, Homo sapiens
  CDS (33)..(1640)
agagcggccgcggctcccccgcacctgcggccatggatgaggagcgcgccctctacatcgtccgggccggcgaagcaggggctatcgagcgggtcctgagggattacagcgacaagcatagggctactttcaaatttgaatcaacagatgaagataaaagaaagaaactctgtgaaggcatatttaaagtccttataaaggacatcccaacaacatgtcaagtgtcctgcctggaagtactccgcattctctccagagacaaaaaggttttagttcctgtgacaactaaggaaaatatgcagatactgctgcgactagccaagctaaatgagttagatgattctttggagaaagtatcagagttcccagttattgtggagtcattaaaatgtctgtgtaatatagtgttcaacagtcagatggcacagcagctcagcctggaacttaatcttgctgcaaagctctgtaacctcctgagaaagtgcaaggaccggaaatttatcaatgacattaagtgctttgacttgcgcttgctcttccttctgtcacttttgcacaccgacatcaggtcacaattgcgctatgagctccagggactaccgctgctaacgcagatcttggaaagtgcctttagcatcaagtggaccgatgagtatgaatcggccatagaccataatggacctcctctctcacctcaggagacagactgtgccattgaggccctcaaagctctcttcaatgtgacggtagacagttggaaggtgcataaagagagtgattctcatcagttccgtgtaatggcagctgtccttcgtcattgtttactaatcgtaggtccaactgaagacaaaacagaagagctacacagcaatgcagtcaaccttttaagcaatgttccagtctcttgtttggatgttctcatttgtccgttaacccatgaagaaacagcccaagaggcaacgactctagatgaactgcccagtaataaaacagctgagaaagaaacagttttgaaaaacaataccatggtatacaatggtatgaatatggaggccattcatgttttactgaattttatggagaagagaatagacaagggaagcagctatagagagggtctaactccagttctcagcttattaaccgaatgttcccgagcccatcgaaacatccgaaaatttctcaaagatcaggttttaccaccgttgagggatgtgacaaatcgacctgaagttggctcaactgtgagaaataagctggtgcgcctcatgacacatgttgaccttggagtcaagcaaattgctgctgaattcctttttgtcctttgcaaagagagagtggatagtctgctgaaatacactggctatgggaatgctgcaggactgttggcggccaggggcctcttggctggaggaagaggagataattggtactcagaggatgaggacacagacactgaagaatacaaaaatgcaaaaccaaacattaatcttatcactggtcatttagaggaaccaatgccaaaccccatagatgaaatgacagaagaacaaaaagaatatgaagccatgaaacttgtcaacatgcttgataaactttccaggagagcagatgtgaaggacctgcaccaggatggtggttagcaacagtggcccgtgccaaagcacttaccaaagtgatgatgactaagaccctgtcattaattccatgtgtcaatactgccctgtagtacacagagcagacaagaaagaagagcccttgaaaacaagggaatgatttttgagtcgttatcaagctaagtggcaagcgggaagctgaaactcgtatagttgaacattcttggaggcttatctcttccctggccagatgcctgatcagatgagaagcccgccatgatactgtcacagtgcctagaatgggctctttatccagtagacaccactgtactttttgatacgagggcagtcttaacttgtgttaaggcctgtgtgtagcattgaagagaggagttgcttaaaccaatgggactaaaacctgatgggacaataacgcctttggaggaagcactcaaccagtactctgtcatcgaagagaccagctctgacacagactaaaagcatcacctgctcaactctcaatattgctttatcagcatcttttctctgtagctccaggggaatcttttctctaaaacatttatgcccttgctttggctagaaacacattaactggtttactcattgagaatccagcatatttaagaggtgaccctgtgttttttgtgatattgaggcattcatacagagctgcagttagacggggttacgggggctaaaagcagaaaaaaaattccatttcatcgggatggaactgaaggattttattctataaagcggccctggttgaatctggcaattctttttgccaagatccctagcagaagatttagccatgtccttcccctcacttgtgtgagtggccccttctgaatctctccagcagccagaggcacgtgagaagcagaaagagctggtaaataaagccttgggcaagcgacttcttagatcagaactcaccaaatggaagcctagcagctgctccataaacctagccccattcttcatatcaattttgtataaatatatagaaacacacacacagcctcagacttacaaactgattatactctaaaagtttgtatgtcagttagctaaaacttcagaatacatttctccctataaagagttataaatgatggtttagttctcaggcagctacaaatgcctatttattccctaatgtacctgaacactagtaccatagaactgaaccaccatctgtatcagcgcatggggagtgtgcattctgaggtctaacccggggtgccaggaacacacacatcctccatcccagcatagagaatggggactccctgagtaatgggagttctttcatggcctctgcttggggtgggggagtcagcagcacccatttgtacatataggtcattcatacatcacattttaaattggggactgtgtgtgctggtgtgtgtgtgagttctacgtttctaccatatgtgatcagtttaatagtaactttatttatttaaaaaaaagaaacacaattagttactgttaaactgataaagggtgtttatttttacttttagaattggtcctatgaagaagtagaaagtgagtcatgcactagacagtgggcctagctcatcagtggctaaagttgaaaaggggttggtttcctgtatatatatgtatgtatatacacacgtacatacattcatatatatacatatatacataatgtgcttaaccactgccttttaaaactttaaattaaataaaacattggggttgattcaatttggc

SEQ ID NO: 11745 - protein, 536 aa, Homo sapiens
MDEERALYIVRAGEAGAIERVLRDYSDKHRATFKFESTDEDKRKKLCEGIFKVLIKDIPTTCQVSCLEVLRILSRDKKVLVPVTTKENMQILLRLAKLNELDDSLEKVSEFPVIVESLKCLCNIVFNSQMAQQLSLELNLAAKLCNLLRKCKDRKFINDIKCFDLRLLFLLSLLHTDIRSQLRYELQGLPLLTQILESAFSIKWTDEYESAIDHNGPPLSPQETDCAIEALKALFNVTVDSWKVHKESDSHQFRVMAAVLRHCLLIVGPTEDKTEELHSNAVNLLSNVPVSCLDVLICPLTHEETAQEATTLDELPSNKTAEKETVLKNNTMVYNGMNMEAIHVLLNFMEKRIDKGSSYREGLTPVLSLLTECSRAHRNIRKFLKDQVLPPLRDVTNRPEVGSTVRNKLVRLMTHVDLGVKQIAAEFLFVLCKERVDSLLKYTGYGNAAGLLAARGLLAGGRGDNWYSEDEDTDTEEYKNAKPNINLITGHLEEPMPNPIDEMTEEQKEYEAMKLVNMLDKLSRRADVKDLHQDGG

SEQ ID NO: 11746 - DNA, 1087 bp, Homo sapiens
  CDS (57)..(500)
tctcagaaataatctcatccatatccgatgtaaaattcagtcatagtgggcggtacatgatgaccagagactacctgtcggtgaaggtgtgggacctcaacatggagagcaggccggtggagacccaccaggtccacgagtacctgcgcagcaagctctgctctctctatgagaacgactgcatctttgacaagtttgagtgttgctggaacggttcggatagcgccatcatgaccgggtcctataacaacttcttcaggatgtttgatagagacacgcggagggatgtgaccctggaggcctcgagagagagcagcaaaccgcgcgccagcctcaaaccccggaaggtgtgtacggggggtaagcggaggaaagacgagatcagtgtggacagtctggacttcaacaagaagatcctgcacacagcctggcaccccgtggacaatgtcattgccgtggctgccaccaataacttgtacatattccaggacaaaatcaactagagacgcgaacgtgaggaccaagtcttgtcttgcatagttaagccggacatttttctgtcagagaaaaggcatcattgtccgctccattaagaacagtgacgcacctgctacttcccttcacagacacaggagaaagccgcctccgctggaggcccggtgtggttccgcctcggcgaggcgcgagacaggcgctgctgctcacgtggagacgctctcgaagcagagttgacggacactgctcccaaaaggtcattactcagaataaatgtatttatttcagtccgagccttcctttccaatttatagaccaaaaaattaacatccaagagaaaagttattgtcagataccgctctttctccaactttccctctttctctgccatcacacttgggccttcactgcagcgtggtgtggccaccgtccgtgtcctctcggccttcctccgagtccaggtggactctgtggatgtgtggatgtggcccgagcaggctcaggcggccccactcacccacagcatccgccgccaccccttcgggtgtgagcgctcaataaaaacaacacactataaagtgtttttaaatcc

SEQ ID NO: 11747 - protein, 148 aa, Homo sapiens
MMTRDYLSVKVWDLNMESRPVETHQVHEYLRSKLCSLYENDCIFDKFECCWNGSDSAIMTGSYNNFFRMFDRDTRRDVTLEASRESSKPRASLKPRKVCTGGKRRKDEISVDSLDFNKKILHTAWHPVDNVIAVAATNNLYIFQDKIN

SEQ ID NO: 11748 - DNA, 1877 bp, Homo sapiens
  CDS (223)..(1347)
aggtcgcgcgccccttccggcgcggggagggcgctgaagatcggggccgctcggccgcaggccgcctccagcgccgcgggatgtagcgcgggggaccgcggcccccagcagagcccgcctgcccagcttgtctaccatcagagggagatctctgccccctggggctgagagaccccaacctttccccaagctgaagctgcagggtattgaggtaccagccagatgtcttcccacaaaggatctgtggtggcacaggggaatggggctcctgccagtaacagggaagctgacacggtggaactggctgaactgggacccctgctagaagagaagggcaaacgggtaatcgccaacccacccaaagctgaagaagagcaaacatgcccagtgccccaggaagaagaggaggaggtgcgggtactgacacttcccctgcaagcccaccacgccatggagaagatggaagagtttgtgtacaaggtctgggagggacgttggagggtcatcccatatgatgtgctccctgactggctaaaggacaacgactatctgctacatggtcatagacctcccatgccctcctttcgggcttgcttcaagagcatcttccgcattcatacagaaactggcaacatctggacccatctgcttggtttcgtgctgtttctctttttgggaatcttgaccatgctcagaccaaatatgtacttcatggcccctctacaggagaaggtggtttttgggatgttctttttgggtgcagtgctctggctcagcttctcctggctctttcacaccgtctattgtcattcagagaaagtctctcggactttttccaaactggactattcagggattgctcttctaattatggggagctttgtcccctggctctattattccttctactgctccccacagccacggctcatctacctctccatcgtctgtgtcctgggcatttctgccatcattgtggcgcagtgggaccggtttgccactcctaagcaccggcagacaagagcaggcgtgttcctgggacttggcttgagtggcgtcgtgcccaccatgcactttactatcgctgagggctttgtcaaggccaccacagtgggccagatgggctggttcttcctcatggctgtgatgtacatcactggagctggcctttatgctgctcgaattcctgagcgcttctttcctggaaaatttgacatatggttccagtctcatcagattttccatgtcctggtggtggcagcagcctttgtccacttctatggagtctccaaccttcaggaattccgttacggcctagaaggcggctgtactgatgacacccttctctgagccttcccacctgcggggtggaggaggaacttcccaagtgcttttaaaaataacttctttgctgaagtgagaggaagagtctgagttgtctgtttctagaagaaacctcttagagaattcagtaccaaccaagcttcagcccactttcacacccactgggcaataaactttccatttccattctcctagctggggatggggcatggtcaaacttagccatcccctcctcagcaaggcatctaccggcccctcacagagacagtactttgaaactcatgttgagattttaccctctcctccaaccattttgggaaaattatggactgggactcttcagaaattctgtcttttcttctggaagaaaatgtccctcccttacccccatccttaactttgtatcctggcttataacaggccatccatttttgtagcacacttttcaaaaacaattatataccctggtcccatctttctagggcctggatctgcttatagagcaggaagaataaagccaccaacttttacct

SEQ ID NO: 11749 - protein, 375 aa, Homo sapiens [sequence omitted]

SEQ ID NO: 11750 - DNA, 4266 bp, Homo sapiens
  CDS (337)..(3927)
gggggctgtagggagggggaccagtggcagagggaccttaggtgatccttagaaataaaggctagtttctgttcgaccttggagtagggcgaagaggtgtagacaggtctggagaagcgaggtaaaaccctgagtaaaagcaagaagttggagaatatgagatacatctcatctctagtaaatacttaaatgacttcccctcctcccggagtcaagcacaattcggggatgcagtgacggacgtaggtgaagacactgcgagaacttacagacaaaactggtttgtggcctgtttgattcctgtcagaggtttgctgacccaagacagtatcgaaaatgcatattaagtcaattattctagagggattcaagtcctatgctcagaggaccgaagtcaatggttttgaccccctcttcaatgctatcactggcttaaatggtagtgggaaatccaacatattggactccatctgctttttgctgggcatctccaacctgtctcaggttcgggcttctaatttacaagatttagtttacaaaaatgggcaggctggtattaccaaagcctctgtgtcaatcacttttgataattctgacaaaaagcaaagtcctttaggatttgaggttcatgatgaaatcacagtaacaaggcaggtggttattggtggtagaaataaatatttaatcaatggagtcaatgccaacaacaccagagtacaggatctcttctgttctgttggccttaatgttaacaaccctcactttctcatcatgcagggccgaattacaaaagtattgaatatgaaacctccagagattttatccatgatagaagaagcagctggaaccaggatgtatgaatacaaaaaaatagctgcacagaaaactatagaaaaaaaggaggctaagctgaaagaaattaagacgatacttgaagaagagattactccaaccattcaaaaattaaaagaggaaagatcgtcctacttggagtaccaaaaagtaatgagagaaatagaacatttgagtcgtttatatattgcttatcagtttttgctggctgaagataccaaagtacgctcagctgaggaattaaaagaaatgcaagataaagttataaagcttcaggaagaattgtctgagagtgataaaaaaataaaagcacttaatcatgaaatagaagaattggaaaaaagaaaagataaggaaactggaggtatacttcgatctttagaagatgctcttgcagaggctcagcgagttaatactaaatctcaaagcgcatttgatctcaagaagaaaaatctggcatgtgaggaaagcaaacgcaaagagctggaaaaaaatatggttgaggactcaaaaactttagcagcaaaggaaaaagaggttaaaaagataacagatggactgcatgcccttcaagaagcaagtaataaagatgctgaagctctggcagctgcacagcagcacttcaatgctgtttccgctggcctgtccagtaatgaagatggagcagaagcaactcttgctggtcaaatgatggcttgtaaaaatgatataagtaaagctcagacagaagccaaacaggctcagatgaagttgaagcatgctcaacaggaattaaagaataaacaagctgaagttaagaagatggatagtggctacaggaaggatcaagaagctctagaagctgtaaaaagacttaaagaaaaacttgaagctgaaatgaaaaagctaaattatgaagaaaataaagaggaaagccttttggaaaagcgcaggcagctgtctcgtgatattggtagattgaaagaaacatatgaagctctattagccagatttcccaatcttcgatttgcatacaaggatccagagaagaactggaatagaaattgtgtgaaaggacttgtggcttctctgattagtgtgaaagacacttctgcaaccacagctttagaattagtggctggagaacgactctacaatgttgtagtagacacagaagttactggtaaaaagctactagaaaggggggaactgaaacgtcgatacactataattccactcaataaaatttcagccagatgtattgcaccagaaactctgagagttgctcagaatcttgttggccctgacaacgttcatgtggctctttccttggttgaatataaaccagaacttcagaaagcaatggagtttgtctttggaacaacatttgtttgtgacaatatggataatgccaaaaaagtggcctttgataagaggataatgactagaactgtaactctcggaggtgatgtgtttgatcctcatgggacattgagtggaggtgctcgatcccaggcagcttccattttaaccaagtttcaagaactcaaagatgttcaggatgaactgagaatcaaagagaatgagctgcgggctctagaagaggaattagcaggtcttaaaaacactgctgaaaagtatcgccaactaaaacagcagtgggagatgaaaactgaagaggcagatttattacaaaccaagctccagcaaagctcatatcacaagcaacaagaagaattagatgcccttaaaaaaaccattgaggaaagtgaggagactttgaaaaacactaaagaaatccaaagaaaagcagaagaaaaatatgaagtattggaaaataaaatgaaaaatgcagaagctgaaagagagcgagaactgaaagatgctcagaaaaaactggattgtgccaaaacaaaggcagatgcatctagcaagaagatgaaagaaaaacaacaggaagttgaagctatcactctggaactggaagagctcaagagagagcatacatcttacaaacaacagcttgaagctgtaaatgaagctatcaaatcctatgaaagtcagattgaagtaatggcagctgaggtggctaaaaataaggagtcagtaaataaagctcaagaagaggtgaccaagcaaaaagaggtgataacagcccaagacactgtaattaaagctaaatatgcagaagtggcaaaacacaaggagcaaaacaatgattctcagcttaaaattaaggaattagaccacaacatcagcaaacataaacgggaggctgaagatggtgctgcaaaggtatccaaaatgttgaaagattatgactggattaatgcagagagacacctctttggccaacccaatagtgcctatgatttcaaaactaacaaccctaaagaagctggtcagagacttcagaagttgcaagaaatgaaggagaaactaggaagaaatgtcaatatgaaagctatgaatgtattgacagaagctgaagagcgctacaatgacttgatgaagaagaagagaattgtagaaaatgacaaatccaaaattcttacaactatagaagaccttgaccagaagaaaaaccaagccctaaatattgcatggcaaaaggtgaacaaggactttgggtctattttttctactcttttgcctggtgctaatgctatgcttgcaccaccagagggtcaaactgttttggatggtctggagttcaaggttgccttaggaaatacctggaaagaaaacctaactgaacttagtggtggtcagaggtctttagtggccttgtcattaatactgtccatgcttctcttcaaacctgctccaatttatatccttgatgaggtagatgcagccttggatctttctcatacccaaaacattggacagatgctgcgtactcatttcacacattctcagttcattgtggtgtcactaaaagaaggtatgttcaacaatgcaaacgttcttttcaaaaccaagtttgtggatggtgtttctacagtagccagatttactcaatgtcaaaatggaaagatttcaaaggaagcaaaatccaaggcaaaaccacccaaaggagcacatgtggaagtttaaactacaaagttatttcttcatcttgacctgtttttttagatgtaaacttttaaggacttgagataactaatttgtttatatacaaaaattaatgttactgtgttacttaacccatgttttctctttatataatcacttatcgcttacaaatgagcatatattcctcatctcttaactagtctaattatggtccaattattgtggttgtgattttatgcatatcatcaaatgtttttttcttatgcgggtcttttatatattagggatcctgagatacccgattctatatgtaaaagctaatatacaaaaaagcagattaaattacatgataaatgt

SEQ ID NO: 11751 - protein, 1197 aa, Homo sapiens [sequence omitted]

SEQ ID NO: 11752 - DNA, 2954 bp, Homo sapiens
  CDS (283)..(2670)
aggtctggacctgaaccgagacaaggaggtaccacactattcactgctgcgtcgcagagcgggctgggcggctgtctggacctcgagaggcctgaggcaaggatcgcgtcagaccccgaaagctggtttgttgattagtgatctaagaccgccggaagcgcttcttctcaatcaagctatgcaacaggaagtcattacgatcccgttgtaacctctaaatatgtccccgttctgcacagcatcccgataaccgttttgtttttctcatattatgaccttctcatgttagcaccacttcgcaacgctccaggtcgtgaaggagcaacttcaccatcgccgcctacagacgccactgggagcttgggagagtgggacgtggacaggaacgtaaagaccgaagggtgggtttcgaaggagcggatttcgaagttgcaccggttgaggatggctgacattctctctcagtcagagaccctggcgtcgcaagacctcagtggggacttcaagaagccagctctgccggtgtccccagcggcgcggagtaaggccccggccagcagttcttcaaaccctgaggaggtacagaaggaagggcccactgcgttgcaggactccaattctggggagcccgacatccctcctcctcagccggactgcggtgattttaggagtctacaggaggagcagtcgcgccccacgacagcggtttcttcccctggcggtccagcccgggctcccccctaccaagagcctccatggggtggccctgccacagccccctacagcttagagaccctgaagggcggcactatccttggcacccgtagcttgaaagggacgagttactgccttttcgggaggctgtctggctgcgacgtgtgcctggagcacccttcggtgtctcggtaccacgcagtgctgcagcacagggcgtccggccctgacggagaatgcgacagcaacgggccgggcttctacctctacgatctgggaagcacccatggcacttttctcaacaaaactcgcatcccacctcgcacctactgtcgagtccacgttgggcatgttgttcgctttggaggcagcacccggctctttatcctgcagggaccagaggaagaccgagaggcagaatccgagttaacagtaacacagttgaaggaattgcgcaagcagcagcaaatattgttggagaagaagatgctaagagaagactcagatgaagaagaggaaatggatacctctgaaaggaagataaatgctggtagccaagatgatgagatgggttgcacctggggaatgggagaagatgcagtagaggatgatgctgaagagaaccctattgtcttagagtttcagcaggaaagggaggccttttatataaaggatcccaaaaaggttctccaaggcttttttgaccgagaaggagaagaattagaatatgaatttgatgaacagggacatagcacttggctctgcagggtgagattacctgtggacgattcaactggaaaacaactggtggctgaggccattcactcaggaaagaaaaaagaagcaatgatccagtgctcattggaagcttgtcggattcttgacactttgggattgcttcggcaggaagcagtatctcggaaaaggaaagccaagaactgggaagatgaagacttttatgatagtgatgatgacacatttcttgataggactggcctgattgagaagaagcgtctgaacagaatgaagaaggctggcaagattgatgagaagccagagacctttgaatcattggttgcaaaattaaatgatgctgaaagggaactttctgaaatttctgagagattgaaagcctcaagccaagttctatcagagtctccatctcaggattctttagatgcgttcatgtcagaaatgaaatcaggcagtacattagatggtgtgtcccggaagaaacttcacctgagaacttttgaactgaggaaagaacaacagagacttaaagggttaataaaaattgtaaagccagcagagattccagaactaaaaaagactgaaactcagactacaggtgcagaaaacaaagctaaaaagcttacattgcctctatttggtgccatgaaaggaggaagcaaattcaaattaaaaactggaacagtagggaagttaccccccaagcgtccagaactccctccaactctaatgagaatgaaagatgagcctgaagtagaagaggaggaggaagaggaagaggaagaagagaaagaaaaggaggagcatgaaaagaaaaaactggaggatggaagcctcagtaggccacagccagagatagagccagaagcagcagtgcaggaaatgaggcctcccacagatctcacacattttaaagaaacccaaacccatgaaaacatgtctcaacttagcgaggaagaacagaataaagattatcaagactgtagcaaaaccacttcattgtgcgcaggaccctcagcatcaaagaatgaatatgagaaaagcagaggtgaattgaagaaaaagaaaacacctggtccaggcaaacttccaccaacactttcttccaaatatcctgaagatgacccagactactgtgtgtgggtcccacctgaaggtcaaagtggagatggcagaacccatcttaatgacaagtatggctattgattgcttcagaatcccaaaagaaaaccttgtggaccatgtgacatggaatatttgggataatgtatcaaattgaatggccagagaagtttagatgattatttgtaagatctggtgactggcttttcgttctgtgttcttggcttcctaaatttatctgcccacatgattctcatgcatttgatatttatgtttaaaagtgtttatatatgtatgtaaaaagggaaccatatgttttgagaatttgtaaagtgagagacatgatcctattaaaataagaaggc

SEQ ID NO: 11753 - protein, 796 aa, Homo sapiens
MLAPLRNAPGREGATSPSPPTDATGSLGEWDVDRNVKTEGWVSKERISKLHRLRMADILSQSETLASQDLSGDFKKPALPVSPAARSKAPASSSSNPEEVQKEGPTALQDSNSGEPDIPPPQPDCGDFRSLQEEQSRPTTAVSSPGGPARAPPYQEPPWGGPATAPYSLETLKGGTILGTRSLKGTSYCLFGRLSGCDVCLEHPSVSRYHAVLQHRASGPDGECDSNGPGFYLYDLGSTHGTFLNKTRIPPRTYCRVHVGHVVRFGGSTRLFILQGPEEDREAESELTVTQLKELRKQQQILLEKKMLREDSDEEEEMDTSERKINAGSQDDEMGCTWGMGEDAVEDDAEENPIVLEFQQEREAFYIKDPKKVLQGFFDREGEELEYEFDEQGHSTWLCRVRLPVDDSTGKQLVAEAIHSGKKKEAMIQCSLEACRILDTLGLLRQEAVSRKRKAKNWEDEDFYDSDDDTFLDRTGLIEKKRLNRMKKAGKIDEKPETFESLVAKLNDAERELSEISERLKASSQVLSESPSQDSLDAFMSEMKSGSTLDGVSRKKLHLRTFELRKEQQRLKGLIKIVKPAEIPELKKTETQTTGAENKAKKLTLPLFGAMKGGSKFKLKTGTVGKLPPKRPELPPTLMRMKDEPEVEEEEEEEEEEEKEKEEHEKKKLEDGSLSRPQPEIEPEAAVQEMRPPTDLTHFKETQTHENMSQLSEEEQNKDYQDCSKTTSLCAGPSASKNEYEKSRGELKKKKTPGPGKLPPTLSSKYPEDDPDYCVWVPPEGQSGDGRTHLNDKYGY

SEQ ID NO: 11754 - DNA, 2856 bp, Homo sapiens
  CDS (143)..(961)
taagtcagctgcagacttgattagcctgcctaccactgtagagggacttcagaagagtgtagcttccattggcaatactttaaacagcgtccatcttgctgtggaagcactacagaaaactgtggatgaacacaagaaaacgatggaattactgcagagtgatatgaatcagcacttcttgaaggagactcctggaagcaaccagatcattccgtcaccttcagccacatcagaacttgacaataaaacccacagtgagaatttgaaacaggatatcctgtaccttcacaactctttagaggaggtaaacagtgccctagtggggtaccagagacagaatgatcttaaactcgagggaatgaacgagacagtcagtaatcttacccagagagtcaacctgatagaaagcgatgtggttgctatgagcaaggtagaaaagaaagcaaacctgcccttcagcatgatgggtgatagatctgccactctgaaaagacagtctttggatcaagtcaccaacagaacagatacagtaaaaatccaaagcataaagaaagaagatagttcaaattctcaggtatccaagctaagagagaaactccagctgatcagtgctcttacaaacaaacctgagagcaacaggcctccagagaccgccgatgaagagcaagtagagagtttcacatcaaagccatcagcattgccaaaattttcacagtttcttggagacccagttgagaaagctgcccaactaagacctatctccctaccaggagtttctagcactgaagatcttcaggatttattccgcaagactggccaggacgtggatgggaagctgacctaccaggaaatctggacctccctaggttctgctatgccagaaccagagagcttgagagcatttgattccgatggagatggaagatactcattcctggagctaagggtagctttaggtatctagcttcatcaggcatattttagaaatggactgcctaatatctatttacctaacaacaaaacaacccttacttacccatcagtcctctagtcctccaaactactgtagcagatactttgccaccttttaacttgtttgaagaagctatataaaagttatttttttaaagaagaagaccattttacttatgatgttcagaaatctatgatttcctacaaccagtaagatcttacattttaaaattgccagaaaaaaaattaaagccctctttttttctctttcctttttttgaggggaggagaccttatcttttaaagctgggaaatgtatatagagagagaataagccacttttatatttcacttaaatttgccttaaattagctgcactttatagagactcagaaaatgtcttttctttaaaagataggccttttctgtttgtaaatatttaaatgaaagaaagcattgtgcatattgtgtggaaagtaggaagaatggttttgaacaggatatgaacaaatgacttattaaaaattgctgatctggtgtaggtggcagctgaaactacatccatgtctccataaggcatccctcaaaggcccaggcgctgccagggggtttgtcctggtagctggaggaaccgatttcagggaatagacactggagacaatactgactccaggcatggctcatggaagtaggattctggttctttgttcctattccctcagctaatcccaacctgggaatcagagaagtcttggggatttttctcatttttagtactatttcagggtttatgagcataaaaagttatccattggggagctccattttccctgctgagtgagctagattgccttccccacccacccacttaagtctgtcttaaagccgtagctggctcccaccaccagtaccatctccatttgaatggcagggctaaattcccccagccattatctcacactgaccacccagagctttagaagagagctgtgcttctaattttgacccagaaaaccataccccttgagattttacctagaggctaaccaagagcctaatatgtttctctgggggatgactaaagccaaaaaggctgtgagatgaaacatgtgaaataatattcagtttccttaccattaccagctcagaagtagctagaggctttctacccaaaggatgccaaagtatagcagggcaggcctggagctagggccttcacatggtggtagcaagtttttcaaatctaatacaatcaagtacaatacttcctttaaatgcttctgtggacctggcatgaaagatccctagattgaaaggaataatacctccatgtctcctgtatgttgagtctagaattgctgtgttgttcttagaagcagtctttgggcaacaacttgaaaggggaaaaaaaaactacaaaaacttaactttggtataggccaagtcagggagaaagtagagaaagctgtcatgccacagacttctttagtggagatcatttcctttttaactttgttcaggtagcccttcaccatggatacagtccggtacccttaaacatttaagggctgtttttttttttctttatatgatgttcagcttggtattaaccaaacttaaattttttttccagaagtattaaaatttagttaaagcaagatgaagtcttttcccatgaatgtgtccccttatctcattatagcttatgctcagtttcactttcttggaaaggttaaaacaaattagcctggcactttaggtaacttgaaaataactctcacccttctgactgccttccatccactctcaccccacacctttttttaatatatatacacccttacagattttctaacaaccaaataaaattctagcaataaattg

SEQ ID NO: 11755 - protein, 273 aa, Homo sapiens [sequence omitted]

SEQ ID NO: 11756 - DNA, 2737 bp, Homo sapiens
  CDS (40)..(603)
gctgtacggtgcgcgtgacggctgcgtgcggcgggaaccatggctgctcgcagagctctgcacttcgtattcaaagtgggaaaccgcttccagacggcgcgtttctatcgggacgtcctggggatgaaggttctgcggcatgaggaatttgaagaaggctgcaaagctgcctgtaatgggccttatgatgggaaatggagtaaaacaatggtgggatttgggcctgaggatgatcattttgtcgcagaactgacttacaattatggcgtcggagactacaagcttggcaatgactttatgggaatcacgctcgcttctagccaggctgtcagcaacgccaggaagctggagtggccactgacggaagttgcagaaggtgtttttgaaaccgaggccccgggaggatataagttctatttgcagaatcgcagtctgcctcagtcagatcctgtattaaaagtaactctagcagtgtctgatcttcaaaagtccttgaactactggtgtaatctactgggaatgaaaatttatgaaaaagatgaagaaaagcaaagggctttgctgggctatgccgataaccaggtgagcaatcttggagaagaataacctgttactttgaatttggcttgtaaacgaagcttataaatggcttataacctttataaatgaagttaacatgaaggttgttcccatagtttcttcacagtgattcaatatttatatagataaacagaagaaaataagtgataaccttaccacccagatattaccttgtttatatttggggatatatctcttcagaagtggaattgcttaatccaagagattgaatggatttaatgcaagatctttttcatcttctttttctaataacccagcgtttgagcacgatttagtccttgcactttgaccctgcaattctactcctaggaattattttacagatgtgctcaacatacatcggcacaaagaagtgtgtgcaaggttatctgctgcagcattgtctgtaatcacaatgtgtaagaatctcagtgtcctatagattagagacatatttcagtaatttacggctcattcatggaatggattactatgtcgctagcaaaaagattgaggcaaatctttatgtattgacatggtaacattaagtggagaaaaacaaggaacagaataatttgtaaattataccaccatttgtgtaaaaaaaaaaacatagatgcgtgcagtgcttctagaaggatacacaggaaactgtggactagttgtctctggggtgagagtaggatagagactcagtttttactttattcctttagtatataatatttgaatttttctaccacatacgtgtaatgaatgtataacctgttccaaaaaataaccccctttcctatttcagtgtaagctggagctacagggcgtcaagggtggggtggaccatgcagcagcttttggaagaattgccttctcttgcccccagaaagaggtaacgcttgataccagatcgtttgagctttctgactagctagttcaacccagctaagaactttgtccttcccttcttgaggtcctttttgattgtggctttagtatcaagttcagcagttgtttcaagagcagctgagataataaattcaaacaaatggcgccttggttctttatggtatctgatactcctctaggactgacgagggccgtgtcctgagtagtgtgtgacccctggctcacgttgcctctgttttcctcaagttgccagacttagaagacttgatgaaaagggagaaccagaagattctgactcccctggtgagcctggacaccccagggaaagcaacagtacaggtggtcattctggccgaccctgacggtcatgaaatttgctttgtcggggatgaagcatttcgagaactttctaagatggatccagagggaagcaaattgttggatgatgcaatggcagcagataaaagtgacgagtggtttgccaaacacaataaacccaaagcttcaggttaacggaagacatgatgcagagcaagcctctgtgattcctgcccagcacctgtgaggcctgacgtgtcagttcccaataaatgctcttctgatttgtttcccgtacaggcaaggaggcttgggtagtgcagatttgtgtatttcaatctttgaaagctctgatgtaatttagaaatgaaatccaatcatgagtccaggtagagaacgcctgctgtaatctacactgttgctgggactgcgcattctgtatataactgtgttggatgagtgacagatgattgtccagactaggacagcggcatgaacatgactttggttgggattgcggatagttagggttacctctgaatcgtgtagcttttatgagagcagctgtgcaagtgaatccacattaatgccttgtcgtggtgccattcccagcgcctgacgatacgctcttctattgtcttattctggcaggttttgacgttttaaattttttaaagaaattttattccttggaccaaaaggtttggttaaccacccccctcttacttgctttcacattttgagtgtccagaggaaacagaaaggaatgagtgtgtgacgttgctgcacgcctgactctgtgcgagcttctttctgtgtatatattttgttttatttttttccgtgtatatttttaatcccgacagaacatcatgtgagatttctttaaaatggattaaacgatttcttcagcctg

SEQ ID NO: 11757 - protein, 188 aa, Homo sapiens
MAARRALHFVFKVGNRFQTARFYRDVLGMKVLRHEEFEEGCKAACNGPYDGKWSKTMVGFGPEDDHFVAELTYNYGVGDYKLGNDFMGITLASSQAVSNARKLEWPLTEVAEGVFETEAPGGYKFYLQNRSLPQSDPVLKVTLAVSDLQKSLNYWCNLLGMKIYEKDEEKQRALLGYADNQVSNLGEE

SEQ ID NO: 11758 - DNA, 1626 bp, Homo sapiens
caaaataatgtttataaatttatttgtctatactagtagaagtgatcagtgacatactataaataatcctaaatggttatatttgatagaattcataacacattaaagagaaaatttcacattaaaggaaggtttaaaaatctattttcagattataaaaggtgtctttactggttttcattccttttatctacatgtaattggacatgtaaacttgttaaaaatcaaaatcttactgattgtacagggagaaattaagcattctgttttaaaaattaggcttattgctagactgtaagtttaaaaacaattcatgttcaaaggagcttttcaaattacccagtccaccacagaatcagctaatgtgacagaagtaaatatagtgcgtcataattgctaaaaacagggtgaatttctttcacttaagttggaaaaccagcctctaaaaaattaggtgctggtaatgagagcttaataccatggttccctgcaggtctcagaaacattagtagttcctttcttggccctcactgtccttccagtgttggcctctggcctcttcccctcacatttatgttcattctccgggcttatattcattctctgctgctttctcccttcacccgtgggactctcacccttcttgctcattctccagcacccattcctactttagtctctttgaaatcttttttggagattttccttcagctacaaatgttccagtacaaccaatattactcctgaggggcaaagactttttcttatttatgtccctagtatctggtatggcgcctggcatatggcatttcagaatatgttcatagttgaaacagtaggatagatatttgtcatcttgacaagtagccctttgcaatttatacttgagttcactcctggtcaatggcacatggctggaaaatgcagaaagcaagttcacttacagcctgaggcttataaagcttgtacagctgcctcccggcagtccaggaaaactgcaaaaaatgggaagtaaggtcctggcaggcagacccggcatgtagccgctggccatcttgaatcctagggcatgaagttgccccaaagttcagcacttggttaagcctgatccctctggtttatcacaaagaataggatgggataaagaaagtggacacttaaataagctataaattatatggtccttgtctagcaggagacaactgcacaggtatactaccagcgtttggatattgatatatacatggcaaatctgaatattgttttatgagaggcctggcaatgggtaaaacaccaaacttgaaatcagaacataggtgcaaatggccactcctgtagtttcttttctgtaaaatgggatctggacgaatgataccaaacgtttctttctaacattgtattttataactctggcctatgattgtgttgtgtcttgcattaaaaaaaaaaatttgagagtggtagaattacttctgttatctgaaatacctgagatgcactttaaactgttgaaatgtaagctctgagggcagggaccgtatcttatttactgttagtatccgttgcatctagtgtggtgcacctggcacacagtaggcactcaataaatatgtattgattaaaaac

SEQ ID NO: 11759 - DNA, 2282 bp, Homo sapiens
  CDS (51)..(542)
gcagcggcggcccacacagcagcgagaggcgagaggaggctgcctcgaggatgaagtgcaaacccaaccagacgcggacctacgaccccgaggggttcaagaagcgggcggcgtgcctgtgcttccggagcgaacgcgaggacgaggtcctgttagtgagtagcaaccggtacccggaccgctggatcgtgccgggcgggggcatggagcccgaggaggagccgggcggtgcggcggtccgagaggtgtacgaagaagcgggagtcaaggggaagttaggccggctcctgggcgtcttcgaacagaaccaggatcgcaagcacagaacgtacgtgtatgtactgactgtcacggagctgctggaggattgggaagattcggttagcattgggaggaagcgagagtggttcaaagtcgaagatgccatcaaggttctccagtgccacaagcccgtgcacgccgaatatctggagaaactaaagctgggcggttccccaaccaatggaaactccatggccccatcctcgccagatagcgatccctaatgaacagcaaagatgttcagtattgtgctgaaagaaacattgatgtgaacccagtgatcagtggaattgtcaagtacaggtgagcacttctgtgttcccaagaagacagctcatctggtttcttcctgcatcttgggacactccttccctgtctataccactgactcttgctctggttgttgtactcttatacgtgaatagactcttaattcagcacctatagccttttgttgtgcttttttgatgtgtctgccttcattagactatgatgtctttgagagcaaagactatttttccttactctttgcatattctgcatctgagacactacttgaaatatggttggcatcactgaaggttctttgattcaattaatattttgtaatcaccgtgtggcaaaacattccccttccaatctggtgctagtagagtatatgctatctaggcaccatgtgtgtggcttttgtgtatcaggtgtttcagaaatatttcaagacggttgtaagatgtttgaggacaagaattattactcctatttctatgtcataccacacagtagctgcacagttttaagattatgccatcacctagggtaatgttttgtagaatcagtccttcgtgtaacaactctagtgtttttgtactgttgatgatttacttaaattttattcaaaaactatcacttgctataaaggtaattgtaaaaataaatacagtggacgcaaaataatgttgtgagtttttataaaaataaattttaaaatgatatataagacatttttttgcaatgcctgccctaaccacttcttacatgtcatcttaacatctctttgaggaaacactgtttcctcattttacagatttaacatactgtattatttgatgccagagccaacaggctatatcataggcagtttccaaacttaattatgccatttagtttgtctagatttcttttgcctctctcactgatccatttggctgtagttttcatcccttttccagtacacacagctagctcctcatcctacctggtttctgcatatgagaatgcagagggctgagagagggcaaaattgttgtcatttagaaaaggcatttaggaaagaggctgctattagaggggaacacaaagtgaaggtttttttaaaaaagaggacttgcatcagctgcctccagaacaattttaagaaaataacaaagatgtttagaagaaatcttacggagtttgccatgggatgtgtgatatcagcagtcttcagctccttacaaattaccaaaagtggttctaatatgctagtttgtttgattttttcttttatattataaagcaattgcatcgataaaagcttggactccattttagtgtgacactcttcctcatgataccagtgaaatgtattgattgtgtccccagttgttacataatttgaaataaaaatataacttcttgatttattgttttttaagatgtgatatggtactgtggttatgttgttttaaaaaatgattatcttttagagaagtatactgaaaaatgtacaggtgaaatgatatgttactggtattcgcttcaaaatcatctgagtgtggggtaattgagtacatagatgaaacaagattggccataaattggtaattgctgaagctgtgtgatggatgtttgagagttcattatactattctctatacttttgtatatgtttgaaattttccataataaaaattgaaaaaagt

SEQ ID NO: 11760 - protein, 164 aa, Homo sapiens
MKCKPNQTRTYDPEGFKKRAACLCFRSEREDEVLLVSSNRYPDRWIVPGGGMEPEEEPGGAAVREVYEEAGVKGKLGRLLGVFEQNQDRKHRTYVYVLTVTELLEDWEDSVSIGRKREWFKVEDAIKVLQCHKPVHAEYLEKLKLGGSPTNGNSMAPSSPDSDP

SEQ ID NO: 11761 - DNA, 2862 bp, Homo sapiens
  CDS (142)..(1593)
gctccaaaggaggaaatgaccattcagggatcttactccagcttgattacggagactgaaccttcatagggtgcgcacttaccaaggacaggaaggtttctctgtttgaagggctttaaacttataacaaagaaaataaaaatgacgacttcgtctatcagacggcagatgaaaaacatcgtgaacaattactcagaggcagaaatcaaagtccgggaagccacctccaatgacccgtggggcccgtccagttctctgatgaccgagattgccgacctgacctacaacgtggtggccttctcggagatcatgagcatggtgtggaagcggctgaatgaccatggcaagaactggcggcatgtgtacaaggcgctgaccctgctggactacctcatcaagacaggctccgaacgtgtggcccagcagtgccgggagaacatcttcgccatccagaccctgaaggacttccagtacattgaccgagatggcaaggaccagggcatcaatgtgcgtgagaagtcaaagcaactggtggctctcctcaaggacgaggaacggttgaaggctgagagggcccaggctctcaaagccaaagagcgcatggcccaggttgccactggcatgggcagcaaccagatcacctttgggcgaggctccagccagcccaacctctccaccagccactcggagcaggagtatggcaaggccgggggctccccggcctcctaccatggctcgcctgaggcctcgctgtgcccccagcaccgcacaggggccccgctgggtcagagtgaggagctgcagccactgagccagcgccaccccttcctgccgcacctggggctggcctcccgcccaaatggcgactggtcccagccctgcctcacttgtgaccgcgcagcccgagccacctccccgcgagtgtcctccgagctggagcaagcccggccccagactagtggagaagaggagcttcagctgcagctggcacttgccatgagcagagaagtggctgagcaggaagaacgcctcaggcggggtgatgacctcagattacagatggccctggaagaaagccgaagggacacagttaaaattccaaaaaagaaagagcatggctctctcccacagcagactacgctgttggatttaatggatgctctccccagctcgggccccgcggcccagaaagcagagccctggggcccgtcagcctccactaaccagaccaacccctggggcgggccagcggctcctgcgagtacttcagacccctggccatcgtttggtaccaagccagctgcctccattgacccatggggggtgcccactggagccaccgcacaatctgtccccaagaactcggacccctgggcagcttcacagcagcctgcctccagtgctgggaaaagagcttctgacgcgtggggcgcagtctccaccaccaagcccgtgtctgtctctgggtcctttgagctcttcagtaatctgaatggtacaattaaagatgacttttctgaatttgacaaccttcggacttcaaaaaaaacaggcatgcagggattaacaggacttctgtttacaatggaaatctgaaatggaagaaacatctttaaccttgtgtgtctgtgatctcctctgtcttaatccacgctcaggctaaagatggggataatgtggaaatggcagttgtcccgagggcgtggggtggggggtgcttctgtgcccacgggtccctgggcaacagtccctaggctaagacaggggtggggggctaagggaccagggctggccctgatccacctacctgctaactccagatattatttttaagttggagacctaaaaataattctcttgtattttggagatgaagaaaaaagtcattcacctgggagggatttttaacaaacatgcactaatattacctccctcttccaaactcctactgtcctcacctcacccaccactgtaaaagtattacgtcgtgcattaaagaccagaaaagacttgcttttacccagggaggggacattcccccaatcctgtgtctgggcagcttgcctggtggatgtttctggccctttttccaccatgggaatttctcacctctagctctaagggcagctgaccacctgccagcccctctctggttccagaagattacccttcgcaccggcacaggagagatcttaaatggtctctgggctgctgggacatgcaggctctgagtggggactgcacccactcatgctgttcctgaggctgccctctccagtcccaggagccgtgtctagagttcctgaccagccaccttctgccagaactgcaggcctgcggctgggtcttaggctcccgctgccatttgggtaagccggtggctggtctcgtctgccgggggaagggtggggaggtgcaatgggatgggaggcaggatgcttgcccagaaaggtgctttccttcagacggtgcagggcctgggccagccttacaggtcagtagactagactcgactacttggggtcagtgattcttttgtaacgagtctttcatgatgtgactttgaggccccgacatgacagccactgggccaccgggacccaagaagacagccccctgccccatcttctggcacaggccatcccgagtgcatgtccctgttgcccactgcactgatcatgaagccaccggccactgccacgcatgttgcacctgtgccatcgtgctccctcctgatgggcaccgtggtggaggaaatcacccagctgtttctcagtcccagaggccggtggctggttttgaacttgtgttgaccgttgatacttatttactgtataaatataatttatcatttgtaccatg

SEQ ID NO: 11762 - protein, 484 aa, Homo sapiens [sequence omitted]

SEQ ID NO: 11763 - DNA, 2593 bp, Homo sapiens
  CDS (167)..(2284)
gtgctaggagatgatcggggaaagcatagtcccctgtctgtggcaccagacactcccgactgtgcgctgactctccccgcccagccagcagccttttccagagaggctgtggtccatagcctctgttcgttttcactgcaggaccaggcacgaaagttaaaacaaaatgaagattttttctgaatctcataaaacagtgtttgttgtggatcactgcccttatatggcagaatcttgcaggcagcatgtcgagtttgatatgctggtgaagaatagaacccaaggaatcattcctttggcccccatatctaaatcattgtggacttgctcagtagaatcttccatggaatattgtagaataatgtatgatatatttcctttcaaaaagctggtgaattttattgtgagtgactctggagcacatgttttaaattcttggactcaagaagaccaaaatttacaggagctaatggcagcattagccgctgttgggcctcctaatcctcgggcagatccagagtgctgcagtattctgcatggccttgttgcagcagtggaaactctctgcaagattactgaataccaacatgaggctcgtactctactcatggagaatgcagaacgtgttggaaatagaggacgaataatctgtattactaatgcaaaaagtgatagtcatgtgcgaatgcttgaagactgtgtccaggaaacgattcatgaacataacaagcttgctgcaaattcagatcatctcatgcagattcaaaaatgtgagttggtcttgatccacacctacccagttggtgaagacagccttgtatctgatcgttctaaaaaagagttgtccccggttttaaccagtgaagttcatagtgttcgtgcaggacggcatcttgctaccaaattgaatattttagtacagcaacattttgacttggcttcaactactattacaaatattccaatgaaggaagaacagcatgctaacacatctgccaattatgatgtggagctacttcatcacaaagatgcacatgtagatttcctgaaaagtggtgattcgcatctaggtggcggcagtcgagaaggctcgtttaaagaaacaataacattaaagtggtgtacaccaaggacaaataacattgaattacactattgtactggagcttatcggatttcacctgtagatgtaaatagtagaccttcctcctgccttactaattttcttctaaatggtcgttctgttttattggaacaaccacgaaagtcaggttctaaagtcattagtcatatgcttagtagccatggaggagagatttttttgcacgtccttagcagttctcgatccattctagaagatccaccttcaattagtgaaggatgtggaggaagagttacagactaccggattacagattttggtgaatttatgagggaaaacagattaactccttttctagaccccagatataaaatcgatggaagtcttgaggtccctttggaacgagcaaaagatcagttagaaagacataccccttactggcctatgatcatttcacaaaccaccatttttaacatgcaagcggtagttccattagccagtgttattgtgaaagaatctctgacagaagaagatgtgttaaactgtcaaaaaacaatatacaacttagttgatatggaaagaaaaaatgatcctctacctatttccacagttggtacaagaggaaagggccctaaaagagatgaacaataccgtatcatgtggaatgaattagaaacccttgtcagggcccatatcaacaactcagagaaacatcaaagagtcttggaatgtctgatggcatgcaggagcaaacccccagaagaggaagaacgaaagaaacgaggaagaaagagggaagacaaagaggacaagtcagagaaagcagtgaaagattatgaacaggaaaagtcttggcaagactcagagagattaaaaggaatcttagagcgtggaaaagaagaattggctgaagctgagattataaaagattcgcctgattccccagaacctccaaacaaaaaaccccttgttgaaatggatgaaactccacaagtggaaaaatcaaaagggccagtgtcgttattatccttgtggagtaatagaatcaatactgccaattccagaaaacatcaggaatttgctggacgtttgaactctgttaataacagagctgaactatatcaacatcttaaagaggaaaatgggatggagacaacagaaaatggaaaagccagccggcagtgaagagtgacttgaagaactaaatttagcatattgcaaaaatattttgtgcggaattcgatataagtacttttacagcaagatggtatagttatgttgcctggactggtttttacatttttaaaatatttcagctgtcatttttgtactaattataaaattggcacataattcaaaaatatacatttgagatgatttgtcctcccaaattatacaagtttattttatggtataaagtgttctctctggaaatgtttttaaaaaaattcttaggcttctctttgcgaaataaaactattaaaatatttg

SEQ ID NO: 11764 - protein, 706 aa, Homo sapiens [sequence omitted]

SEQ ID NO: 11765 - DNA, 2375 bp, Homo sapiens
  CDS (68)..(2185)
actacctcgctgggaccctggtcttgctgtcccccgctggcctcctgcccaagcgactgcggccaggatgggccggaaggtgaccgtggccacctgcgcactcaaccagtgggccctggacttcgagggcaatttgcaaagaattttaaagagtattgaaattgccaaaaacagaggagcaagatacaggcttggaccagagctggaaatatgcggctacggatgttgggatcattattacgagtcggacaccctcttgcactcgtttcaagtcctagcggcccttctggagtctcccgtcactcaggacatcatctgcgacgtggggatgcctgtaatgcaccgaaacgtccgctacaactgcagagtgatattcctcaacaggaagatcctgctcatcagacccaagatggccttggccaatgaaggcaactaccgcgagctgcgctggttcaccccgtggtcgaggagtcggcacacagaggagtactttctgcctcggatgatacaggacctgacaaagcaggaaaccgtacccttcggagatgcggtgctggtgacatgggacacctgcattggaagtgagatctgtgaggagctctggacaccccacagcccgcacatcgacatgggcctggatggcgtggagatcatcaccaacgcctcgggcagccaccacgtgctgcgcaaagccaacaccagggtggatctcgtgactatggtcaccagcaagaacggtgggatttacttgctggccaaccagaagggttgcgacggggaccgcctgtactacgacggctgtgccatgatcgccatgaacggaagcgtctttgctcaaggatcccagttttctctggatgacgtggaagtcctgacggccacgctggatctggaggacgtccggagctacagggcggagatttcatctcgaaacctggcggccagcagggcgagcccctaccccagagtgaaggtggactttgccctctcgtgccacgaggacttgctggcacccatctctgagcccatcgagtggaaataccacagccctgaggaggagataagccttggacctgcctgctggctctgggattttttaagacgaagtcaacaggcagggtttttgctgcccttgagtggcggggtggacagcgcagccaccgcctgcctcatctactccatgtgctgccaggtctgcgaggccgtgaggagtggaaatgaggaagtgctggctgatgtccgcaccatcgtgaaccagatcagctacaccccccaggatccccgagacctctgtggacgcatactgaccacctgctacatggccagcaagaactcctcccaggagacgtgcacccgggccagagagttggcccagcagattggaagccaccacatcagtctcaacatcgatccagccgtgaaggccgtcatgggcatcttcagcctggtgacggggaagagccctctgtttgcagctcatggaggaagcagcagggaaaacctggcgctgcaaaatgtgcaggctcgaatacggatggtcctcgcctatctgtttgctcagttgagcctctggtctcggggtgtccacggtgggctcctcgtgctgggatccgccaacgtggatgagagtctcctgggctacctgaccaagtacgactgctccagtgcggacatcaaccccataggcgggatcagcaagacggacctcagggccttcgtccagttctgcatccagcgcttccagcttcctgccctgcagagcatcctgttggcgccggccaccgcagagctggagcccttggctgatggacaggtgtcccagaccgacgaggaagatatggggatgacatatgcggagctctcggtctatgggaaactcaggaaggtggccaagatggggccctacagcatgttctgcaaactcctcggcatgtggagacacatctgcaccccgagacaggtcgctgacaaagtgaagcggtttttctccaagtactccatgaacagacacaagatgaccacgctcacacccgcgtaccacgccgagaactacagccctgaggacaacaggtttgatctgcgaccatttctgtacaacacaagctggccttggcagtttcggtgcatagaaaatcaggtgctacagctcgagagggcagagccacagtccctggacggcgtggactgaggccggttccttcctggaggcctcctgtcctcggggaccccagcacctcatcatcagcattgctggagccaagggtaggagccctacactaggagcccaggatgggatggcgcatcagccgagagggagggaacttttcagtcaaattcctcaaaaagaggctggaataaagcctgggcttaaaaag

SEQ ID NO: 11766 - protein, 706 aa, Homo sapiens
MGRKVTVATCALNQWALDFEGNLQRILKSIEIAKNRGARYRLGPELEICGYGCWDHYYESDTLLHSFQVLAALLESPVTQDIICDVGMPVMHRNVRYNCRVIFLNRKILLIRPKMALANEGNYRELRWFTPWSRSRHTEEYFLPRMIQDLTKQETVPFGDAVLVTWDTCIGSEICEELWTPHSPHIDMGLDGVEIITNASGSHHVLRKANTRVDLVTMVTSKNGGIYLLANQKGCDGDRLYYDGCAMIAMNGSVFAQGSQFSLDDVEVLTATLDLEDVRSYRAEISSRNLAASRASPYPRVKVDFALSCHEDLLAPISEPIEWKYHSPEEEISLGPACWLWDFLRRSQQAGFLLPLSGGVDSAATACLIYSMCCQVCEAVRSGNEEVLADVRTIVNQISYTPQDPRDLCGRILTTCYMASKNSSQETCTRARELAQQIGSHHISLNIDPAVKAVMGIFSLVTGKSPLFAAHGGSSRENLALQNVQARIRMVLAYLFAQLSLWSRGVHGGLLVLGSANVDESLLGYLTKYDCSSADINPIGGISKTDLRAFVQFCIQRFQLPALQSILLAPATAELEPLADGQVSQTDEEDMGMTYAELSVYGKLRKVAKMGPYSMFCKLLGMWRHICTPRQVADKVKRFFSKYSMNRHKMTTLTPAYHAENYSPEDNRFDLRPFLYNTSWPWQFRCIENQVLQLERAEPQSLDGVD

SEQ ID NO: 11767 - DNA, 2671 bp, Homo sapiens
aacccatggccaattctgccctatccccattctctacccctttccatatttttcttctcccatattattttgaagcaaatcccaggcatcacataagatcaaaattttaacatgtttttacctctacttcaggttattgttgaaatgacctgaaattttaaggaagtagctgaaaatagcattaagattggaaagaaaggcagacagattatgagaggcctataatgccagccttgtggaggagccccagagttgtttcagtagacagacaaaatctggtctgtgctttagcaactttgtttcatgaatgaataattaacctagtgagagagagagtttcagaaagttgtaatgaaaggaatggtaatgtgaaagaggccctgaagcagcagaatttttatcactggatgattaattaaatgaggggatgagggaggctttgctaacctgaatttcaagcctgaatgaggttgatgatgacattaactaagacagcagacatggaaaagtaatgtgtggaacttagggttcttggattccaaagcagttgaaagggactttgtctagcttaagcaagaaggaaatttattaaaatattagtagggagaggagggacccctaggttgaaagggaagactgaagagccaggctaagaagtgtcagagtggcagtcagccagccggggcattgctgctagagtgagcgaatgccagctatctttagtgtttaggttgtattgcttatcatccattctctagggaggaagcattggatctccttcctcctatcccttcatttttactcttttgattagaggcaaacagggactttattaatgctctcttcaaactatattgaggggaaaaggtaattctgcagaaggaaatcaggttgctattgccgaaacaaagtagaatgttcagccaaagagtaacagttgtccactgtgtaacaaacctggctctgtacatgttgcatgtgtgttatctataaggcatgcaagtagaaatgtatagcagatagttggaaatgtggttctgaagtataagaagatagatttatatagtatactggattgattttccaagagtgactggattcttcttccctagagattttaagaaaaaaaaaaataaccctttatcttggttttgactgagtggtttaaagaaagtcagctctaaatccataacttactattggattgacttttgaagagcctttcctgtgctatggattcttaattcattttgaagatccaacagcagccgtgtagaccaccatcaagaaatgaacataaaagtcttttgattgaagccttaagatttttgcactggctcttctttctgcctgcaaccactagtctgctttatgtctctaagaatttgcctttactggacatttcatataaatggaatcatatggtatgtggccttttgtgactgacttcttttactcagcttaatgttatcaagggtcatccatgctaaagcatgtgtcagtacttcatttctttttattgctggataacatttcattgtatagatttgccacatcttatttattcattcatcaggtgatgggcatttgggtttgcactttttagctatttgaataatactgctgtgaccatttgtgtagaaatttttgtgtggacatttctcttgggtacatggaagtggaatttctgggttatatggtaactgtgtttaactgccgaggaactgccaaacttttccaaaatgactgccccattttacattcccaccagcagtctatgagtattctaatttcttcacatcctcagcaacacttgttattgtctctccttttgagtttagccatcctagtgagtatgaaggaatatcttgtttttattttcatttcattttcctactaatgatgttgaacattctttcatgcgctttttggttcatttgtttctttgttggggaaatgtctatcaagtcctttgcccatttttaagttggataattgtctttttattgttgagttacaagagttcttaatagtctagatgcgagttccttgtcagatatataatttgcaaatattctctcattctgtgggttgtcttttaactttcttaatggtatcttttgaaatgtaaaacttaaattttgatgaagtccagtttatctattttttgtcacttgtgcagccatatctaagaaatcattgccttacccaaggtcacaaagatttactactgtctttagtaaagacagttttctgttactaaacagaataccacagactgggtaatttctaaagaaatttacttagctcatggttccggaggctgagaagtctaagaacatggtgcctggcatttggttagggccttcttgctgtgtcataatatggcagagggcatcacatggtgagagggcaagcaagaacaaacccactcccatgatagtgacattaatccatgtatgagggcaaagcttttattaattaatctgttcatgaaggcagagggactaagtttccaacatgtgattttttaagggatacattcaaactatagcaacccctatgttttcttctaatagtcttatagttgtagcattacataggtctgtgatctgttttgaactatttttattttattttataattattatttttttgagactccgcctcc

SEQ ID NO: 11768 - DNA, 6161 bp, Homo sapiens
  CDS (197)..(2818)
gtgctcgcttcggcagcacatatactaaaattggaacgatacagagaagattagcatggcccctgcgcaaggatgacacgcaaattcgtgaagcgttccatattttttccccaaccaggatttgaacagagacgtgaatgtctaaccttttgattctattccttttattccagcgagtcccaccactgtcacccagatgagcttgtccaacccgaccatgctgaggactcacagcctctccaatgctgatgggcagtatgatccatacactgacagccgcttccggaatagctccatgtccctggatgagaagagcagaaccatgagccgttcaggctcattccgggatgggtttgaagaagttcatggatcctcactctccttggtttccagcacatcgtcagtttattctacaccagaagaaaaatgccagtcagagattcgcaagctgcggcgggaactggatgcctcccaggagaaagtttcagctttgaccacccagctgacagcaaatgctcaccttgtggctgcctttgaacagagtcttggtaacatgacaatcaggctccagagtctgaccatgacagctgagcagaaggattcagaactgaatgagttaagaaaaaccattgagctgctaaagaaacagaacgcagctgcccaggctgccattaatggagtaattaacacacctgagctcaactgcaaaggaaacggcactgcccagtctgcagacctccgcatccgcaggcagcactcctcagacagcgtctccagcatcaacagtgccaccagccactccagtgtgggcagcaacatagagagtgactcaaagaagaagaagaggaagaactggttacgcagctccttcaagcaagctttcgggaagaagaagtccccaaaatctgcgtcctctcattcagatattgaggagatgacggattcttctttgccttcctcaccaaagttaccacacaatgggtccacaggttccaccccactgctgaggaattctcactccaactctctaatttcagaatgcatggatagtgaagctgagaccgtcatgcagctccgaaatgagttaagagacaaggagatgaagctgacagatatccgcttagaagctctcagttctgcccaccagctggaccagctccgggaggccatgaacaggatgcagagtgaaatagagaagctgaaagctgagaatgatcggctgaagtcagagtctcaaggcagtggctgcagccgggctccttcccaagtgtccatctctgcctccccgaggcagtccatgggcctctcccagcacagcttgaacctcactgagtcaaccagcctggacatgttgctggatgacactggtgaatgctcggctcggaaggaaggaggcaggcatgttaagatagttgtcagctttcaggaggaaatgaagtggaaggaggattccagaccacatctctttcttattggctgcattggagttagtggcaagacgaagtgggatgcgctcgatggggtggttagacggctgttcaaagaatacatcattcatgtcgacccagtgagtcagctagggctgaattcagacagcgttcttggctacagcattggagaaatcaagcgcagcaacacttccgaaacaccggagctgcttccttgtggctatctggttggagagaacacgaccatctcagtgactgtgaaagggctcgcagaaaacagcctggactcactggtgtttgagtccttgattcccaagcccatcctgcagcgctacgtctccctcctgatagagcaccgtcggatcattctctctggccccagcggcactgggaaaacctacctggccaaccggctgtctgagtatatagtgcttcgagagggacgggagttgacagacggggttatcgccacctttaacgtggaccataagtccagcaaggaattgcgccagtacctgtccaaccttgctgaccagtgcaacagtgagaacaatgctgtggacatgcccctcgtcatcatcctggacaacctacaccacgtgagctctctgggcgagatcttcaatgggctgctcaactgcaagtaccacaaatgcccttacataattggcacaatgaaccaggctacctcttcgactcccaacctgcagcttcaccataacttcagatgggtgctttgtgccaaccacacggagcctgtgaagggtttccttggccgattcctgaggaggaagctcatggaaacagagatcagtgggcgggtgcgcaatatggagctggtaaaaatcattgactggattcccaaggtctggcatcacctcaaccgcttcctggaggctcacagttcctcggacgtcaccatcggcccccggctcttcctgtcatgccccatcgatgtggacggctcgagagtgtggttcaccgacttgtggaactattccattatcccctatctcctggaagccatcagagaaggactccagctctatggaaggcgcgccccctgggaggatcctgccaagtgggtggtggacacatatccatgggcagccagcccacaacagcacgagtggcctcccctgctgcagttacggcctgaggatgtcggcttcgacggctactccatgcctcgggagggatcgacaagcaagcagatgccccccagtgatgctgaaggtgacccgctgatgaacatgctgatgaggctgcaggaggcagccaactactccagcccccagagctatgacagcgactccaacagcaacagccatcacgatgacatcttggactcctctttggagtccactctgtgacaggggcccggagcccagcgccctcctcttctcctcaccgcattccacctgcatcccccacatcaccctgaagatgacttcctgagccagcccccagccacagccttagagctgcgggaacaccgagaccccccgtccttcagcctcgacctgggtgcaggcatcccgggccagctgcctgcggaccgcttccttccacagcgagaactgcactaccttctgttgtactttaattattgttttgccttgttgctgtgacctccctaagacactgaagatacttctcgggaaaggatcatcgccgttgaaatgaaaagagagacagagagagaaaaaaaaaagagaacccacatgaagctctgaaaccaaacagcatcctgccatgagcttcccagagacagaagagactggagcaaagtcggaaacacagagaagcacggcttcccctcagcacagaccctccagactgggtctcagagccgtgccacccaccctcccacacagccggccacagggagaactggtgctaaccagggtgcttgctttggtcacgttcaacgcactacagagctacgacacaggggaaccttaggagcaaataaaccgtgctttcatgttttttaaatggtgctttccttacccgagaggtattttgcctgttccaatcgaaccaccccattcaggtccatcagcctctgattaatatccgtgagagtgagtgacggagtgagagtgtgagcgagtggatgtggctgtcagtgcagaacagcatgtgtctctttccttctgatatatgaatgaatcaggtttttttttttttttctgcaaacactgtgtatagtgagacttgttctactttggagaacaggttaccttttgaaaatgaggttgagtttcttcctttctgatgcattgatttttgaagatttttttttcccccttcccctcttggtcagaatcaatcctttggtgaaagtaagaaccgcaggagttgagttttggtttggtcctgctcagttttggtttttagttgtccatcctcacagtcctacacactcgcctcctcctgctagggctgggggtatctgtgtcctttaaaatggatgaggacctggtcctcgacatgtgggtgagccatggaccttgccttcccttctcgtccttgagggtttagaacacacaccaacacctccagcgtccccgccccagcttccggtggggtgatgcggtcaccctgcaaaagacttgcactttcctcagaaccaacatgacgcagctcaataagggtgagggtcactccctcccagaagccccgtctggacgagccttgcctgacctcttcggtgctgaccttcccaaagtgatgccttactggttttgtactaactgtgttcattttacataagcgtcgtgcctgcctggggtttgttttttttgtcattgttttccccattgaaacaaacagggctaaaaagtcatctgttcattaggagaactcaagttgctgtgacttttctcatccaaaagactcatttgtgtggatgcgtgaccatgggaaaaagaaaaaaaaaaaagatccattttttaggttcttttcggtctccagctggcaacccaactggacaatgatctgtctggtgcaggagaaggcaaaagtttctacaagtctacatgaccttgctgatacttgttctaatagaaacccagtctgctgtgtcttcaacatactggtattttcattacaaagtatggtaaatttttgagttgtttgtttctgttttgtaaagagaatccttattggacaccagtgaaggtgtctctgttttaatgatcagggtttttattccatcttttgcatttcttctatttctgaaggtttgtctcttggcatctttttttagtttcttaccataagagtttgacccgaaactgctcacttcacattggatgacaccatgttcttcctctttgaaaagaaaaggggaatgtgtcccactagtgaaaggaaaacttttcaacactatccctgctttagtctcagcaaactcagactattctgcttagccttcatcagtcatctgggtgtgagtgtgtcttgttctgtttttctttttaataaaacttttaaaccatatatttagcctgtgaccaggggggccaaaccctaagatttctggtaaacctgaagggtggccctcctcagacaatttatctcccagcaatgaccctactacactcgcgtactgtgaatttgggaggaggtaaagttgacttctcctcgtgggcagttttccaatcaccttgtgagtagacacctgccaatattgtttgaaacctttttttaatatgacatcctctcttgtcattctcttctcccctttcccacagacttccctcctgggtccaggttcagaaccaagacttctgtacctagtgctgcctgattggtgaacattgacttcaagtagcatagcccttgtgtgactcacaactccgtgtccttcctaaagtttcgggaagcagggttgtctaatatgcacatttcttattttggtcatatttttactttagtgtcactcaccttttacaaagtgactttgtactcatttagggctctatcggaaatgcttccattttgccttttctacagttaggccaattttgaaatatataaattctatgcaacatttatgttgagttaccaatggaagccaaaagttctcttcccaaactgccaagaatgatacaggccataattgaaatgggaataccttttaagtttcattaggggtggggtgggagtgggacaggaacaagacttgcctagatctttgttgtatcttggggacttttactttgttgtttgatgcttaaacttcaaaattctctgtattcaaatttgattgtggcgaatctacttcaaaaaggaaaaataatccaactttgtggatattaaatggaaggtttgctgttttgatctagttgtttccagtggagcagttttatgaaatatgttctataagatgtacattttttcattgtaacatagaaattgtaaataattgattaaagtgctgcattttgatgaattttttctagccatttttaaagagaaaactaggaattgagtattttgtgtacggtatgtttccatcctccctccccttcctcctcccctcctctctctctcttcctacctatttaattttcatttgtcatgaggtttttggatttgccaatgatctgctggacatcatgccccatgtcatagagaataaagctgatgattgtaccagtcttaaattattcatgattcaataaaattgatgcttatttattc

SEQ ID NO: 11769 - protein, 874 aa, Homo sapiens
MSLSNPTMLRTHSLSNADGQYDPYTDSRFRNSSMSLDEKSRTMSRSGSFRDGFEEVHGSSLSLVSSTSSVYSTPEEKCQSEIRKLRRELDASQEKVSALTTQLTANAHLVAAFEQSLGNMTIRLQSLTMTAEQKDSELNELRKTIELLKKQNAAAQAAINGVINTPELNCKGNGTAQSADLRIRRQHSSDSVSSINSATSHSSVGSNIESDSKKKKRKNWLRSSFKQAFGKKKSPKSASSHSDIEEMTDSSLPSSPKLPHNGSTGSTPLLRNSHSNSLISECMDSEAETVMQLRNELRDKEMKLTDIRLEALSSAHQLDQLREAMNRMQSEIEKLKAENDRLKSESQGSGCSRAPSQVSISASPRQSMGLSQHSLNLTESTSLDMLLDDTGECSARKEGGRHVKIVVSFQEEMKWKEDSRPHLFLIGCIGVSGKTKWDALDGVVRRLFKEYIIHVDPVSQLGLNSDSVLGYSIGEIKRSNTSETPELLPCGYLVGENTTISVTVKGLAENSLDSLVFESLIPKPILQRYVSLLIEHRRIILSGPSGTGKTYLANRLSEYIVLREGRELTDGVIATFNVDHKSSKELRQYLSNLADQCNSENNAVDMPLVIILDNLHHVSSLGEIFNGLLNCKYHKCPYIIGTMNQATSSTPNLQLHHNFRWVLCANHTEPVKGFLGRFLRRKLMETEISGRVRNMELVKIIDWIPKVWHHLNRFLEAHSSSDVTIGPRLFLSCPIDVDGSRVWFTDLWNYSIIPYLLEAIREGLQLYGRRAPWEDPAKWVVDTYPWAASPQQHEWPPLLQLRPEDVGFDGYSMPREGSTSKQMPPSDAEGDPLMNMLMRLQEAANYSSPQSYDSDSNSNSHHDDILDSSLESTL

SEQ ID NO: 11770 - DNA, 993 bp, Homo sapiens
  CDS (12)..(923)
aggccggaaccatggcagtgaccaaggagctcttacagatggacctgtacgcgctgctaggcattgaggagaaggcagcggacaaagaggtaaagaaggcgtataggcagaaggccctctcctgccacccagacaaaaatccagataatcccagagcagctgaactcttccaccagctttctcaggccttggaggtgctgaccgatgctgcagccagggctgcatatgacaaggtcaggaaagccaagaagcaagcagcagagaggacccagaaacttgatgagaaaaggaagaaagtgaagcttgacctggaggcccgggagcggcaggcccaggcccaggagagtgaggaggaagaggagagccggagcaccaggacactagagcaagagatcgaacgcctgagagaagagggttcccggcagctggaggaacagcagaggctcatccgggagcagatacgccaggagcgtgaccagaggttgagaggaaaggcagaaaatactgaaggccaaggaacccccaaactaaagctaaaatggaagtgcaagaaggaggatgagtcaaaaggtggctactccaaagacgtcctcctacggcttttgcagaagtatggtgaggttctcaacctggtgctttccagtaagaagccaggcactgctgtggtggagtttgcaaccgtcaaggcagcggagctggctgtccagaatgaagttggcctggtggataaccctctgaagatttcctggttggagggacagccccaggatgccgtgggccgcagccactcaggactgtcaaagggctcagtgctgtcagagagggactacgagagcctcgtcatgatgcgcatgcgccaggcggccgagcggcaacagctgatcgcacggatgcagcaggaagaccaggaggggccgcctacgtagccccagctccagccatccacccctcagcccttttcttcaacgtcaccaataaatttttttttttttt

SEQ ID NO: 11771 - protein, 304 aa, Homo sapiens
MAVTKELLQMDLYALLGIEEKAADKEVKKAYRQKALSCHPDKNPDNPRAAELFHQLSQALEVLTDAAARAAYDKVRKAKKQAAERTQKLDEKRKKVKLDLEARERQAQAQESEEEEESRSTRTLEQEIERLREEGSRQLEEQQRLIREQIRQERDQRLRGKAENTEGQGTPKLKLKWKCKKEDESKGGYSKDVLLRLLQKYGEVLNLVLSSKKPGTAVVEFATVKAAELAVQNEVGLVDNPLKISWLEGQPQDAVGRSHSGLSKGSVLSERDYESLVMMRMRQAAERQQLIARMQQEDQEGPPT

SEQ ID NO: 11772 - DNA, 2261 bp, Homo sapiens
  CDS (139)..(1092)
gcggatggatccaacatggcggcgccgagcctgagccgagagaagagacctgggaaattaagtttcttgcggagtacggtggggattgcagctgctgagcagggattctggaaagcattgcgtacctgagcccccagcatggcgggcctaaagcggcgggcaagccaggtgtggccagaagagcatggtgagcaggaacatgggctgtacagcctgcaccgcatgtttgacatcgtgggcactcatctgacacacagagatgtgcgcgtgctttctttcctctttgttgatgtcattgatgaccacgagcgtggactcatccgaaatggacgtgacttcttattggcactggagcgccagggccgctgtgatgaaagtaactttcgccaggtgctgcagctgctgcgcatcatcactcgccacgacctgctgccctacgtcaccctcaagaggagacgggctgtgtgccctgatcttgtagacaagtatctggaggagacatcaattcgctatgtgacccccagagccctcagtgatccagaaccaaggcctccccagccctctaaaacagtgcctccccactatcctgtggtgtgttgccccacttcgggtcctcggatgtgtagcaagcggccagcccgagggagagccacacttgggagccagcgaaaacgccggaagtcagtgacaccagatcccaaggagaagcagacatgtgacatcagactgcgggttcgggctgaatactgccagcatgagactgctctgcagggcaatgtcttctctaacaagcaggacccacttgagcgccagtttgagcgctttaaccaggccaacaccatcctcaagtcccgggacctgggctccatcatctgtgacatcaagttctctgagctcacctacctcgatgcattctggcgtgactacatcaatggctctttattagaggcacttaaaggtgtcttcatcacagactccctcaagcaagctgtgggccatgaagccatcaagctgctggtaaatgtagacgaggaggactatgagctgggccgacagaaactcctgaggaacttgatgctgcaagcattgccctgacctattccctcttctcactttggggactgttcccatcacccacctctggagcttacactgttctggggtttgttctctacccttccaaccaatcacacccctgcctttttttttttttttttaaagaaaaagacaaaagaaagtggaagtggtattccccacccctccctgcacccatgtgcctgggcttcccctttatttcccttttccatttaccccgtaatgtgtctctacagctaccttaccactgagccgtaagacaaatgtataggaagaagcaaagtctacagcacatagtctttgtaagggattgatgtgaacacttttttttggatgcactaaggagttatcaatacttctggctttatgagagctcttaaattttgtctaaaaaaccaaagggctgtgagtaagggagctatgtggaaagtgggactctgaagtgtattttgaaaattaatcgccaccctcttccaaattatagaattttttaaaaacaagctgtggccctttccactctctcctggcctctggtgctgctcctctctgccgcctttcctccattccatggcttgaaacctctgcctgatgtggctccttcctttttcccatttgtcaaaccctcttcaaaggaggaacagataagactgggtcagcctagtcatgcctcccaactgtggtggtatatgtgtacacacatacacagggtggatggagaagaggttgctgattaaaatacactccccctataaaggggaagggggagtgtgacactttctttccatgttcaagtgaaaataaataatgtaccctgcagcccttttcccctttgctttcttctggcttgggcaaagggcatcataggtgtaagtgaagtaattcctttttccttccccctcctccactcctacgcccactcccatgcttgggagaatggggctgggacatgcactgagtgttgcacttttatttaggtagggaggcatgttgaatgagccaggaggtctagaactggagcttagtccagctggtacaataccaactccccttctagttcccaaaggcgatgtccagacacagactttatgattattatatttttcaatgccagtgctgctcagccctcagcagaacttcagtttccatgaaataaacaatgactatat

SEQ ID NO: 11773 - protein, 318 aa, Homo sapiens
MAGLKRRASQVWPEEHGEQEHGLYSLHRMFDIVGTHLTHRDVRVLSFLFVDVIDDHERGLIRNGRDFLLALERQGRCDESNFRQVLQLLRIITRHDLLPYVTLKRRRAVCPDLVDKYLEETSIRYVTPRALSDPEPRPPQPSKTVPPHYPVVCCPTSGPRMCSKRPARGRATLGSQRKRRKSVTPDPKEKQTCDIRLRVRAEYCQHETALQGNVFSNKQDPLERQFERFNQANTILKSRDLGSIICDIKFSELTYLDAFWRDYINGSLLEALKGVFITDSLKQAVGHEAIKLLVNVDEEDYELGRQKLLRNLMLQALP

SEQ ID NO: 11774 - DNA, 908 bp, Homo sapiens
  CDS (81)..(458)
aatcagagcgcggctgagcggccccgcagccaacccccgaggagcggccggctggcgtccgccgcgcccaggagttggggatgtcctacaaacccatcgcccctgctcccagcagcacccctggctccagcacccctgggccgggcaccccggtccctacaggaagcgtcccgtcgccgtcgggctcagtgccaggagccggcgctcctttcagaccgctgtttaacgactttggaccgccttccatgggctacgtgcaggcgatgaagccacccggcgcccagggctcccagagcacctacacggacctgctgtcagtcatagaggagatgggcaaagagatccggcctacctatgctggcagcaagagcgccatggagcgcctgaagagaggtatcatccatgcccgggccctagtcagagagtgcctggcagagacagagcggaacgcccgcacgtaacaggaagcgcctcggcctcagcgtctggacctatccggccactgcagagcacccgcttctccctggccttcatcccgagttgcactaaccatcctgggcttcctgtcctgtgtcccttggtgggtcccctccaggaaccaaggagtggccctccaggtggcagcactaaggacacccccccacaacaagagttagcagcgaggtccccatgagtcccacccatgacctgccgacagtgttgcccaccggaacttttgtggcccctaccgctcagcccttcccagcacttctcccactttgtcccgagcctccttctcccccagcaggggcacaggcctggcacctccctgccttgtgtcctgagccatagtgactcttttatctgtgtgtcttttgctaaatatgccctttttatattaataaaagatgatttggagttgtgctctc

SEQ ID NO: 11775 - protein, 126 aa, Homo sapiens
MSYKPIAPAPSSTPGSSTPGPGTPVPTGSVPSPSGSVPGAGAPFRPLFNDFGPPSMGYVQAMKPPGAQGSQSTYTDLLSVIEEMGKEIRPTYAGSKSAMERLKRGIIHARALVRECLAETERNART

SEQ ID NO: 11776 - DNA, 2635 bp, Homo sapiens
  CDS (203)..(2320)
gcgctcctgctcttaggaagcctgggaaggaccggtgtgctaggagatgatcggggaaagcatagtcccctgtctgtggcaccagacactcccgactgtgcgctgactctccccgcccagccagcagccttttccagagaggctgtggtccatagcctctgttcgttttcactgcaggaccaggcacgaaagttaaaacaaaatgaagattttttctgaatctcataaaacagtgtttgttgtggatcactgcccttatatggcagaatcttgcaggcagcatgtcgggtttgatatgctggtgaagaatagaacccaaggaatcattcctttggcccccatatctaaatcattgtggccttgctcagtagaatcttccatggaatattgtagaataatgtatgatatatttcctttcaaaaagccggtgaattttattgtgagtgactctggagcacatgttttaaattcttggactcaagaagaccaaaatttacaggagctaatggcagcattagccgctgttgggcctcctaatcctcgggcagatccagagtgctgcagtattctgcatggccttgttgcagcagtggaaactctctgcaaaattactgaataccaacatgaggctcgtactctactcatggagaatgcagaacgtgttggaaatagaggacgaataatctgtattactaatgcaaaaagtgatagtcatgtgcgaatgcttgaagactgtgtccaggaaacgattcatgaacataacaagcttgctgcaaattcagatcatctcatgcagattcaaaaatgtgagttggtcttgatccacacctacccagttggtgaagacagccttgtatctgatcgttctaaaaaagagttgtccccggttttaaccagtgaagttcatagtgttcgtgcaggacggcatcttgctaccaaattgaatattttagtacagcaacattttgacttggcttcaactactattacaaatattccaatgaaggaagaacagcatgctaacacatctgccaattatgatgtggagctacttcatcacaaagatgcacatgtagatttcctgaaaagtggtgattcgcatctaggtggcggcagtcgagaaggctcgtttaaagaaacaataacattaaagtggtgtacaccaaggacaaataacattgaattacactattgtactggagcttatcggatttcacctgtagatgtaaatagtagaccttcctcctgccttactaattttcttctaaatggtcgttctgttttattggaacaaccacgaaagtcaggttctaaagtcattagtcatatgcttagtagccatggaggagagatttttttgcacgtccttagcagttctcgatccattctagaagatccaccttcaattagtgaaggatgtggaggaagagttacagactaccggattacagattttggtgaatttatgagggaaaacagattaactccttttctagaccccagatataaaatcgatggaagtcttgaggtccctttggaacgagcaaaagatcagttagaaaaacatacccgttaccggcctatgatcatttcacaaaccaccatttttaacatgcaagcggtagttccattagccagtgttattgtgaaagaatctctgacagaagaagatgtgttaaactgtcaaaaaacaatatacaacttagttgatatggaaagaaaaaatgatcctctacctatttccacagttggtacaagaggaaagggccctaaaagagatgaacaataccgtatcatgtggaatgaattagaaacccttgtcagagcccatatcaacaactcagagaaacatcaaagagtcttggaatgtctgatggcatgcaggagcaaacccccagaagaggaagaacgaaagaaacgaggaagaaagagggaagacaaagaggacaagtcagagaaagcagtgaaagattatgaacaggaaaagtcttggcaagactcagagagattaaaaggaatcttagagcgtggaaaagaagaattggctgaagctgagattataaaagattcgcctgattccccagaacctccaaacaaaaaaccccttgttgaaatggatgaaactccacaagtggaaaaatcaaaagggccagtgtcgttattatccttgtggagtaatagaatcaatactgccaattccagaaaacatcaggaatttgctggacgtttgaactctgttaataacagagctgaactatatcaacatcttaaagaggaaaatgggatggagacaacagaaaatggaaaagccagccggcagtgaagagtgacttgaagaactaaatttagcatattgcaaaaatattttgtgcggaattcgatataagtacttttacagcaggatggtatagttatgttgcctggactggtttttacatttttaaaatatttcagctgtcatttttgtactaattataaaattggcacataattcaaaaatatacatttgagatgatttgtcctcccaaattatacaagtttattttatggtataaagtgttctctctggaaatgtttttaaaaaaattcttaggcttctctttgcgaaataaaactattgaaatatttgaaatgc

SEQ ID NO: 11777 - protein, 706 aa, Homo sapiens
MKIFSESHKTVFVVDHCPYMAESCRQHVGFDMLVKNRTQGIIPLAPISKSLWPCSVESSMEYCRIMYDIFPFKKPVNFIVSDSGAHVLNSWTQEDQNLQELMAALAAVGPPNPRADPECCSILHGLVAAVETLCKITEYQHEARTLLMENAERVGNRGRIICITNAKSDSHVRMLEDCVQETIHEHNKLAANSDHLMQIQKCELVLIHTYPVGEDSLVSDRSKKELSPVLTSEVHSVRAGRHLATKLNILVQQHFDLASTTITNIPMKEEQHANTSANYDVELLHHKDAHVDFLKSGDSHLGGGSREGSFKETITLKWCTPRTNNIELHYCTGAYRISPVDVNSRPSSCLTNFLLNGRSVLLEQPRKSGSKVISHMLSSHGGEIFLHVLSSSRSILEDPPSISEGCGGRVTDYRITDFGEFMRENRLTPFLDPRYKIDGSLEVPLERAKDQLEKHTRYRPMIISQTTIFNMQAVVPLASVIVKESLTEEDVLNCQKTIYNLVDMERKNDPLPISTVGTRGKGPKRDEQYRIMWNELETLVRAHINNSEKHQRVLECLMACRSKPPEEEERKKRGRKREDKEDKSEKAVKDYEQEKSWQDSERLKGILERGKEELAEAEIIKDSPDSPEPPNKKPLVEMDETPQVEKSKGPVSLLSLWSNRINTANSRKHQEFAGRLNSVNNRAELYQHLKEENGMETTENGKASRQ

SEQ ID NO: 11778 - DNA, 2615 bp, Homo sapiens
  CDS (484)..(837)
ccaagacagagtcttgctgtcacccaggctggagtgcagtggcatgatcttggctctctgcaatctccgcctcctggattcaagcaattctcctgcctcagcctcccaagtagctgggattacaggcacgcaccaccacatccagctaattttgtatttttagtagagatggggtttctccatgttggtcaggttggtctcaaactcctgactttgtgatctgcccgcctcggcctcccaaagtgctggaattacagatgtgagccactgggcccagcccagaacttggttttatccacctctggtgaaacatgagctcacttggtgctctctggcctctttattcccatctccttaggctgaccctgacaagcgccagggccaggcttggaccaagcagtcaactgagtcagcctgccctgggaaccaggcaggggagggagcttacggacgggctaggctcaggagagtaagagagagcagatgaagggcagaagtccgtggccgcagaggcagctgagcatgagggatggagcgtgctgctgtcctgcaggtgccgttagccctgttttgcactggtggattgatctgctcaggcgcacagggagatggcacagcaggacccgccgcccagcctcgctgagggcatgctcccgcctcacctccagaggctgttgggcggaagccgagagctgcagcagttggggccagcgtgggactggaggcccaggtgaatcttgtggggcaggggacggagctgaggctgtccggcccgggccctccccacccaaaggccctagaaccctagccttcaatcctgggggtttgcttctcccctgagtcctggctttcctgacctgccgtccgttagggacaggtggaggggccaagtcttgccatcagaggccagtgtggtggtgccagagctacggggtattccaggacccctgacctaggcacggggcaggagggcccagagccacctggccacttgtcaggagcttaggattgggaggaaagagggagcctgtatccagactaaagccaggggtctgcatgtgtcctggctggccagggccaccctcccagacctcaagccaccccacctaccactgcccacctggtgccaccccagcactgccgcagacctggcccagcagctcctgctccttagcaggggatgagcacgcccaccacacccaccctcttctccaggctgcagggcaggctccagctccccatgggggccccatcaggccagggcccctggctttactgcaggggagagggtctcttgtgcagaccccatatggctcgtgccccctagagctgagatgaggcagccggcctggctgtagctgcacggagccacctggaaagccaaaggcaagctccagctccagaccaggcattgggccagccgtgcctgttaccgtaagttctgttcatggcctcaaccaactgcccaaccatgcgggcaaatgaccaagacgccatctcttgggcccctcagaaccaatgttgcggcaaggtgggctcactgcagcaaggggcagagccaccaccacggtgccttctgctcactggggagggaggagtgtccccactggtcggggctcccccgcctgctggaacctcccaagtcctgccccctgcatttccctgtgcaaggggagaaggagcagtaggagaccctcatgcaggagggagggagccgcagtcctcaggggaagggacacagggagaggcaggggcacagaggcaggaaaggatggccagagcccagcctactttctgctgagctccttggcccggcaggtggcagcctccacggcgctcatggtggctgctcgcagcccgccctgctccagggcgtggagtccatagatggtggtgccacccggggtgcacacgtctgagcgcagctgggctgggtgttggccctcgtgcagcagcatcttggccgtccccagcagggtctgggcagcgatgcggtgggccaggctgctgggcatgcccatcttgacggctccttcagccagggcctcggagaatgcacacacgaaggccacgccactgccactgaggccagtgtggatgtcgacgtaggcttcaggcacctcctcacaccgcccacaggcctccagcagatgctgcaggaggttggtctcgctgctccccacgtggcggccccgcgccatcactatggccccttcctggaccacacagggcaggttgggcaagacccgcagcacccgtgtgttcgggggcagcagctcctccagggtgctcagagacaccccagcagccacggacaccaagatgtgttcagtggtgaccacaggagccacctctgccaggacagctggcagcacatgaggcttggtggcaaagatgacgagcaggcagctctgcagcacctcctggttggagtgcgtggtccggcaacccagagcttgaaagtgacataggttcctgtctgttggtgcactggccagtatgtgctgagcttccacttttcctgctctgatgaggccctgcgcgatggcccccgccatgcggcccgcgcccacgaagcccacgcgccgcggagacggctccgcagctgccatctt

SEQ ID NO: 11779 - protein, 118 aa, Homo sapiens
MKGRSPWPQRQLSMRDGACCCPAGAVSPVLHWWIDLLRRTGRWHSRTRRPASLRACSRLTSRGCWAEAESCSSWGQRGTGGPGESCGAGDGAEAVRPGPSPPKGPRTLAFNPGGLLLP

SEQ ID NO: 11780 - DNA, 2681 bp, Homo sapiens
  CDS (109)..(1290)
tggcagatcctgacatgcctgagctgcaccttcctgccgagtcgagggattctcaagtatctcaagttccatctgaaaaggatacgggaacagtttccaggaaccgagatggaaaaatacgctctcttcacttacgaatctcttaagaaaaccaaatgccgagagtttgtgccttcccgagatgaaatagaagctctgatccacaggcaggaaatgacatccacggtctattgccatggcggcggctcctgcaagatcaccatcaactcccacaccaccgctggggaggtggtggagaagctgatccgaggcctggccatggaggacagcaggaacatgtttgctttgtttgaatacaacggccacgtcgacaaagccattgaaagtcgaaccgtcgtagctgatgtcttagccaagtttgaaaagctggctgccacatccgaggttggggacctgccatggaaattctacttcaaactttactgcttcctggacacagacaacgtgccaaaagacagtgtggagtttgcatttatgtttgaacaggcccacgaagcggttatccatggccaccatccagccccggaagaaaacctccaggttcttgctgccctgcgactccagtatctgcagggggattatactctgcacgctgccatcccacctctcgaagaggtttattccctgcagagactcaaggcccgcatcagccagtcaaccaaaaccttcaccccttgtgaacggctggagaagaggcggacgagcttcctagaggggaccctgaggcggagcttccggacaggatccgtggtccggcagaaggtcgaggaggagcagatgctggacatgtggattaaggaagaagtctcctctgctcgagccagtatcattgacaagtggaggaaatttcagggaatgaaccaggaacaggccatggccaagtacatggccttgatcaaggagtggcctggctatggctcgacgctgtttgatgtggagtgcaaggaaggtggcttccctcaggaactctggttgggtgtcagcgcggacgccgtctccgtctacaagcgtggagagggaagaccactggaagtcttccagtatgaacacatcctctcttttggggcacccctggcgaatacgtataagatcgtggtcgatgagagggagctgctctttgaaaccagtgaggtggtggatgtggccaagctcatgaaagcctacatcagcatgatcgtgaagaagcgctacagcacgacacgctccgccagcagccagggcagctccaggtgaaggcgggacagagcccacctgtctttgctacctgaacgcaccaccctctggcctaggctggctccagtgtgccatgcccagccaaaacaaacacagagctgcccaggctttctggaagcttctggtctgagggaggtgtctccgaggatccttttgcctgccgccttcattgatcctgtattaagctgtcaactttaacagtctgcacagtttccaaagctttactactcttagaggacacatgccttaaaaaaggaggggaggaaccacgctgccaccaaagcagccggaagtgccttaacttgtggaaccaacactaatcgaccgtaactgtgctactgaagggaactgcctttcccccttctgggggagacttaacagagcgtggaaggggggcattctctgtcaatgatgcactaacctcccaacctgatttccccgaatctgagggaaggtgagggagtgggaagggggatggagagctcgaggggacagtgtgtttgagctggagtgctgcgggcagcctttctcatggaatgacatgaatcaacttttttctttgtttcatcttttaagtgtacgtgcttgcctgttcgtgcatgtgttcataaactcaacactttaatcatggtttcatgagcattaaaaagcaaagggaaaaaggatgtgtaatggtgtacacagtctgtatattttaataatgcagagctatagtctcaattgttactttataaggtggttttattaacaaacccaaatcctggattttcctgtctttgctgtattttgaaaaacacgtgttgactccattgttttacatgtagcaaagtctgccatctgtgtctgctgtattataaacggataagcagcctacaagataactgtatttataaaccactcttcaacagctggctccagtgctggttttagaacaagaatgaagtcattttggagtctttcatgtctaaaagatttaagttaaaaacaaagtgttacttggaaggttagcttctatcattctggatagattacagatataataaccatgttgactatgggggagagacgctgcattccagaaacgtcttaacacttgagtgaatcttcaaaggaccctgacattaaatgctgaggctttaatacacacatattttatcccaagtttataatggtggtctgaacaaggcacctgtaaataaatcagcatttatgaccagaagaaaaataatctggtcttggactttttatttttatatggaaaagttttaaggacttgggccaactaagtctacccacacgaaaaaagaaatttgccttgtccctttgtgtacaaccatgcaaaactgtttgttggctcacagaagttctgacaataaaagatactagct

SEQ ID NO: 11781 - protein, 394 aa, Homo sapiens [sequence omitted]

SEQ ID NO: 11782 - DNA, 2390 bp, Homo sapiens
  CDS (277)..(2352)
gtgctggccgcggtaaaagtggtagcagcggaggcgagcggagggtttcccgcggcggagtctcactctgctgcctaggctgagtgcagtggtgtgatcgaggcgcactgcagccttgacctcctgagctcaagcgatcctcacctcggcctaccgagtagctgggactacaggcacgcgccactacactcggatttctgacagtcagacttgtccacaagaactcaactggcaaggctgcttttctgtgctaaaactggggagctagtgggcaccatgaagatcttctgcagtcgggccaatccgaccacggggtctgtggagtggctggaggaggatgaacactatgattaccaccaggagattgcaaggtcatcttatgcagatatgctacatgacaaagacagaaatgtaaaatactaccaaggtatccgggctgccgtgagcagggtgaaggacagaggacagaaggccttggttctcgacattggcactggcacgggactcttgtcaatgatggcggtcacagcaggtgccgacttctgctatgccatcgaggttttcaagcctatggctgatgctgctgtgaagattgtggagaaaaatggctttagtgataagattaaggttatcaacaagcattccaccgaggtgactgtaggtccagagggtgacatgccatgccgtgccaacatcctggtcacagagttgtttgacacagagctgatcggggagggggcgctgccctcctatgagcacgcacacaggcatctcgtggaggaaaattgtgaggccgtgccccacagagccaccgtctatgcacagctggtggagtccgggaggatgtggtcgtggaacaagctatttcccatccacgtgcagaccagcctcggagagcaggtcatcgtccctcccgttgacgtggagagctgccctggcgcaccctctgtctgtgacattcagctgaaccaggtgtcaccagccgactttacagtcctcagcgatgtgctgcccatgttcagcatagacttcagcaagcaagtcagtagctcagcagcctgccatagcaggcggtttgaacctctgacatctggccgagctcaggtggttctctcgtggtgggacattgaaatggaccctgaggggaagatcaagtgcaccatggcccccttctgggcacactcagacccagaggagatgcagtggcgggaccactggatgcagtgtgtgtacttcctgccacaagaggagcctgtggtgcagggctcagcgctctatctggtagcccaccacgatgactactgcgtatggtacagcctgcagaggaccagccctgaaaagaatgagagagtccgccagatgcgccccgtgtgtgactgccaggctcacctgctctggaaccggcctcggtttggagagatcaatgaccaggacagaactgatcggtacgtccaggctctgaggaccgtgctgaagccagacagcgtgtgcctgtgtgtcagcgatggcagcctgctctccgtgctggcccatcacctgggggtggagcaggtgtttacagtcgagagttcagcagcttctcacaaactgttgagaaaaatcttcaaggctaaccacttggaagataaaattaacatcatagagaaacggccggaattattaacaaatgaggacctacagggcagaaaggtctctctcctcctgggcgagccgttcttcactaccagcctgctgccgtggcacaacctctacttctggtacgtgcggaccgctgtggaccagcacctggggccaggtgccatggtgatgccccaggcagcctcgctgcacgctgtggttgtggagttcagggacctgtggcggatccggagcccctgtggtgactgcgaaggcttcgacgtgcacatcatggacgacatgattaagcgtgccctggacttcagggagagcagggaagctgagccccacccgctgtgggagtacccatgccgcagcctctccgagccctggcagatcctgacctttgacttccagcagccggtgcccctgcagcccctgtgtgccgagggcaccgtggagctcagaaggcccgggcagagccacgcagcggtgctatggatggagtaccacctgaccccggagtgcacgctcagcactggcctcctggagcctgcagaccccgaggggggctgctgctggaacccccactgcaagcaggccgtctacttcttcagccctgccccagatcccagagcactgctgggtggcccacggactgtcagctatgcagtggagtttcaccccgacacaggcgacatcatcatggagttcaggcatgcagataccccagactgaccactcttgagcaataaagtggcctgagggctggg

SEQ ID NO: 11783 - protein, 692 aa, Homo sapiens
MKIFCSRANPTTGSVEWLEEDEHYDYHQEIARSSYADMLHDKDRNVKYYQGIRAAVSRVKDRGQKALVLDIGTGTGLLSMMAVTAGADFCYAIEVFKPMADAAVKIVEKNGFSDKIKVINKHSTEVTVGPEGDMPCRANILVTELFDTELIGEGALPSYEHAHRHLVEENCEAVPHRATVYAQLVESGRMWSWNKLFPIHVQTSLGEQVIVPPVDVESCPGAPSVCDIQLNQVSPADFTVLSDVLPMFSIDFSKQVSSSAACHSRRFEPLTSGRAQVVLSWWDIEMDPEGKIKCTMAPFWAHSDPEEMQWRDHWMQCVYFLPQEEPVVQGSALYLVAHHDDYCVWYSLQRTSPEKNERVRQMRPVCDCQAHLLWNRPRFGEINDQDRTDRYVQALRTVLKPDSVCLCVSDGSLLSVLAHHLGVEQVFTVESSAASHKLLRKIFKANHLEDKINIIEKRPELLTNEDLQGRKVSLLLGEPFFTTSLLPWHNLYFWYVRTAVDQHLGPGAMVMPQAASLHAVVVEFRDLWRIRSPCGDCEGFDVHIMDDMIKRALDFRESREAEPHPLWEYPCRSLSEPWQILTFDFQQPVPLQPLCAEGTVELRRPGQSHAAVLWMEYHLTPECTLSTGLLEPADPEGGCCWNPHCKQAVYFFSPAPDPRALLGGPRTVSYAVEFHPDTGDIIMEFRHADTPD

SEQ ID NO: 11784 - DNA, 2451 bp, Homo sapiens
  CDS (199)..(507)
atgtagaaaaacatttaggcataggtcaggccttatgcagcatcagagaacacacaccagagtttaactctgtgggtaagagttgtacaattgtgaaatgcaaggagttcactgtaggggtgagactccacagaaaagaaaagtttcctgagagcagaacttctgtccttccctcccagttcggtactataagaagacatgcacacaaagatgtttgttatgattattgaagtgttaaatggaagaaaaatgttacccaagtcttctccaaaaagaatggtagatatttccttgaaatgcctaacccatttctggatgagactcatcaatatccccttcactccactctctgccaactcagatataatttccattgggcaccttcacagtaatgccaggattggggcagagatcctgaaagagcttcttataagatggcaaatgtgcctggcaagagcatttgtattttgtcaggtggaggcatgtgctgagagttattcaactatctgaaatgttgaatttggaggttgtgaaaatattgaattatgctattagtttaataatatctgaggcagtaaaatagtacctgaggaatggtgcctcattctgcccccttgccagttgtctcctcaatcctgagcttcctgctgaggttaattcaagtctactagtttattgagcacctgctatgtgctaggcattgaggtagacctggtcattgccctcccagagttaagggctaataggatatgcatatatactaaacagtaattacagtaaagtgtggtaagtgctttggtaggaaaaatgcgggtttccatcaaagtacatggcagggatacctaaatctggtctatgagtcactaaagacttcctggatatgatggtatctcagacgtaaaggtgggtagaaggtagcaagggcaggggagaagagaacaggatctggagacactccatgaagactcttctctactgcagaaattgtcatagacctaatttttaaaaaaatgaatctgagggagtaattcaacaaatatttattgccctcaagtataatagctcagggcctgcaagcctggtaaggaggggtgtgggcagggaatggggaatagcagagcctgggaaggcagatcaccgtgttcctttatacttcccactgcctgagtcccagagtcatgggacacaaacactccagtccccactgtctctctagcctctgatatgcattctttccctgtgtatatacatgccttttcccataaaatgcaccagtctctcaccacactaattctgagtacttcagagtctcacaggtcattctgggtctagaataggctccccaactcagtgattataagtaggaagaggaaaagcaacacatggggattctgagccaggctttatgacaactaattcctgctggagagaagagtcctgatgatgggctgtctccagatcctatcttatcttcatgccattgtatgggctataacctctgcctgtaactctctctgctaatttttattttggcagttttaattaacccacaattgctgagggcaattaatacctaaaagaaagtttgattcctcttctaagatatcctaggtagtgtcatttctaaagaagacttggtgatcactgcttgtattagtccattttcacagtgctatgaagatactacctgatactgggtaatttattaaaaaaaaaaaagaggtttaattgactgacagttctgcagggctggggaggcctcaggaaacttaaatcatggtggaaggcgaaggggaagcaagcaccttcttcacaaggtggcaagagagagtgcaggggaaatgctaggcacttatcaatcagccaaatctcatgagaattcactatcatgagaacaagggggaaatctgctcccatgatctaatcaccccccaccacgaccctccctcaacacctggggattactattggagatttgggtggggacacaagagccaaaccatatcgctgctgttgtgggtaataggggaggtgaaattggggggacaattcggcctctttgtgtccagaggttgtgcagttatcgagtgaggtcgatcagaagtctaaagggatctttcaaatggatagtgagttgccttttcctataggtgacaatcagagatttaatgttttaagtatcatataataggtttttctcctgattgtgaattgtaagtgttggtaatacagaaaatgagaaagtataaaccacccccaatcccaatgcccatagaaacgttgttaacattttggagtactttctattagtgtttatttttcccaatcctagtatttttagtaaaactactgtttagtaaatgatttttggtaactaatttcaaaatttatacttcaaccgtttattattagaatgtaatgcaagatgtattgcaataaaacttgagtttt

SEQ ID NO: 11785 - protein, 103 aa, Homo sapiens
MHTKMFVMIIEVLNGRKMLPKSSPKRMVDISLKCLTHFWMRLINIPFTPLSANSDIISIGHLHSNARIGAEILKELLIRWQMCLARAFVFCQVEACAESYSTI

SEQ ID NO: 11786 - DNA, 2636 bp, Homo sapiens
  CDS (395)..(2359)
agtccctcgccgaccagtctgggcagcggaggagggtggttggcagtggctggaagcttcgctatgggaagttgttcctttgctctctcgcgcccagtcctcctccctggttctcctcagccgctgtcggaggagagcacccggagacgcgggctgcagtcgcggcggcttctccccgcctgggcggccgcgccgctgggcaggtgctgagcgcccctagagcctcccttgccgcctccctcctctgcccggccgcagcagtgcacatggggtgttggaggtagatgggctcccggcccgggaggcggcggtggatgcggcgctgggcagaagcagccgccgattccagctgccccgcgcgccccgggcgcccctgcgagtccccggttcagccatggggacctctccgagcagcagcaccgccctcgcctcctgcagccgcatcgcccgccgagccacagccacgatgatcgcgggctcccttctcctgcttggattccttagcaccaccacagctcagccagaacagaaggcctcgaatctcattggcacataccgccatgttgaccgtgccaccggccaggtgctaacctgtgacaagtgtccagcaggaacctatgtctctgagcattgtaccaacacaagcctgcgcgtctgcagcagttgccctgtggggacctttaccaggcatgagaatggcatagagaaatgccatgactgtagtcagccatgcccatggccaatgattgagaaattaccttgtgctgccttgactgaccgagaatgcacttgcccacctggcatgttccagtctaacgctacctgtgccccccatacggtgtgtcctgtgggttggggtgtgcggaagaaagggacagagactgaggatgtgcggtgtaagcagtgtgctcggggtaccttctcagatgtgccttctagtgtgatgaaatgcaaagcatacacagactgtctgagtcagaacctggtggtgatcaagccggggaccaaggagacagacaacgtctgtggcacactcccgtccttctccagctccacctcaccttcccctggcacagccatctttccacgccctgagcgcatggaaacccatgaagtcccttcctccacttatgttcccaaaggcatgaactcaacagaatccaactcttctgcctctgttagaccaaaggtactgagtagcatccaggaagggacagtccctgacaacacaagctcagcaagggggaaggaagacgtgaacaagaccctcccaaaccttcaggtagtcaaccaccagcaaggcccccaccacagacacatcctgaagctgctgccgtccatggaggccactgggggcgagaagtccagcacgcccatcaagggccccaagaggggacatcctagacagaacctacacaagcattttgacatcaatgagcatttgccctggatgattgtgcttttcctgctgctggtgcttgtggtgattgtggtgtgcagtatccggaaaagctcgaggactctgaaaaaggggccccggcaggatcccagtgccattgtggaaaaggcagggctgaagaaatccatgactccaacccagaaccgggagaaatggatctactactgcaatggccatggtatcgatatcctgaagcttgtagcagcccaagtgggaagccagtggaaagatatctatcagtttctttgcaatgccagtgagagggaggttgctgctttctccaatgggtacacagccgaccacgagcgggcctacgcagctctgcagcactggaccatccggggccccgaggccagcctcgcccagctaattagcgccctgcgccagcaccggagaaacgatgttgtggagaagattcgtgggctgatggaagacaccacccagctggaaactgacaaactagctctcccgatgagccccagcccgcttagcccgagccccatccccagccccaacgcgaaacttgagaattccgctctcctgacggtggagccttccccacaggacaagaacaagggcttcttcgtggatgagtcggagccccttctccgctgtgactctacatccagcggctcctccgcgctgagcaggaacggttcctttattaccaaagaaaagaaggacacagtgttgcggcaggtacgcctggacccctgtgacttgcagcctatctttgatgacatgctccactttctaaatcctgaggagctgcgggtgattgaagagattccccaggctgaggacaaactagaccggctattcgaaattattggagtcaagagccaggaagccagccagaccttcctggactctgtttatagccatcttcctgacctgctgtagaacatagggatactgcattctggaaattactcaatttagtggcagggtggttttttaattttcttctgtttctgatttttgttgtttggggtgtgtgtgtgtgtttgtgtgtgtgtgtgtgtgtgtgtgtgtgtgtgtttaacagagaatatggccagtgcttgagttctttctccttctctctctctcttttttttttaaataactcttctgggaagttggtttataagcctttgccaggtgtaactgttgtgaaatacccaccactaaagtt

SEQ ID NO: 11787 - protein, 655 aa, Homo sapiens [sequence omitted]

SEQ ID NO: 11788 - DNA, 5344 bp, Homo sapiens
  CDS (1940)..(3928)
ctgcttccgcccaaaaagataattgggaaaaactcaagaagcttggtggagaagagggagaaggatctggaggtctacctccagaagctcctggctgccttccctggcgtgacccccagagtactggcccacttcttgcattttcacttctatgagataaatggcatcaccgcggcactggctgaagagctctttgagaaaggagaacagctcctgggggccggcgaggtctttgccattggacccctgcagctgtatgccgtcacggggcagctgcagcagggaaagcccacgtgcgccagtggggatgccaagaccgacctcgggcacatcctggacttcacctgtcgccttaagtaccttaaggtttctggcacagaaggaccttttgggaccagcaacattcaggagcagctcctgccgttcgacctatcaatattcaagtccctgcatcaggtggagataagtcactgtgatgctaagcacatcagagggctggtcgcatcgaagcccaccttagccacgctgagtgtccgcttctcagcaacctcgatgaaggaagtccttgttcctgaagcctcagaatttgatgagtgggagcctgaaggcacaaccctagaaggccctgtgactgccgtcatccccacttggcaggcattgaccacgcttgacctgagccacaacagcatctccgagatcgacgagtctgtgaaactgatcccaaagattgagttcctggacctgagtcacaatggattgctggttgtggacaatctgcaggtagtgcctttggagaccagtgctgcccgcacacactcccaaggccccgccctgagatttcaggagactgacgcagccttgggaattggccaggggttgtaagggcaggggttgctgtcttcgctttaggatcccagcaatgcactgagtgattgttgctctagttccaaagaattaggaagcatgagtaaatacaaaccaggcatgatgatgcacctccgtcctgaaggtggacagccatgttttcaacgcccaccccaactgtctgcaggggtgccactgtgctgtggcatgtgcggcagagaagagggacttcccttcctaaaataactgtcagagtgacttgcagaactgggtagtttgggttggaaggcccatcctgccattagtgtcaggcccctatctttggagacttgacctgagccactttacgctgttctccacgccgctgcagcacctgtataaccttgtgcatctggacctgtcctacaacaagctctcctccttggaagggcttcacaccaagctggggaacatcaagaccttaaacctggcaggcaacctcctagagagtctgagtggcctgcacaagctctactcactggtcaacctggatctccgggacaacaggatcgaacagatggaggaggtccggagcataggcagcctcccgtgtctggagcacgtgtctctgctgaacaaccctctgagcatcatccccgactaccggaccaaggtgctggctcagttcggagagagggcctcagaggtctgtctggatgacacagtgaccacagagaaggagctggacactgtggaagtgctgaaagcaattcagaaagccaaggaggtcaagtccaaactgagcaacccagagaagaagggtggtgaagactcccggctctcagctgccccctgcatcagacccagcagctcccctcccactgtggctcccgcatctgcctccctgccccagcccatcctctctaaccaaggcatcctcggagatgagtgagtgaagcaggtctcatgagcgtgtctgctggcccggcccccacggaagaggggagggtgtgccgtcccgagtggagccgaggctcgggacacgcaggaaaggacgccgcctgcccgggctcctggagacgcagaacttggaatcatgttcgttcaggaggaggccctggccagcagcctctcgtccactgacagtctgactcccgagcaccagcccattgcccagggatgttctgattccttggagtccatccctgcgggacaggcagcttccgatgatttaagggacgtgccaggagctgttggtggtgcaagcccagaacatgccgagccggaggtccaggtggtgccggggtctggccagatcatcttcctgcccttcacctgcattggctacacggccaccaatcaggacttcatccagcgcctgagcacactgatccggcaggccatcgagcggcagctgcctgcctggatcgaggctgccaaccagcgggaggagggccagggtgaacagggcgaggaggaggatgaggaggaggaagaagaggaggacgtggctgagaaccgctactttgaaatggggcccccagacgtggaggaggaggagggaggaggccagggggaggaagaggaggaggaagaggaggatgaagaggccgaggaggagcgcctggctctggaatgggccctgggcgcggacgaggacttcctgctggagcacatccgcatcctcaaggtgctgtggtgcttcctgatccatgtgcagggcagtatccgccagttcgccgcctgccttgtgctcaccgacttcggcatcgcagtcttcgagatcccgcaccaggagtctcggggcagcagccagcacatcctctcctccctgcgctttgtcttttgcttcccgcatggcgacctcaccgagtttggcttcctcatgccggagctgtgtctggtgctcaaggtacggcacagtgagaacacgctcttcattatctcggacgccgccaacctgcacgagttccacgcggacctgcgctcatgctttgcaccccagcacatggccatgctgtgtagccccatcctctacggcagccacaccagcctgcaggagttcctgcgccagctgctcaccttctacaaggtggctggcggctgccaggagcgcagccagggctgcttccccgtctacctggtctacagtgacaagcgcatggtgcagacggccgccggggactactcaggcaacatcgagtgggccagctgcacactctgttcagccgtgcggcgctcctgctgcgcgccctctgaggccgtcaagtccgccgccatcccctactggctgttgctcacgccccagcacctcaacgtcatcaaggccgacttcaaccccatgcccaaccgtggcacccacaactgtcgcaaccgcaacagcttcaagctcagccgtgtgccgctctccaccgtgctgctggaccccacacgcagctgtacccagcctcggggcgcctttgctgatggccacgtgctagagctgctcgtggggtaccgctttgtcactgccatcttcgtgctgccccacgagaagttccacttcctgcgcgtctacaaccagctgcgggcctcgctgcaggacctgaagactgtggtcatcgccaagacccccgggacgggaggcagcccccagggctcctttgcggatggccagcctgccgagcgcagggccagcaatgaccagcgtccccaggaggtcccagcagaggctctggccccggccccagtggaagtcccagctccagcccctgcagcagcctcagcctcaggcccagcgaagactccggccccagcagaggcctcaacttcagctttggtcccagaggagacgccagtggaagctccagccccacccccagccgaggcccctgcccagtacccgagtgagcacctcatccaggccacctcggaggagaatcagatcccctcgcacttgcctgcctgcccgtcgctccggcacgtcgccagcctgcggggcagcgccatcatcgagctcttccacagcagcattgctgagatttctggcatcagaaaaacaccgactacaacaacagccctttccacatctcccagtgcttcgtgctaaagcttagtgacctgcagtcagtcaatgtggggcttttcgaccagcatttccggctgacgggttccaccccgatgcaggtggtcacgtgcttgacgcgggacagctacctgacgcactgcttcctccagcacctcatggtcgtgctgtcctctctggaacgcacgccctcgccggagcctgttgacaaggacttctactccgagtttgggaacaagaccacagggaagatggagaactacgagctgatccactctagtcgcgtcgagtttacctaccccagtgaggaggagattggggacctgacgttcactgtggcccaaaagatggctgagccagagaaggccccagccctcagcatcctgctgtacgtgcaggccttccaggtgggcatgccaccccctgggtgctgcaggggccccctgcgccccaagacactcctgctcaccagctccgagatcttcctcctggatgaggactgtgtccactacccactgcccgagtttgccaaagagccgccgcagagagacaggtaccggctggacgatggccgccgcgtccgggacctggaccaagtgctcatgggctaccagacctacccgcaggccctcaccctcgtcttcgatgacgtgcaagggcatgacctcatgggcagtgtcaccctggaccactttggggaggtgccaggtggcccggctagagccagccagggccgtgaagtccagtggcaggtgtttgtccccagtgctgagagcagagagaagctcatctcgctgttggctcgccagtgggaggccctgtgtggccgtgagctgcctgtcgagctcaccggctagcccaggccacagccagcctgtcgtgtccagcctgacgcctactggggcagggcagcaggcttttgtgttctctaaaaatgttttatcctccctttggtaccttaatttgactgtcctcgcagagaatgtgaacatgtgtgtgtgttgtgttaattctttctcatgttgggagtgagaatgccgggcccctcagggctgtcggtgtgctgtcagcctcccacaggtggtacagccatgcacaccagtgtcgtgtctgctgttgtgggaccgttgttaacacgtgacactgtgggtctgactttctcttctacacgtcctttcctgaagtgtcgagtccagtcctttgttgctgttgctgttgctgttgctgttgctgttggcatcttgctgctaatcctgaggctggtagcagaatgcacattggaagctcccaccccatattgttcttcaaagtggaggtctcccctgatccagacaagtgggagagcccgtgggggcaggggacctggagctgccagcaccaagcgtgattcctgctgcctgtattctctattccaataaagcagagtttgacaccgtc

SEQ ID NO: 11789 - protein, 663 aa, Homo sapiens [sequence omitted]

SEQ ID NO: 11790 - DNA, 2856 bp, Homo sapiens
  CDS (20)..(2491)
atctgacggcgcggctaccatggcggcggcatttgaagcctcgggagccttagcagcagtggcgactgctatgccggctgagcatgtggccgtgcaggtcccggccccagagccaacacccgggcctgtgaggatcctgcggaccgctcaggatctcagcagcccgcggacccgcacgggggatgtgctgttggcggagccggccgacttcgagtcactgctgctttcgcggccggtgctggaggggctgcgggcggccggcttcgagaggccctcgccggtgcagctcaaggccatcccgttggggcgctgcgggctcgatttaattgttcaagctaaatctggcaccgggaaaacctgtgtgttctccaccatagctttggactctcttgttcttgaaaacttaagtacccagattttgatcttggctcctacaagagaaattgctgtacagatacattctgttattacagccattggaataaaaatggaaggcttagagtgtcatgtctttattggagggaccccattatcacaagacaaaaccagacttaaaaagtgtcatattgctgttggatctcctggcagaattaagcaactcatagaacttgactacttgaacccaggcagtatacgcctctttattcttgatgaagcagataagcttttagaagaaggcagcttccaggagcaaataaattggatttattcttccttgcctgccagtaaacagatgctggcagtatcagctacttatcccgaatttttggctaatgctttgacaaagtacatgagagatcccacttttgtaagactgaattccagtgatccaagtctcataggtttgaagcagtgttacaaagttgtcaattcataccctttggcacataaggtttttgaggaaaagactcagcatttacaggaactgttcagcagaattccatttaatcaagctttagtcttttctaatttgcacagcagagcacaacatttggctgatatcctttcttctaaaggctttcctgctgagtgcatttcaggcaatatgaatcagaatcagcgtcttgatgctatggctaaactgaagcactttcattgcagagtcctcatttccacagatttgacttctcgtgggattgatgctgagaaggtgaatctggttgtaaatctggatgtaccattggattgggagacatacatgcatcggattgggagagctggccgttttggtacattggggctgacagtgacctactgttgccggggagaggaagaaaatatgatgatgagaattgcccagaaatgtaatatcaaccttctccctttaccagatcccattccttctggtctgatggaagaatgtgtggattgggatgtggaagttaaagctgctgtgcatacatatggtatagcaagtgtacctaaccaacccttaaaaaagcaaattcagaaaatagagagaacccttcaaattcagaaagctcatggtgaccacatggcttcctctagaaataattctgtatctggactatcagtcaaatcaaaaaataataccaaacaaaagcttcctgtgaaaagccactcagaatgtggaatcatagaaaaagcaacgtcaccaaaagaactgggctgtgacaggcaatccgaagagcaaatgaagaattctgttcagactcccgttgaaaactccaccaacagtcagcaccaggtcaaagaagctttacctgtgtcactccctcagattccttgtctgtcttcctttaaaatccatcagccatacacgttgacttttgctgaattggtagaggattatgaacattatattaaagaggggttagagaaacctgtggaaatcatcaggcactacacaggccctggggatcagactgtgaatcctcaaaatggttttgtgagaaataaagttattgaacagagagtccctgtgttggcaagtagtagccaatctggagactctgagagtgacagtgattcttacagctcaagaacctcttcccagagcaaaggaaataagtcatacttggaaggctcttctgataatcagctgaaagactctgaatctacgcctgtggatgatcgtatttctttggaacaaccaccaaatggaagtgacacccccaatccagagaaatatcaagaatcacctggaatccagatgaagacaagacttaaagagggggctagccagagagctaagcagagccggagaaacctacccaggcggtcttccttcagattgcagactgaagcccaggaagatgattggtatgactgtcatagggaaatacgtctgagtttttctgatacctatcaggattatgaggagtactggagagcttactacagggcatggcaagaatattatgctgccgcttctcattcatattattggaatgctcagagacatccaagttggatggcagcttatcacatgaataccatttatctacaagaaatgatgcatagtaaccagtgattataggatatacctgagaccatcaggaaccgtcaacaaatgatacctttggatatccatcctcctcgacttatagtacagtggtgtatagtggcatttctgataaacttgaaaagacttgagtctttccactgggacacatccatttttcagattgttttgatttaggccaggtatattatcttcatttttaagagtttctttaagaaacttcatcagattgttgaaagataatttttgggacatagagctgaaagtttcagggtgccattttctataagatcttcccaaaagaaacatttaaaaagatgacatataccaccacttacttaaaaacaataaaagcaatagatttgattagt

SEQ ID NO: 11791 - protein, 824 aa, Homo sapiens [sequence omitted]

SEQ ID NO: 11792 - DNA, 3131 bp, Homo sapiens
  CDS (15)..(932)
atgatattgaagagatgggagaagaagatagtgaggtcattgaacctccttctctacctcagcttcagacccccctggccagtgagctggacctcatgccctacacacccccacagtctaccccaaagtctgccaaaggcagtgcaaagaaggaaggctccaaacggaaaatcaacatgagtggctacatcctgttcagcagtgagatgagggctgtgattaaggcccaacacccagactactctttcggggagctcagccgcctggtggggacagaatggagaaatcttgagacagccaagaaagcagaatatgaaggcatgatgggtggctatccgccaggccttccacctttgcagggcccagttgatggccttgttagcatgggcagcatgcagccacttcaccctggggggcctccaccccaccatcttccgccaggtgtgcctggcctcccgggcatcccaccaccgggtgtgatgaaccaaggagtggcccctatggtagggactccagcaccaggtggaagtccatatggacaacaggtgggagttttggggcctccagggcagcaggcaccacctccatatcccggcccacatccagctggaccccctgtcatacagcagccaacaacacccatgtttgtagctcccccaccaaagacccagcggcttcttcactcagaggcctacctgaaatacattgaaggactcagtgcggagtccaacagcattagcaagtgggatcagacactggcagctcgaagacgcgacgtccatttgtcgaaagaacaggagagccgcctaccctctcactggctgaaaagcaaaggggcccacaccaccatggcagatgccctctggcgccttcgagatttgatgctccgggacaccctcaacattcgccaagcatacaacctagaaaatgtttaatcacaccattacgtttcttttatatagaagcataaagagttgtggatcagtagccattttagttactgggggtggggggaaggaacaaaggaggataatttttattgcattttactgtacatcacaaggccatttttatatacggacacttttaataagctatttcaatttgtttgttatattaagttgactttatcaaatacacaaagatttttttgcatatgtttccttcgtttaaaaccagtttcataattggttgtatatgtagacttggagttttatctttttacttgttgccatggaactgaaaccattagaggtttttgtcttggcttggggtttttgttttcttggttttgggtttttttatatatatatataaaagaacaaaatgaaaaaaaacacacacacacaagagtttacagattagtttaaattgataatgaaatgtgaagtttgtcctagtttacatcttagagaggggagtatacttgtgtttgtttcatgtgcctgaatatcttaagccactttctgcaaaagctgtttcttacagatgaagtgctttctttgaaaggtggttatttaggttttagatgtttaatagacacagcacatttgctctattaactcagaggctcactacagaaatatgtaatcagtgctgtgcatctgtctgcagctaatgtacctcctggacaccaggaggggaaaaagcactttttcaattgtgctgagttagacatctgtgagttagactatggtgtcagtgatttttgcagaacacgtgcacaaccctgaggtatgtttaatctaggcaggtacgtttaaggatattttgatctatttataatgaattcacaatttatgcctataaatttcagatgatttaaaattttaaacctgttacattgaaaaacattgaagttcgtcttgaagaaagcattaaggtatgcatggaggtgatttatttttaaacataacacctaacctaacatgggtaagagagtatggaactagatatgagctgtataagaagcataattgtgaacaagtagattgattgccttcatatacaagtatgttttagtattccttatttccttattatcagatgtattttttcttttaagtttcaatgttgttataattctcaaccagaaatttaatactttctaaaatattttttaaatttagcttgtgcttttgaattacaggagaagggaatcataatttaataaaacgcttactagaaagaccattacagatcccaaacacttgggtttggtgaccctgtctttcttatatgaccctacaataaacatttgaaggcagcataggatggcagacagtaggaacattgtttcacttggcggcatgtttttgaaacctgctttatagtaactgggtgattgccattgtggtagagcttccactgctgtttataatctgagagagttaatctcagaggatgcttttttccttttaatctgctatgaatcagtacccagatgtttaattactgtacttattaaatcatgagggcaaaagagtgtagaatggaaaaaagtctcttgtatctagatactttaaatatgggaggccctttaacttaattgcctttagtcaaccactggatttgaatttgcatcaagtattttaaataatattgaatttaaaaaaatgtattgcagtagtgtgtcagtaccttattgttaaagtgagtcagataaatcttcaattcctggctatttgggcaattgaatcatcatggactgtataatgcaatcagattattttgtttctagacatccttgaattacaccaaagaacatgaaatttagttgtggttaaattatttatttatttcatgcattcattttatttcccttaaggtctggatgagacttctttggggagcctctaaaaaaatttttcactgggggccacgtgggtcattagaagccagagctctcctccaggctccttcccagtgcctagaggtgctataggaaacatagatccagccaggggcttccctaaagcagtgcagcaccggcccagggcatcactagacaggccctaattaagttttttttaaaaagcctgtgtatttattttagaatcatgtttttctgtatattaacttgggggatatcgttaatatttaggatataagatttgaggtcagccatcttc

SEQ ID NO: 11793 - protein, 306 aa, Homo sapiens
MGEEDSEVIEPPSLPQLQTPLASELDLMPYTPPQSTPKSAKGSAKKEGSKRKINMSGYILFSSEMRAVIKAQHPDYSFGELSRLVGTEWRNLETAKKAEYEGMMGGYPPGLPPLQGPVDGLVSMGSMQPLHPGGPPPHHLPPGVPGLPGIPPPGVMNQGVAPMVGTPAPGGSPYGQQVGVLGPPGQQAPPPYPGPHPAGPPVIQQPTTPMFVAPPPKTQRLLHSEAYLKYIEGLSAESNSISKWDQTLAARRRDVHLSKEQESRLPSHWLKSKGAHTTMADALWRLRDLMLRDTLNIRQAYNLENV

SEQ ID NO: 11794 - DNA, 3149 bp, Homo sapiens
  CDS (1934)..(2569)
atccgccgggggagaatagggttgcaccatcccagaagctgctgttagctcgccggtcctcggcacgccgcccgttcgcccctgcgctgtccgcccttcccctagcgttacttccggtccctcgctgagggggttcgtgcggctcccaggaggcgtgaaccgcggaccatgagcgtgggcttcatcggggccggccagctggcctatgctctggcgcggggcttcacggccgcaggcatcctgtcggctcacaagataatagccagctccccagaaatgaacctgcccacggtgtccgcgctcagggtaggtggagccgggcggagtgggaagcgggtggaggcccaggaaaaggatgacctgagatgaagtgagtctggccggcccctgcgcccaagtgctggtctttggccggcggtgacctttactccaggaacgtgacaatctttccaccttctcttgggcagctcaatgtggtgggaacacccagggagacataactgggggtcagatccagacactggagtggtagaggattaactgaggtgattatgtgatgaaagcacctggcacatagtaggtacctaataaatactcattttttaaattttttttcagacagggtcttactctgtcgcccaagctggagtgcagtggcgcgatctcagctcactgtaacctccgcctcccacctcagcctcccacctcagcctcccgagtagctggaattacaggcatccaccacgcgcagctaatttttgtatttttggtagagaatactgttggccaggctggtctcgaactcctggcctcaagtgatctgcccgccttggcctcccaaagtgctgggattacaggggtgagccactgcgctcagccatttttcttaatagacgagttgtatgaccttaaagtactcagccactttgaggctatttcctcatttacaacagtggccactttgctgttattctgagtcgtgaatgagcatattgggaagaatctggtgagttagttgttctgttctccaaaaacatattccaagtcttcacccaaaacctgtgctctgtgggagaggatggctgatgaggcaggtgacaggcagtgtctgtgcctagggtgggctgatgtccctagcactggagggtcctgcttctcagtttggagtcatagagggatggatggcttccagcctagccctggaccacatggagactgtgcggtccccacgaacaagcggccagggttaggatagggcctgactcagctgtgcttttaacgaccaggtattagcatttccctttgccctgccactttcaccatagggccttcttacctggcagaggagtgccttagataccagaagattggcagggaagaagggcagccacttcctggttaccatggagaagcttgtcatgctccaagcctgtgcttacttgtccagtagcaacaatgggaaactgtattatttggggtaggggtagaaccctgagggcataaagctaagaattccaggctgcatctggcagaatcggtttggcaggggttcagctgctccctgggaggccttggcatagccaggctgctccagcactgtgagctgggagtctcctcttgcagaagatgggtgtgaacctgacacgcagcaacaaggagacggtgaagcacagcgacgtcctgtttctggctgtgaagccacatatcatccccttcatcctggatgagattggggccgacgtgcaagccagacacatcgtggtctcctgtgcggctggtgtcaccatcagctctgtggagaaggtgcccatctcagccctgatgccccttgtgtgaggggagggttgacccacgaatggcagctaatgggtgggtgctggtgggagccgtgccctggccactcattcggctctctccctcaccctagaagctgatggcattccagccagcccccaaagtgattcgctgcatgaccaacacacctgtggtagtgcaggaaggcgctacagtgtacgccacgggcacccatgccctggtggaggatgggcagctcctggagcagctcatgagcagcgtgggcttctgcactgaggtggaagaggacctcatcgatgccgtcacggggctcagtggcagcgggcctgcctatgcattcatggctctggacgcattggctgatggtggggtgaagatgggtttgccacggcgcctggcaatccaactcggggcccaggctttgctgggagctgccaagatgctgctggactcggagcagcatccatgccagcttaaggacaatgtctgctcccctgggggagccaccatccacgccctgcactttctagagagtgggggcttccgctctctgctcatcaatgcagttgaggcctcctgtatccgaacacgagagctacagtccatggccgaccaagaaaagatctccccagctgcccttaagaagaccctcttagacagagtgaagctggaatcccccacagtctccacactgaccccctccagcccagggaagctcctcacaagaagcctggccctgggaggcaagaaggactaaggcagcatctgtcccctctgtgattcagagcccttagttgagagcccctgccgcccctgccacccccctgccccgctcccaccattgcccctcctcagctgtgcaaggagaaagcatgcttaggaagttttcaggtccttgtgataaaacctccttaaatctgttcagaccaagcaatgcgagcttcctctcctgtcccatgttggaagttgctctgaaggggtggtagatgctggaagccaggcacaaccctgcgtacgctgctcagttggtggagactggggctgggactggagtcagcccagctgggaggaggggctggggaggatctgcagctgaagcccgaggcagggttggtgtgatgccaaggcaaagtggtgaggagaaaacaggaaacgggctttctctgaattggtaaatgggaaagaagtgagcaacttaagattgtcacaattaatcacaagtgtacaggattagactgggtttatatttaactcttgcttcataggtgtaccatttaaagagtgttatttaatgctaagtttaactgctttaataaagtttatttttaaatatc

SEQ ID NO: 11795 - protein, 212 aa, Homo sapiens
MAFQPAPKVIRCMTNTPVVVQEGATVYATGTHALVEDGQLLEQLMSSVGFCTEVEEDLIDAVTGLSGSGPAYAFMALDALADGGVKMGLPRRLAIQLGAQALLGAAKMLLDSEQHPCQLKDNVCSPGGATIHALHFLESGGFRSLLINAVEASCIRTRELQSMADQEKISPAALKKTLLDRVKLESPTVSTLTPSSPGKLLTRSLALGGKKD

SEQ ID NO: 11796 - DNA, 1658 bp, Homo sapiens
  CDS (100)..(1242)
aaagaggaaaacaccataattttgcagcagctactcccactgcgaaccaaggtggccaaactactcggttatagcacacatgctgacttcgtccttgaaatgaacactgcaaagagcacaagccgcgtaacagcctttctagatgatttaagccagaagttaaaacccttgggtgaagcagaacgagagtttattttgaatttgaagaaaaaggaatgcaaagacaggggttttgaatatgatgggaaaatcaatgcctgggatctatattactacatgactcagacagaggaactcaagtattccatagaccaagagttcctcaaggaatacttcccaattgaggtggtcactgaaggcttgctgaacacctaccaggagttgttgggactttcatttgaacaaatgacagatgctcatgtttggaacaagagtgttacactttatactgtgaaggataaagctacaggagaagtattgggacagttctatttggacctctatccaagggaaggaaaatacaatcatgcggcctgcttcggtctccagcctggctgccttctgcctgatggaagccggatgatggcagtggctgccctcgtggtgaacttctcacagccagtggcaggtcgtccctctctcctgagacacgacgagactgattttgcacgatttagcggaacaaatgtggaaactgactttgtagaggtgccatcgcaaatgcttgaaaattgggtgtgggacgtcggttccctccgaagattgtcaaaacattataaagatggaagccctattgcagacgatctgcttgaaaaacttgttgcttctaggctggtcaacacaggtcttctgaccctgcgccagattgttttgagcaaagttgatcagtctcttcataccaacacatcgctggatgctgcaagtgaatatgccaaatactgctcagaaatattaggagttgcagctactccaggcacaaatatgccagctacctttggacatttggcagggggatacgatggccaatattatggatatctttggagtgaagtattttccatggatatgttttacagctgttttaaaaaagaagggataatgaatccagaggttggaatgaaatacagaaacctaatcctgaaacctgggggatctctggacggcatggacatgctccacaatttcttgaaacgtgagccaaaccaaaaagcgttcctaatgagtagaggcctgcatgctccgtgaactgggggtctttggtagccgtccatgtctggaggacaagtcgacatcaccatgtgttactggcctggaaactgaagggagttttgcaagtgaaaatttagatttctattgacatccttttgttttctaattttaaaaattataaagatgtaaatggaattataaatactgtgacctaagaaaagacccactagaaagtaattgtactataaaatttcataaaactggatttgatttctttttatgaaagtttcatatgaatgtaacttgattttttactattataatctagataatatgatataagagggctaaggatttttaaattgaatcatatatatgatataatttgatccttcttgtatcttgaagttttgtacttgggatttctggactgataaatgaatcatcac

SEQ ID NO: 11797 - protein, 381 aa, Homo sapiens [sequence omitted]

SEQ ID NO: 11798 - DNA, 1054 bp, Homo sapiens
  CDS (293)..(787)
attcaagcctgggccctggaaggaggggtggacagtcccctcccttccagtccagcatgggtctggggaagaggagcagctttgcctggaaggggcctcctaggagggggagcggtggtttctagctcaggctttaggatcagagagcagcagattcaaatcctgacggttttggtaaagtcaattcaatctctccaagactccgtttacttgatctgcgaagtggggataatggtatcacgtcgcagggttgtcaggcggagctggtaggggagctgccccccagagcagcatggatgccccgcgaagggacatggagttgctcagcaacagcctggctgcctacgcgcacatccgcgccaaccccgagagctttggcctctacttcgtgctgggcgtctgcttcggcctgctgctcaccctctgcctgctcgtcatcagcatctcgtgggcgccccgcccgcggccccggggcccggctcagcgccgggacccccgcagcagcaccctggagcccgaggacgacgacgaggacgaggaggacacggtgactcggctgggccccgacgacacgctgccgggccccgagctgtccgcagagccggacgggcccctcaacgtcaacgtcttcacgtcggcggaggagctggagcgggcgcagcggctggaggagcgcgaacggatcctgcgggagatctggcgcaccgggcagccggacctgctgggcacaggcacgctggggcccagccccacggccacgggcaccctgggccgcatgcactattactgatgggccctggctcccgccgcaaggcgctcggggtaccggacctgtacatgagctcagagctaccccacaccttcggactgcctcggcccccacagctcccaggtgctactgggcgtggaccgccaccccctgagaggctcccttccccagtcctgccagaagaccccgggggcggggagggggcagcatgcagggtccccactccctctctggggtcgatgaagaggtgaagtgaccaaatgaaagaaagctgcattctcagtg

SEQ ID NO: 11799 - protein, 165 aa, Homo sapiens
MDAPRRDMELLSNSLAAYAHIRANPESFGLYFVLGVCFGLLLTLCLLVISISWAPRPRPRGPAQRRDPRSSTLEPEDDDEDEEDTVTRLGPDDTLPGPELSAEPDGPLNVNVFTSAEELERAQRLEERERILREIWRTGQPDLLGTGTLGPSPTATGTLGRMHYY

SEQ ID NO: 11800 - DNA, 2545 bp, Homo sapiens
  CDS (306)..(1535)
gtcaaaatggcggcgaggggaacctggagcagtcccggagcctgagccactgacaggagaggagagggcggcggcggcggtgggaggaggatggccgggggtgctggcgccggtgcggacggcggtgctggtggcggcggcggcggaggcgacggcagcggtcccagcggcagcagcagcggcgggaggagcctccgggaaatggatgaaaagaggctgctggatccagggttgaaggttcataaaggcctctgggattatactctgaagaacccgcagacggaatgcctgagtgactgaagaaaatgggtgctaatgcatctaattatcctcattcatgttccccgagggtagggggaaattcacaggcccaacagacttttatagggacctcatcctattctcagcaaggctatggttgcgaatcaaagttgtatagccttgaccatggccatgagaaaccacaagacaaaaaaaagagaacctctggtcttgccaccctcaaaaagaagtttattaagcgtcggaaatctaataggtctgccgatcatgccaagcagatgcgagaactcctctctgggtgggatgttagagatgtcaatgcattagtggaggaatatgagggaacatcagcattaaaggagctttctctacaagccagtttggctagaccagaagcccggacattgcagaaagatatggctgatctttatgagtacaagtattgtactgatgtagacttaatatttcaagaaacttgttttcctgttcatcgtgccattttggcagcaaggtgtccattttttaaaacactgctttcttcctcaccagagtatggggcagagataataatggacatcaatacagctggtattgatatgcccatgttttctgctttgttacactacctttatacaggagagtttggaatggaggactcaaggtttcaaaatgtcgatatccttgttcagcttagtgaagaatttggaacaccaaattcccttgatgtagatatgcgtggactctttgattacatgtgttattatgatgtcgtccttagtttttcttcagactctgaactggttgaagcttttggtggaaatcagaactgtttagatgaagagctcaaagcccacaaggctgttatttctgcacggtccccattttttcgaaatttattacaaaggaggatacgaactggtgaagaaatcacagaccgaactttgaggactcccacaagaattatattagatgagtccattataccaaaaaaatatgcaacagtgatattacactgtatgtataccgacgtggtggacctctctgttttgcactgtagcccctctgtggggagtctcagtgaagttcaggctctcgtcgcagggaagccaaacatgaccagggcagaagaagccatggaactttaccacatagcactgttcttggaatttaacatgcttgcacaagaggagactacagtcatcaggcctgcctgtgcagcagagctttcaaacagctgcttactgcctcaatcttaaatatgaaaacccatccaaggataactggacatttgaggaaagcttccaaattgagacagagatcagagcaaaaagaacaaagtcctggaggaagcagacaatgaagggagcagaggaaaacttcagtagaatcaaaatatccttatataaaagaactttttatggaatcagtgagacataagcaggatgctattaaagtaaaaacaggagcttttagaaataagatagcagaaatgaaagatataatggaagcattgaaaggtacagttgaggaaatctagaaagtaaataatataataaagagatgagtggagacaaataaaactagagtattcatccagggtctaacatctaacaaatagtggctttagaaatatataccagagaaaagtgaagagaagacagtatctaaggagtaatataagaaatatttccaaaactaaaggaatttctatataaaaagtttctttttcagaacactggggaaaaagagacaattttaaaatgttgcagggaggagaaaaattaggttccatgcaaagaaataggaatcagatggtattgagattttcagtagcaacaactgaataccacaatacagtgaagtagtgtcttccaaaagctgatggaaaattattttaaacacaaaatcctatatttagccaaacagtcaatcaagtgtaaggctaaataaaggcatttttcagtcatacctcgaaaaactgcctgtgtagggatatttcccctgcttccccactcaggcagctgctgggaatgtattccaccaaatgacgaagcaaaccaagaacagagaagtgaaggatctagaaaatgggctccaacacgggaaggaagcaaagggagatcccacgcatcagccacacagtaggtcttgtgggcattcagtctagcccagaccgggagggtgaaagtctccaaggaaagaggtgtctcggaagaaatcaattactttcaatgtttgaacattaaatagcaaatgacaaagc

SEQ ID NO: 11801 - protein, 410 aa, Homo sapiens
MGANASNYPHSCSPRVGGNSQAQQTFIGTSSYSQQGYGCESKLYSLDHGHEKPQDKKKRTSGLATLKKKFIKRRKSNRSADHAKQMRELLSGWDVRDVNALVEEYEGTSALKELSLQASLARPEARTLQKDMADLYEYKYCTDVDLIFQETCFPVHRAILAARCPFFKTLLSSSPEYGAEIIMDINTAGIDMPMFSALLHYLYTGEFGMEDSRFQNVDILVQLSEEFGTPNSLDVDMRGLFDYMCYYDVVLSFSSDSELVEAFGGNQNCLDEELKAHKAVISARSPFFRNLLQRRIRTGEEITDRTLRTPTRIILDESIIPKKYATVILHCMYTDVVDLSVLHCSPSVGSLSEVQALVAGKPNMTRAEEAMELYHIALFLEFNMLAQEETTVIRPACAAELSNSCLLPQS

SEQ ID NO: 11802 - DNA, 2602 bp, Homo sapiens
  CDS (5)..(1021)
gaagatggcggcggagcgacaggaggcgctgagggagttcgtggcggtgacgggcgccgaggaggaccgggcccgcttctttctcgagtcggccggctgggacttgcagatcgcgctagcgagcttttatgaggacggaggggatgaagacattgtgaccatttcgcaggcaacccccagttcagtgtccagaggcacagcccccagtgataatagagtgacatccttcagagacctcattcatgaccaagatgaagatgaggaggaagaggaaggccagaggttttatgctgggggctcagagagaagtggacagcagattgttggccctcccaggaagaaaagtcccaacgagctggtggatgatctctttaaaggtgccaaagagcatggagctgtagctgtggagcgagtgaccaagagccctggagagaccagtaaaccgagagttcatgtagtattgaaactctggaagagtggattcagcctggataatggagaactcagaagctaccaagacccatccaatgcccagtttctggagtctatccgcagaggggaggtgccagcagagcttcggaggctagctcacggtggacaggtgaacttggatatggaggaccatcgggacgaggactttgtgaagcccaaaggagccttcaaagccttcactggcgagggtcagaaactgggcagcactgccccccaggtgttgagtaccagctctccagcccaacaggcagaaaatgaagccaaagccagctcttccatcttaatcgacgaatcagagcctaccacaaacatccaaattcggcttgcagacggcgggaggctggtgcagaaatttaaccacagccacaggatcagcgacatccgactcttcatcgtggatgcccggccagccatggctgccaccagctttatcctcatgactactttcccgaacaaagagctggctgatgagagccagaccctgaaggaagccaacctgctcaatgctgtcatcgtgcagcggttaacataaccgcccagccagctgcctggcctccctcctgtgtttcccatggccagtggccatgccccatggggatcgcccctcctgcccccttgtgcacacccagcagtccagtgcaacgtctcctccatagctctgggttcttagatcttggttggacgtttgttttctccttagttgcatttcctgggtttttgtgatgatcaatggactttaatgaaaaaaaaataaaaacaaccaaaaaaattgaaggaatatcaccagcatgttgtacggaaactctcccactgaagcaggctttaattgctttaaaattatatttatcttggggcctgtgggaggaaacttccttccatcttctctgcataaaaacttgtggcacacaatgcttattcactagtgtgtcccacccgccagccccacagatgactggaggaaggaggggaaatgtgtagaaagaggcttcgccaccacttgttcccacgagaatatatcacttgcccagataaaactgggcggcagccagagttccctgaagtgggaagtcagagctacatgcacacagtgtcttcagaaggtgaaaataaatatttccctgtgctccttttactcaacccctggggtatctaatcttgccaggtcttggccagttgagattctgttccacctgcctgcctggccctttcctccattaccatccagactgctcgcctcctggggattctcaggggctccattatggcttgatttactccacgtgcagaagtcttgagtggacctaggaggtaggtgggatattttttttcactaggatacagctcatgccaacccatcctaagtgagttcagaatcagggtatcttgccctaaaagataaacagtcaaaatgccaccgagctgttcactagtgatgtgtggcaaatcaaatcaactgttgaagaaggggtgagttttctgtgctacaagcacctgtcactgttggtacttgcaggaggcttctgctgggtatgttttggaagtgagtgtcactacttggctttgcttagcaggttctgcttcacacttgttctttgacctgctgacttgtgacttgcagaaacataggcagtagtcctagcctggtaaagaccctccaccacccctataagtttgattgctatgcaggtttgggagaggaggcctattgggctcttggatggaaccctttcccgtattaaacaaaccagagacagaatcagtgctgactcaggatctcctggtttggaatcgtaatgtgcctcaatcctctttccaagcaggcctcaccagtctctttctctttcctgcttcacccctgcaatgagccaagaaccaacactacatccacctagaactgcagaagggcttgtggtttcaaccaagacccatcctgagcaagggacttggcttggtgcttttgatcccaaagttcccacaccggcagtggcctgctggggcaatggcatctgtcacggtgttttctccagcaggtggagattatggaacctacatatgggtctggaaaaactgtacactgttgtcaccttgaccattaaaaaccagaatgagg

SEQ ID NO: 11803 - protein, 339 aa, Homo sapiens
MAAERQEALREFVAVTGAEEDRARFFLESAGWDLQIALASFYEDGGDEDIVTISQATPSSVSRGTAPSDNRVTSFRDLIHDQDEDEEEEEGQRFYAGGSERSGQQIVGPPRKKSPNELVDDLFKGAKEHGAVAVERVTKSPGETSKPRVHVVLKLWKSGFSLDNGELRSYQDPSNAQFLESIRRGEVPAELRRLAHGGQVNLDMEDHRDEDFVKPKGAFKAFTGEGQKLGSTAPQVLSTSSPAQQAENEAKASSSILIDESEPTTNIQIRLADGGRLVQKFNHSHRISDIRLFIVDARPAMAATSFILMTTFPNKELADESQTLKEANLLNAVIVQRLT

SEQ ID NO: 11804 - DNA, 2505 bp, Homo sapiens
  CDS (138)..(1025)
tagaaggatgccatgaaggaaatgactgctttgtaaagcgagggtaaacttctgaaatgctttgattaaaataagctatattaaagaccccaaaaccacttccctcgcagctttcctctgaatgtctttcacatgaaatgggcctgagtcactctaagactcaccttagggtgatcaaagtagcacctttgcaaaacaaagaggtagagactccctcggctggccgtgtggactttgcattcaatcagaatttggaagaaaagacttcatattcactggcaagactgcaggaccagaataaagccttggaagggcagctgccacctttacaagaaaactggtatggaagatattctacagcatccagagacatgtattttgacatcccactggaacacagagaaacaagtattattaaaaggcatccaccccaaagacttcaaaagcttgaacccattgacttgccacgagtaattacttcaggaagactcctgagccagcgagaagccaggacaatgcacaaagcaaagcaggtactagaaaagaaaatgcaaactccaatgtatacttctgagaacagacaatatttgcataagatgcaagtgctggaaatgatccgtaaaagacaagaggcccaaatggagttaaagaaaagtcttcatggagaggcaagaattaataagcaaagtccaagggaccataaagccaagaaaacccttcaaagcaccccaaggaatgatgaccatgaccttctaaccatgttgcctgatgaaatcttgaacagaggtcccggaaattcaaaggatacagaatttttgaaacatcaagcagtgaataactgctgtccctggaaaattggcaaaatggaaacatggcttcatgaacaagaggcccagggacagcttctctgggacagttccagctctgactcagatgagcaggggaaagatgagaagaagccacgagcactggtgaggaccaggacagagagaatcccacttttcgatgagttttttgatcaagaataagaatactattcattaacctagaaactgagtgctttgaaagcttgttttactctcaaaatcttccaaactgatatatgaattactttgaggacagcaaatcactttggtaaaaagaaatgatatctttagagtcttatgattaacaagtccgtcacatgtgctgttaactattgctgcatcactaaatgcctcaaaacacaggggctaaccaagagccattttattgtctcactttcctgtgggttgctgagttcagctaggtggttcttctgctgttcccttttgaaatctttcatgtcattgaaattggactacatttggactactaagactggagtcatccagaggccccattaggacactgacacagggggaccttgccccctatccatgtagcctcagagcatctgcatatgatctcttcagcaggacactgcagagatttctctcatatgagcccagggctcccaaaagcaattgtctcaagaggaggaaacagaagttgccagtcttcttaaaagctagtcatagaactgactttgcatcacttccaccatgttctgttggttaaagtcatagaccagcttggagttaatgcagaagaggactacacaagggcatgagtgccaaagtgtggtcctttggggttcatctttgacatttgccacctcaccatgtttttaaaaagaaaattagattacataaaacaaatagatgggctggatgtggtggctcacacctgtaatcccagcactttgggaggccgaggtgggcagatcacttgaggtcaggagttcaagaccagcctggccaacatggtgagacaccgtctctactaaaatacaaaaattagccagacatggtggcattcgtctgtaatcccagctacttgatgcgaaggctgaggcaaaagaattgcttgaacccaggagatagaggttgcaatgagccaagatcactccactgcactccagcctgggcgacagaatgagactctgtctcaaaattaaaaaacaaaaaaccaaaaacaaatagatgaaaaagtagactggagacaaataaaagtgagtttctaaaggaaattcacagtaatgctgcattaaacactaagctcacttaggtcactttctagtgagctaaccgtaacagagagcctacaggatacacgtgagataatgtcacgtgtagaagatcgttgtgaattaaagttcaaaattaagacttcttagattatgatgtagattttagagctccttaaaacataaagcgaatcttataaatgttcaattctaaagttattccacttggaaaaattagcttttgggacaatttttaagaacttttgtgtaaatgcagctccatgtttagcataatctaaaaataatttcaagcaatccagaatcttccaagaatttattaaagctttaaaacaaagcaaaacaaaaagacccttttgtgccttatatgggaagactcc

SEQ ID NO: 11805 - protein, 296 aa, Homo sapiens
MGLSHSKTHLRVIKVAPLQNKEVETPSAGRVDFAFNQNLEEKTSYSLARLQDQNKALEGQLPPLQENWYGRYSTASRDMYFDIPLEHRETSIIKRHPPQRLQKLEPIDLPRVITSGRLLSQREARTMHKAKQVLEKKMQTPMYTSENRQYLHKMQVLEMIRKRQEAQMELKKSLHGEARINKQSPRDHKAKKTLQSTPRNDDHDLLTMLPDEILNRGPGNSKDTEFLKHQAVNNCCPWKIGKMETWLHEQEAQGQLLWDSSSSDSDEQGKDEKKPRALVRTRTERIPLFDEFFDQE

SEQ ID NO: 11806 - DNA, 2235 bp, Homo sapiens
  CDS (55)..(1752)
gttcaggctggaaaaggatcttctagccagctgtaccgagagagtgccacgaccatggaaaaactggctgttctcaaagcttgggcagaggtatatgtggtcgctatgaatattaaaaaggaagcagagtcaaaaccaaaaagagcaattaaaaatactgacgatgatgatgacgactgtggtaccatcgatgaactgccaccagatagtttaataacactggtacaacctgaactaccaacactcagtcgcctgtggttagcagcattaaaagattatgcactcttgactttaccagccgaattttctagtcagcttcctccagatggtggagcattttatacccctgaaactattgatacagctagacttcactatcggaattcctgggccccaattctccatgcggtggcactttggttaaatagcacaggatttacgtgctcagagtctacagaagcagcagcaatatctggtttacaaaaacgttctacatctgtcaatttaaaccaggcatcaggagcagtgggtagtgctaaatctttgccagaaattaacaaagacagaatgcatctgattttaggtgtgagtatacagtttctttgttcccctagacctgaggagcccattgaacatgttacagcatgcctgcaggccttacataccttgctagactccccttatgctcgagtccatattgcagaagatcagctgataggtgttgggttgctgagtgttttgcaccgccttctattgacctggaatccatcatctgtccagctgttggttactggagttgtacaacagatagtaagagctgctcaggattatttgcaagagaaaagaaacactctaagatgtatgacaatcctgcccacaattctgttcttaattgcaagaatattgaaagacacagcaataaagtctgcagataatcaggttcctccaccagtcagtgcagctcttcaagggattaaaagtattgtgacactttcaatggccaaaactgaggctggcgttcaaaaacagtggacagctctgattcgtagcacgcttgcttgcatcctggaatattctcaaccagaagactctgtacctacacctgatgaagtaagcatgctaacagcaattgcactcttcctgtggtctgctagtaatgaaataataggagtccagtcattacagaatggctgcatgaacagatttaaaaatgcattaaattcatgcgacccatgggttcaagccaaatgttaccagcttctcctctcagtcttccagcattccaatcgtgccctttcaactccttatattcattcattagctccaatagtggttgaaaagctaaaagctgttgaaagaaacagaccagccagtaacatagagcttttagcggttcaggaaggaataaaagttctcgaaacactggttgctcttggtgaagaacaaaacagagtccagctacttgctcttttagttcccactttgatatcttacctgctggatgaaaattcttttgcctcagcaagttcagcttccaaagatcttcatgagtttgcactccagaatttaatgcatattggacctctgtatccacatgctttcaagacagtaatgggggctgctcctgagttgaaagtgcgtctagaaactgccgttcgagcaagccaagcgagcaaagctaaagcggctgccagacaaccagcccccgccatacattctgcaccaacaattaagctaaaaacaagttttttttaatttgtaatttcatttatttgtatttatgttgtcaactagcccctaattagtgatggccactgcatcattccaggctacctatgggttctgttttatttgtatattggtattatagtgcttccaagtaggttaagtgaaataatgctcacaccacttattgatttttaaggagtgattttttttatcatgtggtgaatatgttttcattttcctcctaataatgtttctcttttgttaacttatttatttttcaaacactgagccatagtcttaaatttaaatgctaaaaacaattgtatcatgtagtcgggcagcctattgatactgtcaggggaaaaaaatgggtcagaactcagcatctgtcatgaaaaaaatcaattgaaaaacaagcagattttaaattttgaagtaatcaaaataatggaaagtgtctgttttgtggtgtatatactatgaataaaatcacagcattttctaagc

SEQ ID NO: 11807 - protein, 566 aa, Homo sapiens [sequence omitted]

SEQ ID NO: 11808 - DNA, 1712 bp, Homo sapiens
  CDS (51)..(1139)
cagttagcttcaaacaaaaacgaaagttagaccaagggaacgtattagatatggaagtaaagaaaaagaaacatgataaacaagaacagaaaggaagtgtgggagctacattcaaattaggtgactctttgtcaaacccaaacgaaagagccattgttaaagaaaagatggtatcaaatactaagtctgtagacacgaaagcgagttcatctaaatttagtagaattctaactcctaaggagtatttacaaaggcagaagcataaagaagctccgagtaataaagcatcgaagaaaatctgtgtgaaaaacgtgccatgtgattctgaacatatgagaccaagtaaacttgccgtgcaggttgaaagttgtgggaaatcaaatgagaaacacagcagcggcgtgcagacctctaaagaatcattaaatggcttgacaagccatggtaaaaacctcaaaatccaccattctcaggagtctaaaacatacaacattctaaggaatgttaaagaaaaagttggtgggaagcagcctgataaaatatggattgataagactaaattagacaaattaaccaatataagcaacgaagctcaattcagccaaatgcctccccaagtaaaggatcaaaagaaattatatctgaatagagttgggtttaaatgcactgaacgtgaaagcatttctctcaccaaattagaaagttcacccaggaagcttcataaagataagagacaggaaaataaacataagacctttttaccggtgaaaggtaacacagaaaaatcaaacatgctggagtttaaattatgtccagatatcttactaaagaatacaaactctgtggaagaacggaaggatgtaaagcctcatcctaggaaggagcaagcccctctgcaagtttcaggaataaaaagtacaaaagaagactggttaaaatttgttgctacaaagaaaaggacacagaaagacagccaagagagagataatgttaattcaagactctcgaagagaagcttcagtgcagatggatttgagatgctacaaaacccagtaaaagattcaaaagaaatgtttcaaacctacaaacagatgtacctggagaagagaagcagaagccttggtagcagtcctgtaaaataattacaagatgtggttttgtaattgccactgggaaatttctttccttttctgttcaaaatatttcgctgaaactaatgagaaatgccatgataaagatttctcagagtttggttcccactttcattgtatttcattgaaagtgcttaattaaaatggcttgagaactttgggtagccatgtgtaagaaatggatggtattcaccggggaaacaaggtatttgaatttctactttattgaaccagatttaccattattttaaaaggaatgcttatacaaatcaatttgaaattctacccatcttgagggaggaccgttcctcagttaaggacttgtttatttaaatgggactgtaaatatgttttggtttctaagctatattagcaaaatttatttttcaaaaacgcccactgtgatgtgaatgtcaaaatatattcttaagtgttttataactaattgtaaactttttttcagaagtcttattttatacttgtgaaactgaacacaattttgggacaacgtttaaacattacttttcatacttgaaataaacatttattttttaaaaaact

SEQ ID NO: 11809 - protein, 363 aa, Homo sapiens
MEVKKKKHDKQEQKGSVGATFKLGDSLSNPNERAIVKEKMVSNTKSVDTKASSSKFSRILTPKEYLQRQKHKEAPSNKASKKICVKNVPCDSEHMRPSKLAVQVESCGKSNEKHSSGVQTSKESLNGLTSHGKNLKIHHSQESKTYNILRNVKEKVGGKQPDKIWIDKTKLDKLTNISNEAQFSQMPPQVKDQKKLYLNRVGFKCTERESISLTKLESSPRKLHKDKRQENKHKTFLPVKGNTEKSNMLEFKLCPDILLKNTNSVEERKDVKPHPRKEQAPLQVSGIKSTKEDWLKFVATKKRTQKDSQERDNVNSRLSKRSFSADGFEMLQNPVKDSKEMFQTYKQMYLEKRSRSLGSSPVK

SEQ ID NO: 11810 - DNA, 884 bp, Homo sapiens
gtatagtatccatgaatgaatttatggaaatagatatttgtgcagctcaatttatgcagagattaaatgacatcataatactggatgaaaacttgcatagaattctgattaaatagtgggtctgtttcacatgtgcagtttgaagtatttaaataaccactcctttcacagtttattttcttctcaagcgttttcaagatctagcatgtggattttaaaagatttgccctcattaacaagaataacatttaaaggagattgtttcaaaatatttttgcaaattgagataaggacagaaagattgagaaacattgtatattttgcaaaaacaagatgtttgtagctgtttcagagagagtacggtatatttatggtaattttatccactagcaaatcttgatttagtttgatagtgtgtggaattttattttgaaggataagaccatgggaaaattgtggtaaagactgtttgtacccttcatgaaataattctgaagttgccatcagttttactaatcttctgtgaaatgcatagatatgcgcatgttcaactttttattgtggtcttataattaaatgtaaaattgaaaattcatttgctgtttcaaagtgtgatatctttcacaatagcctttttatagtcagtaattcagaataatcaagttcatatggataaatgcatttttatttcctatttctttagggagtgctacaaatgtttgtcacttaaatttcaagtttctgttttaatagttaactgactatagattgttttctatgccatgtatgtgccacttctgagagtagtaaatgactctttgctacattttaaaagcaattgtattagtaagaactttgtaaataaatacctaaaacccaagtgt

SEQ ID NO: 11811 - DNA, 2936 bp, Homo sapiens
  CDS (98)..(2227)
agctgtcatggctgctcctgtacgtagtcacggtcttgtgctctaaggaaaacgacagcacgtgttctttttcactagtagaagtgacgttggtttcatgttgacaactttgaagccatttggaagtgtttcagtggagagcaaaatgaataacaaagcgggctcctttttctggaaccttagacaattcagtacattagtttcaacaagcagaactatgaggctatgttgtttgggactttgcaaaccaaaaatagttcattcaaactggaacattttaaataactttcataacagaatgcaatcaactgatatcattagatatctctttcaggatgcattcatttttaaatcagatgttggctttcaaacaaagggcataagcactctaacagcccttagaattgaaagactactttatgctaaaagactgttttttgactcaaagcagtctcttgtccctgttgataaatctgatgatgaattgaagaaagtaaaccttaatcatgaagtctccaatgaagatgttcttaccaaggaaacaaaaccaaaccgtatcagcagtagaaaactgtctgaggaatgtaattccctgagtgatgtgttagatgcattttcaaaagcgcccacatttcctagtagcaactatttcacagcaatgtggacaattgccaaaagactgtctgatgaccagaagcgctttgaaaaacgactgatgtttagccaccctgcatttaatcagctctgtgaacatatgatgagagaagccaagatcatgcagtataagtacctactgttcagtcttcacgccatagcgaagcttggaatccctcagaacactattttggtgcagactttgctgagggtgacccaggaacgtatcaatgagtgtgatgagatatgcctttcagttttgtcaactgttttagaggcaatggaaccatgcaagaatgttcatgttctacgaacgggattcagaatactagttgatcagcaagtttggaaaatagaagatgtcttcacattacaagttgtgatgaagtgtattggaaaagatgcaccgattgctcttaagaggaaactggagatgaaagccttgagggaattagacagattttctgttttgaatagccaacacatgtttgaagtactagctgccatgaatcaccgatctcttatactcctggatgaatgcagtaaggtggtcctagataatatccatgggtgtcctttaagaataatgatcaacatattgcagtcctgcaaagacctccagtaccataatttggatctcttcaagggacttgcagattatgtggctgcgactttcgacatctggaagttcagaaaagttctttttatcctcattttatttgaaaaccttggctttcgacctgttggtttaatggacctgtttatgaagagaatagtagaggatcctgaatccctaaacatgaaaaacattctatctattcttcatacttactcttctctcaatcatgtctacaaatgccagaacaaagaacagttcgtggaagttatggctagtgctctgactggttatcttcacactatttcttctgaaaacttattggatgcagtatattcattttgcttgatgaattactttcccctggctccttttaatcagcttctgcaaaaagacatcatcagtgagctgctgacatcagatgacatgaagaatgcttacaagctgcatactttggatacttgtctaaaacttgatgatactgtctatctgagggacatagccttgtcactcccacagctgccgcgggagctgccatcgtcacatacaaatgcaaaggtggcagaggtgctgagcagccttctgggaggtgaaggacacttctcaaaggatgtgcacttgccacacaattatcatattgattttgaaatcagaatggacactaacaggaatcaagtgctaccactttctgatgtggatacaacttctgctacagatattcaaagagtagctgtgctatgtgtttccagatctgcttattgtttgggttcaagccaccccagaggattccttgctatgaaaatgcggcatttgaatgcaatgggttttcatgtgatcttggtcaataactgggagatggacaaactagagatggaagatgcagtcacatttttgaagactaaaatctattcagtagaagctcttcctgttgctgctgtaaatgtgcaaagcacacaataaagtgaaaatcaaccttttcatattaggagacatgcatttgtaaaaattaataaagatgacaagtcagttgtcaatggaattgagctatctgctaagacaaaaaatgttacctcagttcactattaaaattaattttaggagtggaagaaatgttgttactgccatttaaaaatatgctgagaaaattccagaagggttatttttccaaccacacctattccctctagtgcccagatatttgatttgtgagctgtacgtttcaccttttcatctttgatctactaaaaactggtttcttagttgtgaggtgtcacaggcaggttgatgtgggtagtagtccttgtctttggaatctgaatatttatactcctgctctaagctgttctaagacttggggttatgcctttaaatcattttcaagcattggccaaataataattggacaaagttctaaagttgtcaagtgtgtaagaattagtgaggtagctgttgaaaatgagtgaggatggtatttgtatttgtaataagcactgcaggtagagatatttcatgggttataataagagaaacacagatgagatgtagatggtaaggagtcttactgttgttggggtccttcctttctctttcttttttcccccttacccctcccacaatttcatgaagtctttaaaattaaatatatagctgaattgtgttgtgaatc

SEQ ID NO: 11812 - protein, 710 aa, Homo sapiens [sequence omitted]

SEQ ID NO: 11813 - DNA, 2243 bp, Homo sapiens
  CDS (24)..(1475)
acttggtctcctgctttcgcgacatggccttcaattttggggctccctcgggcacctccggtaccgctgcagccaccgcggcccccgcgggtgggtttggaggatttgggacaacatctacaactgcaggttctgcattcagcttttctgccccaactaacacaggcactactggactctttggtggtactcagaacaaaggttttggatttggtactggttttggcacaacaacgggaactagtactggtttaggtactggtttgggaactggactgggatttggaggatttaatacacagcagcagcagcaaactacattaggtggtctcttcagtcagcctacacaagctcctacccagtccaaccagctgataaatactgcgagtgctctttctgctccaacgctgttgggagatgagagagatgctattttggcaaaatggaatcaactgcaggccttttggggaacaggaaaagggtatttcaacaataatattccgccagtggaattcacacaagaaaatcccttttgccgatttaaggcagtaggttatagttgcatgcccagtaataaagatgaagatgggctagtggttttagttttcaacaaaaaagaaacagagattcgaagccaacaacaacagttggtagaatcattgcataaagttttgggaggaaaccagacccttactgtaagtgtagagggcactaaaacattgccagatgatcagacagaagttgttatttatgttgttgagcgttcgccaaatggtacttcaagaagagttccagctacaacgctatatgcccattttgaacaagccaatataaaaacacaattgcagcaacttggtgtaaccctttctatgactagaacagaactttctcctgcacagatcaaacagcttttacagaatcctcctgctggtgttgatcctattatctgggaacaggccaaggtagataaccctgattctgaaaagttaattcctgtaccaatggtgggttttaaggaacttctccgaagactgaaggttcaagatcagatgactaagcagcatcaaaccagattagatatcatatctgaagatattagtgagctacaaaagaatcaaactacatctgtagccaaaattgcacaatacaagaggaaactcatggatctttcccatagaactttacaggtcctaatcaaacaggaaattcaaaggaagagtggttatgccattcaggctgatgaagagcagttgcgagttcagctggatacgattcagggtgaactaaatgcacctactcagttcaagggccgactaaatgaattgatgtctcaaatcaggatgcagaatcattttggagcagtcagatctgaagaaaggtattacatagatgcagatctgttacgagaaatcaagcagcatttgaaacaacaacaggaaggccttagccatttgatagcatcattaaagacgatctagaagatataaagctggtcgaacatggattgaatgaaaccatccacatcagaggtggtgtctttagttgacagttcacaaacttgtgtaaaggtttgtgaaatgcatcttcttactgcatcagaccttccttaagaatgaaaccgaccacatggagggaaaaagaaaacaattctttcttggattggttttttgagaagtttactgacaaattactgttcatcaaatctgaaatagtcacctcacagctcttcaaagaaaacctttgaaagatttatatctaaaagctgtatttactttaaaagaagtgcataattaccaaaattgtatgtactattgtacatttttacaacagcattttcttaaacataatctgtgtttaatgattattgtccattgagcctgtactctgctttccataccaagtaaatatgaaataatctactttgcacataacagaagaaactataattacttggctgttggagatttgtacttgagtataaatgtacaccagtttttgtatttgtgaactcatctgtgggaggagtaaagaaaatccaaaagcatttaatgttttgtttttgttctataaagatatgaaaatgtatttttatattattttacttatttggaatttacagagcacacctaagcaattaggatataacaaaactaaccatttttgcaaccattttgttttttaagcctttttatttctaaaaagatgaaaacttataaataaattcttaatttgtaattactttt

SEQ ID NO: 11814 - protein, 484 aa, Homo sapiens
MAFNFGAPSGTSGTAAATAAPAGGFGGFGTTSTTAGSAFSFSAPTNTGTTGLFGGTQNKGFGFGTGFGTTTGTSTGLGTGLGTGLGFGGFNTQQQQQTTLGGLFSQPTQAPTQSNQLINTASALSAPTLLGDERDAILAKWNQLQAFWGTGKGYFNNNIPPVEFTQENPFCRFKAVGYSCMPSNKDEDGLVVLVFNKKETEIRSQQQQLVESLHKVLGGNQTLTVSVEGTKTLPDDQTEVVIYVVERSPNGTSRRVPATTLYAHFEQANIKTQLQQLGVTLSMTRTELSPAQIKQLLQNPPAGVDPIIWEQAKVDNPDSEKLIPVPMVGFKELLRRLKVQDQMTKQHQTRLDIISEDISELQKNQTTSVAKIAQYKRKLMDLSHRTLQVLIKQEIQRKSGYAIQADEEQLRVQLDTIQGELNAPTQFKGRLNELMSQIRMQNHFGAVRSEERYYIDADLLREIKQHLKQQQEGLSHLIASLKTI

SEQ ID NO: 11815 - DNA, 2397 bp, Homo sapiens
  CDS (156)..(1091)
atcttgctggtttgcggccggtcttggatgaagcggcggccgtggtgagagcgtggggaagggtggggtgagggggcgaggccgcagctagggcggcgaaactctcctcccctcggccccaccgcgtgggacggcgtgaacgtggtgtcggagggatgtcagccttctctgaggcggcgctggagaagaagctgtcggagttgagcaactcgcagcagagcgtgcagaccttgtccctgtggctcattcaccaccgtaaacactcgcggcccatcgtcaccgtgtgggagcgggagctgcggaaagccaaaccaaacaggaagcttacttttctctacctagccaatgatgtcatacagaacagcaagaggaaggggccagagtttacaaaagattttgcaccagttatagtggaggcttttaagcatgtttcaagtgaaactgatgaaagttgtaagaagcaccttggaagagtgttatctatttgggaagaaaggtctgtttatgaaaatgatgtattagaacaacttaaacaagctctgtatggtgataagaagcctaggaagcgaacttatgaacagataaaggtggatgaaaatgaaaactgttcctctctgggatctccaagtgaaccaccacagactctagatctcgttagagcattacaagatctggaaaatgcagcctcaggtgatgcagcagttcatcagaggatagcttctttacctgttgatgtccaagaagtatctctattagataaaataacagataaagaatctggagaaaggctttccaaaatggtagaggatgcgtgtatgttgctggcagattacaatggcagattggcggcagaagtagatgatagaaagcaactcactcgaatgttagcagattttcttcgttgtcaaaaggaagcccttgcagagaaagagcataaattggaagagtacaagcgcaagctagccagagtttccctggtgcgcaaagaactcaggtcccggatccagagcctgccagacttatctcgattgcccaatgtcactggcagccacatgcacctgccctttgcgggagacatctacagtgaagattgatggaccagcctctttccaggtcccaggactttgcaagagatggagacaggttaggtggatagtcctgtagtgttatttttgtatattgttgagaaagaaacactaacaaaaggaacaacgagtaatttataaaattgtttaaaatgttggtttgtttactattttattggtaaattaacatgacttaatttgaacaaagtgatgatttgtgtgtattaataagctcacaaatagtaattattttcaaaagatctttttgtaaattttttttttgatccaaggccttgtgagaaatctcttgtttgtatttcttcaggtattttcaattgtttttctttattttcttcagcatttaatcactgtatactatgtaattcctgaaggggaagaactaattaggagttgattgagactttattatggtatagttaggacttgattgtagaagggactaaatgttccaacataatctttacccttctccccaaacaaaatatcaattctgtgtctctacatgcctttgtttccttagaggtcggtaatttaacataaaacagggatgtcactttgaggggcagatgaaagtctagagaactgttccttaatagcattgtaaaagttccattccaactgccagtgtagattttaaaagtgttaaatagtgactcccttgattaaactgtttgtaattatttgagtagattaataatgaaaatactttggaaataatatacattttgacattctaccaagaggacaactttggttctggaactggtttctatttgtcaaatcagtttccttttaacataattaatccctttaacaaaaagccgtctatgggattaaaagacacgtgaaatgatacttttattattcccttgctcatataactttaaaaataatacttttagctctaatagctcaagaacacaatattcgttaatgttcagtaaagtagcctgagacattttcaatgtttccttaaggtttttgaatgactgtatatttggcagttaagcagtgccacactacagggtagatatggtaaattttatatttgtatatttacagttacaaaacaaatgtacttttaccttttatttctgaccctgtgtgttagagcagttgcatgctctcctgctgttaaaaacacattgttaagctgtggatttgtactcaataatgacttaggataaacatttattttcattcattgctttacatactagacatttttcttctctttgtaagtagattcaaattagatagtcaataaaacatcttgaaaatcccacaagcc

SEQ ID NO: 11816 - protein, 312 aa, Homo sapiens
MSAFSEAALEKKLSELSNSQQSVQTLSLWLIHHRKHSRPIVTVWERELRKAKPNRKLTFLYLANDVIQNSKRKGPEFTKDFAPVIVEAFKHVSSETDESCKKHLGRVLSIWEERSVYENDVLEQLKQALYGDKKPRKRTYEQIKVDENENCSSLGSPSEPPQTLDLVRALQDLENAASGDAAVHQRIASLPVDVQEVSLLDKITDKESGERLSKMVEDACMLLADYNGRLAAEVDDRKQLTRMLADFLRCQKEALAEKEHKLEEYKRKLARVSLVRKELRSRIQSLPDLSRLPNVTGSHMHLPFAGDIYSED

SEQ ID NO: 11817 - DNA, 2645 bp, Homo sapiens
  CDS (355)..(1530)
gacggtggcggcgagcggcgtcagagcttgagggggggttgacggcttctggcgggtggcggtgttgaaggcgagagcttgcttggcccgtgtcgcttctgtcccaagaaccggacggagagtgagggcacgagggtcgctgtcgggggctgtcgtcttccacgtacacgtcgtcgtgaggagcgcagtccggactcttcccgcaacccctccggctccctttccgcacgcctcgaggcggcggcggccaccgagacagcagcgcaccttcccccatcccttccccttatcccccagcccaaaagggcccggtctgcgccccacccccgcccgtccgcccgctacgccgccgccatgtcggcgcaggcccagatgcgcgcgatgctggaccagttgatgggcacctcccgggacggagatacaactcgtcaacaaatcaaattcagtgatgacagagtatgcaagagtcaccttctcaactgttgtcctcatgatgtcctttctggaactagaatggatcttggagaatgtctgaaagtccatgacctggctttaagagcggattatgaaattgcatccaaagaacaagattttttctttgaacttgatgccatggatcatctgcagtcattcattgcagattgtgatcgtagaacagaagtggccaagaaaagattagcagaaactcaagaagagattagtgctgaagtagcagcaaaggcagaacgtgttcatgagttaaatgaagaaattggtaaattgttagccaaggtggaacaactaggagctgaagggaatgtggaggaatcccagaaagtaatggatgaagtagagaaagcacgggcaaagaaaagagaagcagaggaagtttatcgtaattctatgccagcttccagttttcagcagcagaaacttcgagtctgtgaagtctgctctgcctatttaggacttcatgataatgacagacgactggctgatcattttgggggtaaactgcacctgggatttattgaaataagagagaagcttgaagaattaaagagagtcgtagctgagaagcaggagaaaagaaaccaggaacggctgaaacgaagagaagagagagagagagaagaaagggagaagctgaggaggtcccgatcacacagcaagaatccaaaaagatccaggtccagagagcatcgcagacatcgatctcgctccatgtcacgtgaacgcaagaggagaactcgatccaaatctcgggagaaacgccatcgccacaggtcccgctccagcagccgtagccgcagccgtagccaccagagaagtcggcacagttctagagataggagcagagaacgatccaagaggagatcctcaaaagaaagattcagagaccaagacttagcatcatgtgacagagacaggagttcaagagacagatcacctcgtgacagggatcggaaagataagaagcggtcctatgagagtgctaatggcagatcagaagacaggaggagctctgaagagcgcgaagcaggggagatctaactagctgtgtacatttcttcagtccttaagcttcctacggagttacgtactattgtttagttcacagctgttcagggtgacagtgagcagatccagacaccagatccagctaggctagatgtacagtatctaacttgatctgaactgaacctgttttccttgatgatgcctaaaactacatccatagtttctggtgaacctgtaatacagttctgaaagtacagttttatataataagatgctgatctctttattctttcaagtaagagtgctagtgaacaaattgtgttacttgccttgggattttttgaacgtttgtaaaatgctgtcttcctagtccaaacagctgcagctttgggcatttttctttttaattattcttcctctgactttgtatcccttaatacctacactctccaattgtaagagaaagggggcagggaagcaatatagcttccattctaaggctgtattcccgttatgaattactagctgattacagttcagagcattgatcctggaatgtgtgctggagaaatttaaaatactggggttttttgtttaatggtgcctatttagagttggaagttgaacagctgttgcattacatacttttgcttttttattgaaattttgaaatcaaacgtcttgatttttctgttctgttgaattgctatgttcaggatgttctagggggtgggggcagggactcttttcgtaataagcacttgttttattttgtgtgtgtggagtataaaggctacacccttattgtaaaaaaataataataataaaatgaaagaaacaatcaccaccaccattattaaactgtaacttgtctagtaaattgtcactagaactatttgctgtgggcatttcctctattctgttacgtcattaacagtgccttactgtgcaaggcaccaaaggacataaatacgtacttgcaaagattccagatgagctgttcatgtgggccccttgctgactatattccagccacttcagggttgtttgtaatgaccgttatagagaagggctcgacctgcagaagaaactggggtgtttttattctcattcaacaaacccaaataaaaacagtatatgtaacc

SEQ ID NO: 11818 - protein, 392 aa, Homo sapiens [sequence omitted]

SEQ ID NO: 11819 - DNA, 1022 bp, Homo sapiens
acaaaagagtgctaactactctaggagagattaaagcctgtgaaatagaacttttccagataatggcgagtttttaggcttgctcatgctgaagcttaatataagctaataagtagagaaattaggaggcttggatattgcaaactttattggttggggtgttacccaggctaatagaaaaaaaattatatcctagaaagacagaacaggtgcgacttctgagaagaaaggttagagaagactagaaaggctgggaccaccttgaatttggcacacacacacacacacccacacgcacacacaaaatcaccaaatgatctggaatgtgctatgcgatgagtcagcctccactgctgtacgtccttggctacagactcctggaacagcagctcttctcaaggctagttgtgacagactcctggaacagcagctcttctcaaggctagttgtgacatccaaagtgacaagagcaggcccatattcagccacctcatccaggccttatcaaagaagagtcttatatgagatcaaatggctgcctttccccacaagattatatttttcctggtatgctctactttgacacatgtggctttctcaggaattttcaataaacgtgacttcactaggtggcctaagccccgatgtaaaatgtatatcccactggaccctgattacaatgcagactgccccaatgtgacagcacctgtttgtgcctcaaatggccacactttccagaatgagtgtttcttttgtgttgaacagagggaatttcattatcgtataaaatttgaaaaatatggaaaatgtgattaatgggtaccagagtaactacacttgcttattctttttctacttaattcagaatagtatttcttttagagtgtgagaatgtaaattaaataacatccctatgctgtacttaaatgtcgaacaaaatgagagacaaaaatgaaggaatcaaactgacaggaaccaaatatcacatttgttacaaataaacaacaaaagagctgatattc

SEQ ID NO: 11820 - DNA, 2204 bp, Homo sapiens
  CDS (127)..(1059)
gcgcgctctcgccggcccgccccgaaccgccccgcgctgggaatttgcggcggcctccgccggggcagccgagctgaaccggtctcttcctcggaaaggcagggccgaggggcctgcggggcagccatggaggcgacgcggaggcggcagcacctgggagcgacgggcggcccaggcgcgcagctgggcgcctccttcctgcaggccaggcatggctctgtgagcgctgatgaggctgcccgcacggctcccttccacctcgacctctggttctacttcacactgcagaactgggttctggactttgggcgtcccattgccatgctggtattccctctcgagtggtttccactcaacaagcccagtgttggggactacttccacatggcctacaacgtcatcacgccctttctcttgctcaagctcatcgagcggtccccccgcaccctgccacgctccatcacgtacgtgagcatcatcatcttcatcatgggtgccagcatccacctggtgggtgactctgtcaaccaccgcctgctcttcagtggctaccagcaccacctgtctgtccgtgagaaccccatcatcaagaatctcaagccggagacgctgatcgactcctttgagctgctctactattatgatgagtacctgggtcactgcatgtggtacatccccttcttcctcatcctcttcatgtacttcagcggctgctttactgcctctaaagctgagagcttgattccagggcctgccctgctcctggtggcacccagtggcctgtactactggtacctggtcaccgagggccagatcttcatcctcttcatcttcaccttcttcgccatgctggccctcgtcctgcaccagaagcgcaagcgcctcttcctggacagcaacggcctcttcctcttctcctccttcgcactgaccctcttgcttgtggcgctctgggtcgcctggctgcggaatgaccctgttctcaggaagaagtacccgggtgtcatctacgtccctgagccctgggctttctacacccttcacgtcagcagtcggcactgagtccctggcaccaggctctggcgctctgctgggtgggagggtgggccatggagggcatctgaatacaggagtagggggggtgtgggtgtgtaaccagagaccgagagcatgagtggggtgtgcctcgtgtgcgtggattcgtgtgtgtgtgtgtgtcttgtatatgtgtgcgcagagtgcatcattttcagactctactatttccgtcaagtttctgtttgatttggatcatctcaggatcggattctgttttagagtgtttctgggccaggatccgggcccctgccctcctctgcacctgaccacactccctactcagggctagtctgttcttcccggacatcttctggtagccgtgcaggagagggctgggtggggcagaggccaggaggggacctggtgtgtcacctgcccaccacctggctcatccctcaggcccaccctgaccctacattacataggttacgtcagcctactgtggctgttgagcaaagcatttctcctttctgggcctcatttgcactagatgggcctgtggtcccaaagtaggtcagtaggttggggttgctgacaccccttgggtgcagctttgggacagatgagtggctctgtcctgtcactgccccctccctgcctgggggctatgtgcactccagacccctgcccaggctcaggcccatgaggtatggagacaccctggcccccaggagctggaggcaccgcccactcccctggcattccagctttgcaggtgaccctcctctacccaaagctctgtccccctgctcccactccagaagaactgcggcacgtgcttcgggcagcctagccacaggctttgagcgcctgcactcctgggggctggagggtggggtgccaaaggccctgagcaaaagccagagctcctctcatcaaagcctttacaaggtgctgggcccagaggctttgccttgacagagtggcccagggtttcaagggaggaggaacctccccctacctaggacccttcctgtggggggtctacagagtcagggacagaagggaagggacccacaggaagtcacagtggtgcccagggatgtgtcagcccccagccacggggacgcgggattcaagaatgaagtaaatacagtcacagcccc

SEQ ID NO: 11821 - protein, 311 aa, Homo sapiens [sequence omitted]

SEQ ID NO: 11822 - DNA, 2631 bp, Homo sapiens
  CDS (39)..(998)
accttccaacccagccctcggctgagccgcgccgcaccatgcccgccgtggacaagctcctgctagaggaggcgttgcaggacagcccccagactcgctctttactgagcgtgtttgaagaagatgctggcaccctcacagactataccaaccagctgctccaggcaatgcagcgcgtctatggagcccagaatgagatgtgcctggccacacaacagctttctaagcaactgctggcatatgaaaaacagaactttgctcttggcaaaggtgatgaagaagtaatttcaacactccactatttttccaaagtggtggatgagcttaatcttctccatacagagctggctaaacagttggcagacacaatggttctacctatcatacaattccgagaaaaggatctcacagaagtaagcactttaaaggatctatttggactcgctagcaatgagcatgacctctcaatggcaaaatacagcaggctgcctaagaaaaaggagaatgagaaggtgaagaccgaagtcggaaaagaggtggccgcggcccggcggaagcagcacctctcctcccttcagtactactgtgccctcaacgcgctgcagtacagaaagcaaatggccatgatggagcccatgataggctttgcccatggacagattaacttttttaagaagggagcagagatgttttccaaacgtatggacagctttttatcctccgttgcagacatggttcaaagcattcaggtagaactggaaccgaggcggaaaagatgcgggtgtcccagcaagaattactttctgttgatgaatctgtttacactccagactctgatgtggccgcaccacagatcaacaggaacctcatccagaaggctggttaccttaatcttagaaacaaaacagggctggtcaccgccacctgggagaggctttatttcttcacccaaggcgggaatctcatgtgtcagcccaggggagccgtggctggaggtttgatccaggacctggacaactgctcagtgatggccgtggattgcgaagaccggcgctactgctttcagatcaccacgcccaatggaaaatcgggaataatcctccaggctgagagcagaaaggaaaatgaagagtggatatgtgcaataaacaacatctccagacagatctacctgaccgacaaccctgaggcagtcgcgatcaagttgaatcagaccgctctgcaagcagtgactcctattacaagttttggaaaaaaacaagaaagctcatgccccagccagaacctgaaaaattcagagatggaaaatgaaaatgacaagattgttcccaaagcaacagccagtctacctgaagcagaggagctgatcgcgcctggagcgccgattcaattcgatattgtgcttcctgctacagaattccttgatcagaacagagggagcaggcgtaccaacccttttggtgaaactgaggatgaatcatttccagaagcagaagattctcttttgcagcagatgtttatagttcggtttttgggatcaatggcagttaaaacagacagcactactgaagtgatttatgaagcgatgagacaagtattggctgctcgggctattcataacatcttccgcatgacagaatcccatctgatggtcaccagccaatctttgaggttgatagatccacagactcaagtatcaagggccaattttgaacttaccagtgtcacacaatttgctgctcatcaagaaaacaagagactggttggttttgtcatccgtgttcctgaatccactggagaagaatctctgagtacatacatttttgaaagcaactcagaaggcgaaaagatatgttatgctattaatttgggaaaagaaattattgaggttcagaaggatccagaagcactggctcaattaatgctgtccataccactaaccaatgatggaaaatatgtactgttaaacgatcaaccagatgacgatgatggaaatccaaatgaacatagaggcgcagaatccgaagcataactcacttgcgcctgtgggggaagagcgaacaggaaggagagctacctcctaagggttttaacgtctctgacatacaggcacactgacctgatttccgaaggctgacaatcgtttgtggaatgtaatcttgatgccttgatactgagacttgggagggaaactaagaaatggttgacagcgttcccacccatctacaatgttattttaggtgctttgtggtaagtcttttttcttagattgcgctaaaatttcttagattgttcagcgctcagaacaaaagtttgaaaaatgcattgttcatatgaatgtcatctcttttcagtttccagtatcctttttaaaaaatggcaaaagcctagatttacaatttgatgaacactaaatatttcttattaatataatctatttttgtattttacttaatgagctttaagtgcctgtcgttctgaaaattgtgtatttataattcagcttatctcataattggacctaatagcatttctttgtgcagttaggtgatgagcactgctttgaggcccaagcactagtagagatgcgcgatacaggtctagtttcggtaactgttccagacatcaagc

SEQ ID NO: 11823 - protein, 320 aa, Homo sapiens
MPAVDKLLLEEALQDSPQTRSLLSVFEEDAGTLTDYTNQLLQAMQRVYGAQNEMCLATQQLSKQLLAYEKQNFALGKGDEEVISTLHYFSKVVDELNLLHTELAKQLADTMVLPIIQFREKDLTEVSTLKDLFGLASNEHDLSMAKYSRLPKKKENEKVKTEVGKEVAAARRKQHLSSLQYYCALNALQYRKQMAMMEPMIGFAHGQINFFKKGAEMFSKRMDSFLSSVADMVQSIQVELEPRRKRCGCPSKNYFLLMNLFTLQTLMWPHHRSTGTSSRRLVTLILETKQGWSPPPGRGFISSPKAGISCVSPGEPWLEV

SEQ ID NO: 11824 - DNA, 1759 bp, Homo sapiens
  CDS (141)..(851)
atttcattgttactattgttgttcttaaaaatgtcctatcttttacaagagcctttgggaaaaacctccaggggcaaacctctgatgtcttctttgcggccggtagcttgactgcagtactgcattcactcaacgaagtgatggaaaatattgaagtttatcatgaattttggtttgaggaagccacaaatttggcaaccaaacttgatattcaaatgaaactccctgggaaattccgcagagctcaccagggtaacttggaatctcagctaacctctgagagttactataaagaaaccctaagtgtcccaacagtggagcacattattcaggaacttaaagatatattctcagaacagcacctcaaagctcttaaatgcttatctctggtaccatcagtcatgggacaactcaaattcaatacgtcggaggaacaccatgctgacatgtatagaagtgacttacccaatcctgacacgctgtcagctgagcttcattgttggagaatcaaatggaaacacagggggaaagatatagagcttccgtccaccatctatgaagccctccacctgcctgacatcaagttttttcctaatgtgtatgcattgctgaaggtcctgtgtattcttcctgtgatgaaggttgagaatgagcggtatgaaaatggacgaaagcgtcttaaagcatatttgaggaacactttgacagaccaaaggtcaagtaacttggctttgcttaacataaattttgatataaaacacgacctggatttaatggtggacacatatattaaactctatacaagtaagtcagagcttcctacagataattccgaaactgtggaaaatacctaagagacttttaaaaataggctttcttatatttgatatttggaagaaaaagccgtaaggtgtatgtagaccacttaatcactaaatatctttgcctataggactccattgaatacattagccattgataacctacctgtttaaatggcccctgtttgaactctcaagctttgaagacctacctgttcatccagaagagaacgttgaaagtgccatgtttccttttgcgtgatctctgttgatggcactctggaattgtttcagttaagtcattttagacatagcatttattatcactgtggatctctacttgttgggtgttatgaattctttgaagaaatatattttgaagaggtgtgggaggaaggaatacattttataaaatgttgtagtgaagcccacaattgacctttgactaataggagttttaagtatgttaaaaatctatactggacagttacaagaaattaccggagaaaagcttgtgagctcaccaaacaaggatttcagtgtagattttgtctttcttgaacttaaagaaacaaatgacaaagtttgaatggaaaagcctgctgttgttccacatctcgttgctgtttacattcctttgtggagcctacatcttcctaagctttttagcaggtatatgttgaacacttctgtttcatggttgagacagaatcagaggccatggatactgacaactgatttgtctgttttttttctctgtctttttccatgactcttatatactgcctcatcttgatttataagcaaaacctggaaaacctacaaaataagtgttgtggtttatctagaaaaatatggaaaatattgctgttatttttggtgaagaaaatcaattttgtatagtttatttcaatctaaataaaatgtgaattttgttt

SEQ ID NO: 11825 - protein, 237 aa, Homo sapiens [sequence omitted]

SEQ ID NO: 11826 - DNA, 2087 bp, Homo sapiens
  CDS (1)..(495)
atggcgccggaggagaactcggggagcgaactcttgctgcagagtttcaagcgccgcttcctggcggcgcgcgccctgcgctccttcccctggcagagcttagaagcaaagttaagagactcatcagattctgagctgctgcgggatattttgcagaagcacgaggctgtccacacagagcctttggatgagctgtacgaggtgctggcggagaccctgatggccaaggagtccacccagggccaccggagctatttgctgacgtgctgtattgcccagaagccatcgtgtcgctggtcggggtcctgcggaggctggctgcctgccgggagcaccagcgggctcctcaattctacatggcccttaccgtctgcaacccagagatgtgccagctgttcaccaccgagctatgctggactgggatcagatgggaagcggaagctcatcatgaccagaaactgtttccctacagagagcacttggagatggcaaagctgaacctcacactgtaggactcacacatgactccaacgggattgtgagaattaagtcactctcgtgggaagaatttttatatgggaaagcggataaaattttcattggactggaatgtttggagaatgttaaattccaaatcaggaaccacaaactgcgctctaataagacatcggctatctaagcatgtgggttccccctttctgccagcagttctggttcttaagaaaatcaccataaatcagacatgaaaattctggctccaaaaatagcattttcattgtgcaaatgaaaacgtgtgtatcaagtatgacattcccccaacgtggacacacttggttcctcacaaagccaagcccgctgcagctgccacatccctggacacactcgtttcctcacaaagccaagcccgctgcagctgccacatccctggacacactcggttcctcacaaagccaagcccgctgcagctgccacatccctggacacactcgtttcctcacaaagccaagcccgctgcagctgccacatccctggacacactcgtttcctcacaaagccaagcccgctgcagctgccacatccctggacacacttggttcctcacaaagccaagccggctgcagctgccacatccctgggtttatgatgcagcaggtgcttttttcaagacaggaatcaaagtgttaggaacatggcagaaaggtgacacctggagaccaaatgcagggtaaggagtactgcagaggtcacagggaagtcacagaacagtaatacgctagcaggggcatggggcgtgaagaacagaagacaggaagcgtttcagagactccaaagaagaaatcagggccaaccacagcttcccgagtcattcaccaggtggcaccactgccttcatttcagcttccggccactgggaggcgctgctcgaaagggtttgccctgagacaccaagaagaagctgcgggaaggacagcaggggccctggggttttagcctctggcccaggagttatgtgtccataaccaaagggagcacagtctgcacccagctctcatcccatcagagctgctgcgactcccgcaggttcttccagaactggtttagcttgcctgcaggatcaggaaagtttgagaaaagcatctgcaaaatactaaagagcagagcttacttcattgtctgtccccaccccatcccaggtcaccacctggctgaacccaggtccccgacccaaaaacaacccctcccaagtccctaactccctcacttggacttgagacccttcacaacccagcagcgctccgcctccaacttgacatcatgctttctggaaacttccccgtgtgtcccactttcccacacttggtgcgctggagcaccttccggcctctacatgctgtacgttcccctgtgagcaccctcctctcagcctctggccaacacagtcccacccatctgtgggtaacaagggggtgtgggtgttcttttcagccttgctaaactgtctgaatcaaggatcacaaactacagcctgcaggccaaatccagcccacagcctgtgtttgtaaataaagctttattggaacaaagcc

SEQ ID NO: 11827 - protein, 165 aa, Homo sapiens
MAPEENSGSELLLQSFKRRFLAARALRSFPWQSLEAKLRDSSDSELLRDILQKHEAVHTEPLDELYEVLAETLMAKESTQGHRSYLLTCCIAQKPSCRWSGSCGGWLPAGSTSGLLNSTWPLPSATQRCASCSPPSYAGLGSDGKRKLIMTRNCFPTESTWRWQS

SEQ ID NO: 11828 - DNA, 2161 bp, Homo sapiens
  CDS (194)..(1285)
ccttcctggtctcccttctcccgctgggccggtttatcgggaggagattgtcttccagggctagcaattggacttttgatgatgtttgacccagcggcaggaatagcaggcaacgtgatttcaaagctgggctcagcctctgtttcttctctcgtgtaatcgcaaaacccattttggagcaggaattccaatcatgtctgtgatggtggtgagaaagaaggtgacacggaaatgggagaaactcccaggcaggaacaccttttgctgtgatggccgcgtcatgatggcccggcaaaggggcattttctacctgacccttttcctcatcctggggacatgtacactcctcttcgcctttgagtgccgctacctggctgttcagctgtctcctgccatccctgtatttgctgccatgctcttccttttctccatggctacactgttgaggaccagcttcagtgaccctggagtgattcctcgggcgctaccagatgaagcagctttcatagaaatggagatagaagctaccaatggtgcggtgccccagggccagcgaccaccgcctcgtatcaagaatttccagataaacaaccagattgtgaaactgaaatactgttacacatgcaagatcttccggcctccccgggcctcccattgcagcatctgtgacaactgtgtggagcgcttcgaccatcactgcccctgggtggggaattgtgttggaaagaggaactaccgctacttctacctcttcatcctttctctctccctcctcacaatctatgtcttcgccttcaacatcgtctatgtggccctcaaatctttgaaaattggcttcttggagacattgaaagaaactcctggaactgttctagaagtcctcatttgcttctttacactctggtccgtcgtgggactgactggatttcatactttcctcgtggctctcaaccagacaaccaatgaagacatcaaaggatcatggacagggaagaatcgcgtccagaatccctacagccatggcaatattgtgaagaactgctgtgaagtgctgtgtggccccttgccccccagtgtgctggatcgaaggggtattttgccactggaggaaagtggaagtcgacctcccagtactcaagagaccagtagcagcctcttgccacagagcccagcccccacagaacacctgaactcaaatgagatgccggaggacagcagcactcccgaagagatgccacctccagagcccccagagccaccacaggaggcagctgaagctgagaagtagcctatctatggaagagacttttgtttgtgtttaattagggctatgagagatttcaggtgagaagttaaacctgagacagagagcaagtaagctgtcccttttaactgtttttctttggtctttagtcacccagttgcacactggcattttcttgctgcaagcttttttaaatttctgaactcaaggcagtggcagaagatgtcagtcacctctgataactggaaaaatgggtctcttgggccctggcactggttctccatggcctcagccacagggtccccttggaccccctctcttccctccagatcccagccctcctgcttggggtcactggtctcattctggggctaaaagtttttgagactggctcaaatcctcccaagctgctgcacgtgctgagtccagaggcagtcacagagacctctggccaggggatcctaactgggttcttggggtcttcaggactgaagaggagggagagtggggtcagaagattctcctggccaccaagtgccagcattgcccacaaatccttttaggaatgggacaggtaccttccacttgttgtatttattagtgtagcttctcctttgtctcccatccactctgacacctaagccccactcttttcccattagatatatgtaagtagttgtagtagagataataattgacatttctcgtagactacccagaaacttttttaatacctgtgccattctcaataagaatttatgagatgccagcggcatagcccttcacactctctgtctcatctctcctcctttctcattagccccttttaatttgtttttccttctgactcctgctcccattaggagcaggaatggcagtaataaaagtctgcacttt

SEQ ID NO: 11829 - protein, 364 aa, Homo sapiens [sequence omitted]

SEQ ID NO: 11830 - DNA, 980 bp, Homo sapiens
  CDS (532)..(954)
gaaacccatgtggagcccggcgatcgttgtgacatcgggaagggaagtccaaagggaggaatcctggagaggaacagggaggagggtgctccaggctgaaccgctgctcgctctccctccaggccagacttctgggagttcccgggcagacggcgtttcggtcgggacctattcctgctagtgcaggcctccaggtgacctcactcggacggaagaatcttcccgaggctgggctgttccctctcctgcccggactgtggcctcgccggggagagcgggcgggggagctcgcgccgaggactggaccatctgtacagaccagcgggagtgcgcgcgcccgcctcgcacagggccggggcctggaccaaaccacatgaactggactgagagggggaagaagcggggaggaagaaatcccgccccaaacgtccgctttccttttctctactttgtaatttattgatcagtttctgttgggagacgggtgtcctttacccgcgggaagggggcggggcttccctcccgggccgcatgcggggagaggctgctccctcccctttttcctgcccagtcgcggggcccaagtcttccttcttcgtccgaaaggaggggaggggggactcgctgctacaagcctcgccccctgtgccactcagctccgccccgccgcgtccggtcgccggtcccccgggtcatctgcgggcggggtcccctctccctcccccgtgtctcgtgtccccggggcctcaccgccccccgtgctgtggccgtgtccgtgccccgggggtagggggcgcagaatggcgcttccccttctcctctggctccggggtttgcatgggagaatcctctttccacgatgccgctgggcgacgtggcgtgggggcagggggacggtgggggagccctcgcccccgactctcggtcggcctccccgccccaggcgtcactcagtgatcacgggtaaagagaactgtttc

SEQ ID NO: 11831 - protein, 141 aa, Homo sapiens
MRGEAAPSPFSCPVAGPKSSFFVRKEGRGDSLLQASPPVPLSSAPPRPVAGPPGHLRAGSPLPPPCLVSPGPHRPPCCGRVRAPGVGGAEWRFPFSSGSGVCMGESSFHDAAGRRGVGAGGRWGSPRPRLSVGLPAPGVTQ

SEQ ID NO: 11832 - DNA, 2182 bp, Homo sapiens
acttacacatttcttcaagctgaaaagtgcttgtggtgaacctgcttacacaaattatgttggtggctttcatggatgtctagattacattttcattgacttaaatgctttagaggttgaacaggtgattccattacctagtcatgaagaagttaccacccaccaggccttacctagtgtttcccatccctctgatcacatagcacttgtatgtgatttaaaatggaaatagatgtgtgtttaatggaattgaagtctgaaaaggaagtagttattttagcagaaaatttaatatgaatcaaagcttatatgtaaacttcaaggaggaatggtaaaatgttcagccctcctagttatgttcctgatgtcttcgttatgaaactgttgatgtttgcatcatacatcttctctttccttgttttcctctacaattggaggagaaacaaatatatttcttactagcaaaatagaaaactgaattatttttctccaaattgagactctcagaaaaggaagattgaattagcgtgttttttgtttgtttgtttttgtttttgtttttgtttttttgagatggagtttcactcttgttgcccaggctggagtgcaatggcacaatctcggctcactgcaacctccgccccctgggtttaagcgattctcctgcctcagcttcccgagtagctgggattacaggcatgcgccaacatgtctggctaatttttgtatttttagtagaaatggggtttcgccacgttggccaggctggtcttgaactcctgacctcaggtgatccacccacctcggcctcccaaagtgttgggattacaggcgtgagccaccgcacccggcccttgtgtacatttttataagagaatttttttagctaggaattcagaatttttaaagtaccatttgaatgatcttaatttttctttcatgacaacacattccaaaatgaatcatgcttatgtactaagagggaaaatgtatttaagttaagggtgagagacttaagttataggtgaccttagagacctaaggtgagagacttgacacatggaaggagtaacattagggtctacctctacctcaatttagttagcgatttactacaatttcagagctttaacaaaagataaaaataaatcgtcaccaattgttattgcttctcatctttcatttttcaatgaacaagtaaggtattttcattcttatttttaggattttagtttttagtgtatggtacaaatgaacacagtttatattctaattcttactgcagctcattttaatttttaggatgcaagcacaatttagtattcaaagtgagtagcaacatattcaacttgatcccattgtcttcagttactcttgcccatgaaaaatgttcataaatgaacagggtatttgaccatatgatattagaaaatacagcacattactttatgagaaactacctactgatatgggcttgaaattttggatgaatcattgagcatttctacactagaagtaatttcaaaattgttggtttttataaacaggaaaaaggttgagtagtgggacttttaagcatctctgaaataaaaaacttctttttacagacaagcattatagtttgagttacagacaacagtgtgtatatatgtaatatatatatagtaaaatgaaatttaaatatgaagccaaactttttaaaattagaaactacaaatggttatactgattagtgtctagcctagagtggtaaccatgctttactaattcagttatgaaatacattatttataatgcattagctgtattagctgttgcttttttgatgttcaggataactatgttatctcatttctgcatttaattaatagctcgagtattaaaagcccactcccttcaagaaaagctttgattttccccagtcatgaaagcccttgtttcaaattctttaatctctgaacctagtatcataagaatttcctcttttgataacatctgtactttcatattctgctcactatcaaatgtattgttaacacttagtaagtttgaaaatgaaggggttttatctgcatttgacattgaaccttgaagtactttaagtactccaaggggaaaattaaagtggaagtttcttcggatcttgtttagaaaaaactataaataaaaaattgatgctacc

SEQ ID NO: 11833 - DNA, 2882 bp, Homo sapiens
  CDS (150)..(2519)
aagcgcctcgcgggggtctggcccggagtggagggcgcgcggtcccagccctcccgctcggccggcgggtgtcgagttcagccctaggggacctctttctcctggacattgaagatatggccctttggaggtgacccaggagagaagggatgaaggcctttggtcctccacatgagggccccctccaaggactcgtggcctcccgcattgagacttatgggggccggcatcgagcctctgctcagagcactactggcagactctatccccgaggataccctgtgctggatcccagtcgccgacgcctccagcagtatgtcccctttgccaggggttctggccaggcccgaggcctgtcacccatgagactgcgagatccagagcccgagaagaggcacgggggccatgtgggggctggcctgcttcactcccccaaactcaaggaactcaccaaggcccatgagctggaggtgaggctgcacactttcagcatgtttgggatgccccggctgccccctgaggaccggcggcactgggagataggagagggtggcgacagtggcctgaccatcgagaagtcctggagggagctggtgcctgggcacaaggagatgagccaggagctctgccaccaacaggaggccctgtgggagctcctgaccaccgagctgatctacgtgagaaagctcaagatcatgactgatctgctagccgccggcctgctgaacctgcagcgagtgggactgctgatggaagtgtcagctgagaccctgtttggaaatgtccccagcctgattcgaacccaccggagcttttgggatgaggtgctggggcccaccctggaggagactcgggcctcgggccagcctctggaccccattggtctgcaaagtggcttcctgacgtttggccagcggttccacccctatgtccagtactgcctccgagtgaagcagaccatggcttacgcccgagaacagcaagaaactaaccctctcttccatgccttcgtgcagtggtgtgagaagcacaagcgctctgggaggcagatgctctgtgacttgcttatcaagccccaccagcgcatcaccaagtacccactgctgctccatgctgtgctcaagaggagccccgaggcacgagcccaagaggccctgaatgccatgattgaagccgtggagtcattcctgcgacatatcaatgggcaggtccgccagggcgaagagcaagagagcttggcggctgcagcacaacgcatcgggccctacgaggtgctggagccacccagtgatgaggtggagaagaacctgcgcccattctccaccctggacctgacgtcccccatgctgggggttgcatctgagcacaccagacagctgctgctggaggggcctgtgcgagtgaaggagggacgagaagggaagctggacgtgtacctgttcctcttctctgatgtgctccttgtgaccaagccccagcgcaaggcggacaaagccaaggtcatccgaccccctctcatgctggataagctcgtgtgccaacccctgcgagaccccaacagcttcctgctgatccacctcactgaattccagtgtgtctccagcgccctccttgtgcactgtcccagtcctacagaccgtgcccagtggctggagaagacccagcaggcccaggccgccctacagaagctgaaggcagaggagtatgttcaacagaagagggagctcctgaccctctatcgggaccaggacagggagtcccccagcaccaggccctccacgccttccctggagggctctcagagcagcgcagaggggaggactcctgagttctcgaccattatcccccacctggtggtgacagaagacacagatgaagatgctccccttgtgccagatgatacctcagactctggctacggcactttgatcccaggcacccccacggggtcccgctccccactgagccgtctacgccaaagagcccttcggcgggaccctcgcctcaccttctccaccctggaactccgggacatccctctgcgtccccaccctcccgacccccaagctccccaacgccgaagcgcccccgaactgccggaaggaatcctaaaaggaggcagtcttccccaggaagacccaccaacctggtctgaggaagaagatggggcctccgagcgagggaatgtggtggtggaaacactccacagggcccggcttcggggccagcttccctcctccccaacccatgctgactctgccggggaaagcccctgggagtcctcaggggaggaggaagaagaggggcctctgttcctgaaagctggccacacatccctgcgcccaatgcgggctgaggacatgctcagagagatccgggaggagctggccagccaaaggattgagggggccgaggagccccgggacagcaggccacggaagctgactcgggcccagctgcagaggatgcgggggccccacatcattcagctggacacccctctgtccgcatcagaggtatgaggaatgcagaggacctttggcatgcatctctcccagaggagatctctccccagtagtgctggtcaccctccggcatctgtgactctacctcaaggaccacatttcccaaaggaagcctggcccaggcaccctgcctcctgctctgtttggggatcaagaactgtaaatttatgtatcataggtgcacctgagccccacagaaagttgtgcataaaaatgactgccctggctgggcatggctgcctgtaatcccagcactttgggaggctgaggtgggaggatcccttgagcccaggagttccagaccagcctgggcaatatagggaaaccctgtctttacaaaaaaaaattttaaaaatt

SEQ ID NO: 11834 - protein, 790 aa, Homo sapiens
MKAFGPPHEGPLQGLVASRIETYGGRHRASAQSTTGRLYPRGYPVLDPSRRRLQQYVPFARGSGQARGLSPMRLRDPEPEKRHGGHVGAGLLHSPKLKELTKAHELEVRLHTFSMFGMPRLPPEDRRHWEIGEGGDSGLTIEKSWRELVPGHKEMSQELCHQQEALWELLTTELIYVRKLKIMTDLLAAGLLNLQRVGLLMEVSAETLFGNVPSLIRTHRSFWDEVLGPTLEETRASGQPLDPIGLQSGFLTFGQRFHPYVQYCLRVKQTMAYAREQQETNPLFHAFVQWCEKHKRSGRQMLCDLLIKPHQRITKYPLLLHAVLKRSPEARAQEALNAMIEAVESFLRHINGQVRQGEEQESLAAAAQRIGPYEVLEPPSDEVEKNLRPFSTLDLTSPMLGVASEHTRQLLLEGPVRVKEGREGKLDVYLFLFSDVLLVTKPQRKADKAKVIRPPLMLDKLVCQPLRDPNSFLLIHLTEFQCVSSALLVHCPSPTDRAQWLEKTQQAQAALQKLKAEEYVQQKRELLTLYRDQDRESPSTRPSTPSLEGSQSSAEGRTPEFSTIIPHLVVTEDTDEDAPLVPDDTSDSGYGTLIPGTPTGSRSPLSRLRQRALRRDPRLTFSTLELRDIPLRPHPPDPQAPQRRSAPELPEGILKGGSLPQEDPPTWSEEEDGASERGNVVVETLHRARLRGQLPSSPTHADSAGESPWESSGEEEEEGPLFLKAGHTSLRPMRAEDMLREIREELASQRIEGAEEPRDSRPRKLTRAQLQRMRGPHIIQLDTPLSASEV

SEQ ID NO: 11835 - DNA, 1117 bp, Homo sapiens
  CDS (59)..(718)
atgtcgtgaagctgggggagctcgtcgccgccgccggcggctagcgggcgtccgcgccatggagcgctacgcggccgccttggaggaggtggcggacggtgcccggcagcaggagcgacactaccagttgctgtcggcgctacagagcctggtgaaggagttgcccagctctttccagcagcgcctgtcctacaccacgctcagcgacctggccctggcgcttctcgacggcaccgtgttcgaaatcgtgcaggggctactggagatccagcacctcaccgaaaagagcctgtacaaccggcgcctgcgcctacagaacgagcaccgagtgctcaggcaggcgctgcggcagaagcaccaggaagcccagcaggcctgccggccccacaacctgcctgtggttcaggcggctcagcagcgagaactagaggccgtggaacaccggatccgtgaggagcagcgggcgatggaccagaagatcatcctggagctggaccggaaggtggctgaccagcagagcacactggagaaggcgggggtggctggcttctacgtgaccaccaacccacaggagctgatgctgcagatgaacctgctggaactcatccgaaagctgcagcagaggggctgccgggcagggaatgcagccctgggactgggaggtccctggcagtcgcctgctgcccagtgtgaccagaaaggcagccctgtcccaccatagccacaggcagcagaggtctgggcagagttcatcttcttgacctttggccactgccttcccagctgcccgcagggggttccccctgctgaggagagaccaggtggaccccagctgcctgtcacccttcatctgggacttgctgtcaaaccctaggatagtctcataaaggggaggctgggccagcctgctgctgtctgcttcaggaccaggcagagagtgaggctgggggttctcacaccttactccaccgggcacatcccaacctgcactggggcccacccgagcgcttgttctggtctcagccgctcccttggcagctgcagcccccatgcagaagaggctcccaggcccaagctctgtgtgacccagagaaataaagatgcctcagtgtggccc

SEQ ID NO: 11836 - protein, 220 aa, Homo sapiens [sequence omitted]

SEQ ID NO: 11837 - DNA, 2074 bp, Homo sapiens
  CDS (319)..(1194)
atacacgcttgagcaagctttgctatcagccagccaagagatagaaatgcatgcagataacccagcagccattcagacagtggtgttacaaagggatgatttacaaaatggactgcttagtacgtgtcgagaactttctcgagccactgccgaattggaacgagcatggagagaatatgataagttagaatacgatgtaactgttaccaggaaccagatgcaagagcagctggatcaccttggtgaagttcagacggaatcagcaggaattcagcgtgcacagattcagaaaaagaactttggcgaattcaggatgtcatggaagggctgagtaaacataagcagcaaagaggtactacagaaataggttcccactttcctgttggagtagtccctccaagagcaaaatcaccaacacccgaatcttcgacaatagcttcctatgtaaccttgaggaaaactaagaagatgatggatctaagaacggaaagaccaagaagtgcagtggaacagctctgtttggctgaaagtactcgaccaaggatgactgtggaagagcaaatggaaagaataagaagacatcaacaagcgtgcctgagggagaagaaaaaagggttaaatgttatcggtgcttcagaccagtcacccttacaaagcccttcaaatttaagggataatccatttaggactactcagactcgaaggagggatgataaggaactggacactgccattagagaaaatgatgtaaagtcagaccatgaaactcctgcaacagaaattgttcaactaaaagaaaccgaaccccaaaatgtggacttcagcaaagagttaaaaaaaactgaaaacatttcatatgaaatgctttttgaacctgagccaaatggagtaaattctgtggaaatgatggataaagaaagaaacaaagacaaaatgcctgaggatgttacattcagccctcaagatgaaacacagaccgcaaatcataaaccagaagagcatcctgaagaaaatacaaagaacagtgttgacgaacaggaagaaactgttatttcttacgaatcaactcctgaggtttctagaggaaatcaaacaatggcagtgaaaagtctgtccccatctcctgagtcctcggcatcgccagttccatccactcagccgcagctcacagaaggatcacatttcatgtgtgtgtagtcttagaagaactatactgacttctgttgaaaccattcaaagctaaagacatggaccttcagcagtgtaagaagatattgtacagtatattttaaatctatgaaattcatagttctgatgcttttggtcacagagcatcattttatcacttctggaaaatgtttattccaaaacggctttaatggcccatatgtacacttcgtaatctcaaggttattattctgacaccagcttgctgctatgatttcagagcacataagtaaaggtgctttttaatgtgcagtctatttccagagcttacttagttgctgatttccagatttcgatgtttcttaagtctaggtgaatttatatatatatttttttgcttctcattttctaaagttagttattatttccattgaagcttgttttctttttttcttcccattttagctactgcagtgcttttgtttcacacttgatttgtaaaaattttatatatatgtatttaaaatgtgccattttattgctaagtgaagtatgtcctgttttctgctataattctttctcggtcagattgcaatgtcagcagttactgccacactcctgtcagcttaaacacaaatgttactgcttatcttttcttaaaaaaaaaaaaaacaaagtgtaggtattttgaagtactgggcttatatttcattggaatacatgtgtacagcaataagcaggttcccaaatccggtacttagtttgtgtacaaatgtaattatgttcattgtgtatatattatacaatgagcacatgtaatgtattaaaggctacttactattgtttaaatgcaaatgttcatatctcatttctttttttatcatgttaaataaatgttgatgttctt

SEQ ID NO: 11838 - protein, 292 aa, Homo sapiens
MEGLSKHKQQRGTTEIGSHFPVGVVPPRAKSPTPESSTIASYVTLRKTKKMMDLRTERPRSAVEQLCLAESTRPRMTVEEQMERIRRHQQACLREKKKGLNVIGASDQSPLQSPSNLRDNPFRTTQTRRRDDKELDTAIRENDVKSDHETPATEIVQLKETEPQNVDFSKELKKTENISYEMLFEPEPNGVNSVEMMDKERNKDKMPEDVTFSPQDETQTANHKPEEHPEENTKNSVDEQEETVISYESTPEVSRGNQTMAVKSLSPSPESSASPVPSTQPQLTEGSHFMCV

SEQ ID NO: 11839 - DNA, 1929 bp, Homo sapiens
  CDS (300)..(608)
caaatgtatcaagtaattctgaaattcttggggtccggccatctaatgtttccagtagttctgggattattgcagcccaaccaccaaatattctaaataactctggaatattgggaatacagccacccagtgtgtcaaatagttctggacttttgggagtgctacccccaaatatacctaacaattctggacttgtaggagtacagccaccaaatgttccaaatactcctggacttctgggaacacagccaccagctggacctcaaaacttaccccctttaagtatccctaatcaaaggatgcccacaatgccaatgttagacattcgtccgggactaataccacaggcacctgggccaagattccctttaatacagcctggaattccaccccaacggggaatcccacccccatcggtacttgattcagctcttcatccaccaccccgtggaccttttcctccaggagatatttttagtcaaccagaaagaccttttttagctcctggaagacaaagcgtgacaatgttactaacccagaaaaaaggataccacttgggaatgataacattcaacaggaaggagatagagattaccggtttcctcctatagaaaccagggaaagcattagtagacctccccctgtggatgttagagatgtggttgggcggcctatagatccaagagaaggtcctggacggcctccactagatggtagggatcattttggaagacctcctgtagatataagagagaatcttgtgaggccaggtatagatcatcttggtcgaagagaccactttggctttaatccagagaagccctgggggcatagaggagattttgatgagagagagcatcgggttctaccggtctatggtggtccaaaaggcttacatgaagaaagaggtagatttcggtctggaaactatcgatttgatcctagaagtggtccttggaaccgaggatttggacaagaagttcacagagattttgatgacggcagaagaccctgggagaggcaaagggatagggatgacagagattttgatttctgcagagaaatgaatggaaatcgtcttggacgagacagaattcaaaacacttgggttccccctcctcatgctcgggtttttgattattttgaaggggccacttctcaacgaaaaggtgataatgtgcctcaggttaatggtgaaaatacagagagacatgctcagccaccacctataccagtacagaatgatcctgaactttatgaaaaactgacatcttcaaatgaaataaacaaggagaagagtgacacagttgctgatatagaaagtgaaccagtggtagaaagcacagaaactgaggggacataatcatcactcagtaggtaaaagataccttttgtaaagttgtcatctctctgtaatagataatggctgactggaccatagttgttcacttttgtctgccagaattaagttaatctgatgttcatgttcacctttctcttaaaataattgtacaactgacttgtatagacattgttcttaatatgaacatggtaggtaaactttttttttatttttttctgataaaatacaaatgttggccccagattcttttaacgtcaaggaaatgaataacagcttgtcagagacttcctatggaagaaagaattttttagatactatcattaggttggatatggtaatagatatatttcagaatagcaagtggtggtatatcttatccatatctttaggctgctgcagaattttaaggttatagataaagctgtgatattttatgcaaagactggctctaggtatttgaggagcacaatacagagattttaaaaagtgattttgtaaagtctacactatggtctctgtttctccaaagtaagtgtttgtgatttgtccctcatactgcagtgagt

SEQ ID NO: 11840 - protein, 103 aa, Homo sapiens
MPTMPMLDIRPGLIPQAPGPRFPLIQPGIPPQRGIPPPSVLDSALHPPPRGPFPPGDIFSQPERPFLAPGRQSVTMLLTQKKGYHLGMITFNRKEIEITGFLL

SEQ ID NO: 11841 - DNA, 2279 bp, Homo sapiens
  CDS (176)..(2191)
catctcccccaacctgggggtcgtgttcttcaacgcctgcgaggccgcgtcgcggctggcgcgcggcgaggatgaggcggagctggcgctgagcctcctggcgcagctgggcatcacgcctctgccactcagccgcggccccgtgccagccaaacccaccgtgctcttcgagaagatgggcgtgggccggctggacatgtatgtgctgcacccgccctccgccggcgccgagcgcacgctggcctctgtgtgcgccctgctggtgtggcaccccgccggccccggcgagaaggtggtgcgcgtgctgttccccggttgcaccccgcccgcctgcctcctggacggcctggtccgcctgcagcacttgaggttcctgcgagagcccgtggtgacgccccaggacctggaggggccggggcgagccgagagcaaagagagcgtgggctcccgggacagctcgaagagagagggcctcctggccacccaccctagacctggccaggagcgccctggggtggcccgcaaggagccagcacgggctgaggccccacgcaagactgagaaagaagccaagaccccccgggagttgaagaaagaccccaaaccgagtgtctcccggacccagccgcgggaggtgcgccgggcagcctcttctgtgcccaacctcaagaagacgaatgcccaggcggcacccaagccccgcaaagcgcccagcacgtcccactctggcttcccgccggtggcaaatggaccccgcagcccgcccagcctccgatgtggagaagccagcccccccagtgcagcctgcggctctccggcctcccagctggtggccacgcccagcctggagctggggccgatcccagccggggaggagaaggcactggagctgcctttggccgccagctcaatcccaaggccacgcacaccctcccctgagtcccaccggagccccgcagagggcagcgagcggctgtcgctgagcccactgcggggcggggaggccgggccagacgcctcacccacagtgaccacacccacggtgaccacgccctcactacccgcagaggtgggctccccgcactcgaccgaggtggacgagtccctgtcggtgtcctttgagcaggtgctgccgccatccgcccccaccagtgaggctgggctgagcctcccgctgcgtggcccccgggcgcggcgctcggcttccccacacgatgtggacctgtgcctggtgtcaccctgtgaatttgagcatcgcaaggcggtgccaatggcaccggcacctgcgtcccccggcagctcgaatgacagcagtgcccggtcacaggaacgggcaggtgggctgggggccgaggagacgccacccacatcggtcagcgagtccctgcccaccctgtctgactcggatcccgtgcccctggcccccggtgcggcagactcagacgaagacacagagggctttggagtccctcgccacgaccctttgcctgaccccctcaaggtccccccaccactgcctgacccatccagcatctgcatggtggaccccgagatgctgccccccaagacagcacggcaaacggagaacgtcagccgcacccggaagcccctggcccgccccaactcacgcgctgccgcccccaaagccactccagtggctgctgccaaaaccaaggggcttgctggtggggaccgtgccagccgaccactcagtgcccggagtgagcccagtgagaagggaggccgggcacccctgtccagaaagtcctcaacccccaagactgccactcgaggcccgtcggggtcagccagcagccggcccggggtgtcagccaccccacccaagtccccggtctacctggacctggcctacctgcccagcgggagcagcgcccacctggtggatgaggagttcttccagcgcgtgcgcgcgctctgctacgtcatcagtggccaggaccagcgcaaggaggaaggcatgcgggccgtcctggacgcgctactggccagcaagcagcattgggaccgtgacctgcaggtgaccctgatccccactttcgactcggtggccatgcatacgtggtacgcagagacgcacgcccggcaccaggcgctgggcatcacggtgttgggcagcaacggcatggtgtccatgcaggatgacgccttcccggcctgcaaggtggagttctagccccatcgccgacacgccccccactcagcccagcccgcctgtccctagattcagccacatcagaaataaactgtgactacacttg

SEQ ID NO: 11842 - protein, 672 aa, Homo sapiens
MGVGRLDMYVLHPPSAGAERTLASVCALLVWHPAGPGEKVVRVLFPGCTPPACLLDGLVRLQHLRFLREPVVTPQDLEGPGRAESKESVGSRDSSKREGLLATHPRPGQERPGVARKEPARAEAPRKTEKEAKTPRELKKDPKPSVSRTQPREVRRAASSVPNLKKTNAQAAPKPRKAPSTSHSGFPPVANGPRSPPSLRCGEASPPSAACGSPASQLVATPSLELGPIPAGEEKALELPLAASSIPRPRTPSPESHRSPAEGSERLSLSPLRGGEAGPDASPTVTTPTVTTPSLPAEVGSPHSTEVDESLSVSFEQVLPPSAPTSEAGLSLPLRGPRARRSASPHDVDLCLVSPCEFEHRKAVPMAPAPASPGSSNDSSARSQERAGGLGAEETPPTSVSESLPTLSDSDPVPLAPGAADSDEDTEGFGVPRHDPLPDPLKVPPPLPDPSSICMVDPEMLPPKTARQTENVSRTRKPLARPNSRAAAPKATPVAAAKTKGLAGGDRASRPLSARSEPSEKGGRAPLSRKSSTPKTATRGPSGSASSRPGVSATPPKSPVYLDLAYLPSGSSAHLVDEEFFQRVRALCYVISGQDQRKEEGMRAVLDALLASKQHWDRDLQVTLIPTFDSVAMHTWYAETHARHQALGITVLGSNGMVSMQDDAFPACKVEF

SEQ ID NO: 11843 - DNA, 1418 bp, Homo sapiens
  CDS (122)..(1354)
ccggacgcgaggggcggggcgagcgcgggacaaagggaagcgaagccggagctgcgggcgctttttctgcccgcggtgtctcagattcattcttaaggaactgagaacttaatcttccaaaatgtcaaaaagaccatcttatgccccacctcccaccccagctcctgcaacacaaatgcccagcacaccagggtttgtgggatacaatccatacagtcatctcgcctacaacaactacaggctgggagggaacccgggcaccaacagccgggtcacggcatcctctggtatcacgattccaaaacccccaaagccaccagataagccgctgatgccctacatgaggtacagcagaaaggtctgggaccaagtaaaggcttccaaccctgacctaaagttgtgggagattggcaagattattggtggcatgtggcgagatctcactgatgaagaaaaacaagaatatttaaacgaatacgaagcagaaaagatagagtacaatgaatctatgaaggcctatcataattcccccgcgtaccttgcttacataaatgcaaaaagtcgtgcagaagctgctttagaggaagaaagtcgacagagacaatctcgcatggagaaaggagaaccgtacatgagcattcagcctgctgaagatccagatgattatgatgatggcttttcaatgaagcatacagccaccgcccgtttccagagaaaccaccgcctcatcagtgaaattcttagtgagagtgtggtgccagacgttcggtcagttgtcacaacagctagaatgcaggtcctcaaacggcaggtccagtccttaatggttcatcagcgaaaactagaagctgaacttcttcaaatagaggaacgacaccaggagaagaagaggaaattcctggaaagcacagattcatttaacaatgagcttaaaaggttgtgcggtctgaaagtagaagtggatatggagaaaattgcagctgagattgcacaggcagaggaacaggcccgcaaaaggcaggaggaaagggagaaggaggccgcagagcaagctgagcgcagtcagagcagcatcgttcctgaggaagaacaagcagctaacaaaggcgaggagaagaaagacgacgagaacattccgatggagacagaggagacacaccttgaagaaacaacagagagccaacagaatggtgaagaaggcacgtctactcctgaggacaaggagagtgggcaggagggggtcgacagtatggcagaggaaggaaccagtgatagtaacactggctcggagagcaacagtgcaacagtggaggagccaccaacagatcccataccagaagatgagaaaaaagaataagtgttgccttgttttgtgtgttctaaatactttttttaatgaaaaaatgttttttggtttt

SEQ ID NO: 11844 - protein, 411 aa, Homo sapiens
MSKRPSYAPPPTPAPATQMPSTPGFVGYNPYSHLAYNNYRLGGNPGTNSRVTASSGITIPKPPKPPDKPLMPYMRYSRKVWDQVKASNPDLKLWEIGKIIGGMWRDLTDEEKQEYLNEYEAEKIEYNESMKAYHNSPAYLAYINAKSRAEAALEEESRQRQSRMEKGEPYMSIQPAEDPDDYDDGFSMKHTATARFQRNHRLISEILSESVVPDVRSVVTTARMQVLKRQVQSLMVHQRKLEAELLQIEERHQEKKRKFLESTDSFNNELKRLCGLKVEVDMEKIAAEIAQAEEQARKRQEEREKEAAEQAERSQSSIVPEEEQAANKGEEKKDDENIPMETEETHLEETTESQQNGEEGTSTPEDKESGQEGVDSMAEEGTSDSNTGSESNSATVEEPPTDPIPEDEKKE

SEQ ID NO: 11845 - DNA, 3397 bp, Homo sapiens
  CDS (389)..(835)
atctgagcattgataatgttctatctaaatttgtacagtgtgattttttttttagaataaatattttataaaagggtttattgtcccttgtttatgttaaaatgcttgtttccatgaggggtttcttccctctcaatgcccctagccccttgggaaccagaggccccagagacagtgtgggctcctcagcgtagcctcttggtgacagcatgcgctgcctgggcaggcacagtgctgctgtgatcacaggggaggccatgacttggcacctgggaagccagctcagagcatattcagtcaagttgatgaggaatggcggcccgacctcagcagcaggtcggcgtgcgggactctcagaatggcggcctgatctcagcagcgggtcggcatgccagactctcggagccctcagctatcttcatgtgtttcaggactgctgccatgtaacgtgtgtgtgtggagagtgtgcggagtgtacacgaagcatgcccggaggctcagcatgaagcactctgtacccagctctacctcctcattgtccttcatccagtgtgtaccttcagccaggcctgccctcgtgtgggaggggcagtccccaaggagcacacgccatgatgtcagaaacatcttcttcgaggaagatggccctttacaggccccaggggacgggggcagcacggagccctctctggacctctgccgcaggccacagaaccttctccagcccttgactctccttgcctttcatttaccctccattgttccaggctaccacggaatgatgattacagctgagtttacccaaatcccaccacagggtcaaatgaaagggccttgacaagatgtcccttggcagcttgagatcgcagttgtgttgctgggttatggcctgggtgcaggctggtttgcagtgggcggtactggcagctaccatcaaggtctctgtgctgggctccagccctcagcccagaggggtggttccccactttatagagagggggtttccagctcacagaaggtgagaagcttgtcccaggcctggagcagctgtggagaaactgggagggaagcccgtccagcctgattccaagcccacatgctgctcacaggtcaaggccgagggactgatttttgccggtctgactggactcaagttacttcccagttccttgcagagagctgtctttgtgagacagtgtcttgggttctggaatgatgggagccgtgctttgcaaatgaggagtgattgcgtgctcatctggcagctggtgggtgtcctgctggcatcaggcctgagcggtgaccgtgctcctctgattgtcctcactgcgtgtgacaaggcctgggccactgtgtgagtcgtcttgcgctccatgaagcctggtgtctgtgcagatgtgtgggtggcgttagggttgggggacatttgtctttcacactggagaatgggagtctggagctggtgctactggtgaggaagaggcccggcctgctgccaggttcgcccacaccttccccctggttgttgggaaaaccaaccttggaatggccaaggcaggagatagcacctccccggtgaagatccaggagctctcatgagctccacgtggaaagatcaaggatctggagtctggagcccttcaggcagcaactcagtgaccatgaacctcagctctgtccacccggcacagcattgctgggagctggacccgggaggctgccggctccagagcgaggagggtccagaccatgcagacaatatgccctttttctccaaacaccatttcaagcaaacccgcaggtctcctccacggctgtcagcagcttctcgtagagcttctcataggactcatatggtggaatgtcgatccggttaaagctgaaaaaggacaaaagagagtcaccgtgtgggcagtccagccctaggaccaacctcaaggccaaggacaggcaagacagggtctcgctaggttgcccaggctgctctcaaactccaggcctcaagtgaacctcctgccttgccctctcaacgtgctgggagccactgtgcccaatcaacacacagtaaaggggaagctcatttccagtatttgtgcaaagaaaaagacatcctttaagaagctatcgcagcaaaccaaaaaatacaaaattgtgacccagaggatgtacagtgacttctggctttctagggtgctgtggcttttgagttctgatgatgacaaaaatattttggcagagactccatctcaaaaaaaaacaacaaaaaaaaaacgtgaacgtcagcatcctctggggctcccaggacgccgtgacttcctggccgcggtgcttaccagcacacatctcagaaaaacatcccagccaccttccagctcttcctgcccacagcgcacatagacgcgtcatcgaatagccctgcctccacgtcagtcaccttgcaaagccttgaagccttggagcgggactcgcgtggacccagtcacaaactgcaggagcctggccctcctttcttcatcgaacgtctccaccgcttgccagaaccaccgcacgatgttgctgtcggccacacagtgcttcagccgcgtgttcgacttccagtcgttcaagtctattttatccaggccgcctatgatcagctgaggaggtgcagaaaggtgaattacttccaaaatgcataaacccacgtcaggatgcgcctcctaggtacccgacacacaacagtgaaaagtcgattcccaagcaaagcagcagctgtgtactaggcagatgttgagacaggaagaaagctacaaacaggaggcctgtggcacatgcttccgtccgcctcctccaaacgggtctccaaccccaaggaccgcggtgcacagctgttgatgggatgttattttataaccaaagcggggtttttgctctgcatcggtgaggagtatcaaagaaccaaccggtgacactgaacagagctaaccatgaataacggcacgtcccagggtctctccaggacactcaaggacatgtggagtttcaagtctgaagagaggagaattcagcaagagttaggtggggctggggccgatagggcatgtttccgcaattggcttgaaaagttcaacccctgctgggtgcagtggctcacgcctgtagtcccggcactttgtgggggccgaagttgggcggatcacttgagcccaggagttcaaggccagcctgggcaacatggcaaaaccccgtctctacaacagatacaaaaattagccaggcatgatgacgtgcacctgtagcctcagctactcgggaggcggaggtgggaggatggcttcagcctgggaggtcgaggctgcagtgagccatgatcgcaccactgcactccagcctgagcaacagagcgagaccgtgtctc

SEQ ID NO: 11846 - protein, 149 aa, Homo sapiens
MPDSRSPQLSSCVSGLLPCNVCVWRVCGVYTKHARRLSMKHSVPSSTSSLSFIQCVPSARPALVWEGQSPRSTRHDVRNIFFEEDGPLQAPGDGGSTEPSLDLCRRPQNLLQPLTLLAFHLPSIVPGYHGMMITAEFTQIPPQGQMKGP

SEQ ID NO: 11847 - DNA, 2306 bp, Homo sapiens
  CDS (343)..(1101)
agggccccgccctgccttctggggcaaagcggagagtggtcggttctgccccacagtaacgcgaggaaagaaatctcgcgaggctggagttctccgggagcgccggtcggaggcggtcggcggaggtgtctaccccgccggtgatggcgttgaacgccactggcttcccggccttccgtccgctgcctccgtccgattctgcgtctgcttgctgaggaggcggattaggggggcgcggagtctcttcccttgagtgcataggtcccggttggtagagggtttgagtccgcatcgccacagctgaaggctgcgagggactaagagcagaatatatctttagaaatgagttgcacaattgagaaggcacttgccgacgctaaagctcttgttgaaagattaagagatcatgacgatgcagcagaatctctgattgagcaaaccacagctctcaacaagcgagtagaagccatgaaacagtatcaggaagaaattcaagaacttaatgaagtcgcgagacatcggccacggtccacgttagttatgggaatccagcaagaaaacagacaaatcagagagttgcaacaagaaaacaaagaattacgtacatctctggaagaacatcagtcggccttggaacttataatgagcaagtaccgagaacaaatgtttagattgctaatggctagcaaaaaagatgatccgggtataataatgaagttaaaagagcagcactccaagattgacatggtacatcgtaacaagtccgaaggattcttccttgatgcatctcgacacatccttgaagcacctcaacatggactggagagaaggcacttggaagcaaatcagaatgaactgcaagcacatgttgaccagataactgaaatggcagcagtaatgaggaaagccattgaaattgacgagcaacagggttgcaaggaacaagaacgaatatttcaacttgaacaagaaaacaaaggcttgagagagatccttcaaataactcgagaatcatttttgaacctaaggaaagatgatgcgtcggaaagtacttctttgtcagcattagtgaccaacagtgatttgagtctgaggaagagctgaagagtttctgagtctgtgagcttcttacatggctccaaatggtcaaataagtgaatgaatgaatggacagaaaattcaatcctttatttttttctctgtaaatatgtacagtgcacgggctatgagatagcaacaaaaaatgcatagttaatggtcatagactttattccaaaacataattggaaaatagaaactgagccattgccaaatggtaaagaaatgaaaagttttcacagtgactactgaatataccaagagcttttggcagtactgctggctttctgggtgattaattaggtaaacttgaatattcccagtaaatgtttgagaatgcataaaattataccaatttaaaaatataaatttttgccactgttttgtgaacggaggatttgtacgctaaatttcatccttatttggcgtcaaagttgatgcaaagtttatgtaccatgagacttctagtgattgcctactttcacatttatttaaatttttgtgaaagaaaatacagttttaaaggctataggaatgtgttatatgtaccttaaacagataatttaattttagcaatttatcataactgatacttagctaacaattgtccataacttgtttaagtgtaagaaataccatttcaggaatgaaaaagaaggaatactactttctaagaaagaagatcttataatagacatatttagtaggttaaactactcctttgaaagaataagttttggttcaaagtcaataatgaagacgagatttgtttttctcttctctggctgatttttaaggatattatgtagttcatttagttaacagaattgaaatgtttgatatggcaagataggtatggtaatttcaaagtgaattgggaattcctctggctcatagaacccttttttttttcctttaagtattcttgagatacaaaaaaaaaaagtaaataaaatttcaaaaaaaaagttccggatctgtttttaagctccatctggtcctcataacctgcaagatttttcttaaaacctttcagctgaaagtgggggtaaaggtggagtaatctgtggatttgtttctgttgtcttttaaaatgtcaaatatataatatgtaatttttttaaaaaccaccagatacagaaatgtgctttaacatcagttgaaacctaaattttcttatgttgtggtgattgtattaaaaaaaaaat

SEQ ID NO: 11848 - protein, 253 aa, Homo sapiens
MSCTIEKALADAKALVERLRDHDDAAESLIEQTTALNKRVEAMKQYQEEIQELNEVARHRPRSTLVMGIQQENRQIRELQQENKELRTSLEEHQSALELIMSKYREQMFRLLMASKKDDPGIIMKLKEQHSKIDMVHRNKSEGFFLDASRHILEAPQHGLERRHLEANQNELQAHVDQITEMAAVMRKAIEIDEQQGCKEQERIFQLEQENKGLREILQITRESFLNLRKDDASESTSLSALVTNSDLSLRKS

SEQ ID NO: 11849 - DNA, 1811 bp, Homo sapiens
cacattttgtagttattttgatatgaaatattgtcttggaaattgatcaattctctgagaagtacacgttatgatatttgtgctggttcagggggaagaaggagcacaaagttcaaagggctttctaccagtgtccagtgtgtttatgatgaggcacattgaccattgtcccttatgtctgcattttcgtttactgtgctgtgtatataagcagacataggagtcctaatttatatctagtcgatgttaaagaggttgccagtgtatggcaaaagtagagttagtaaactaatacattgagtacactttgtgttaaaattcataaggaacacttcttaaaaacagaagtaaaattgttaaacgccccccgcccccaagcattacagatggcttatagctgtcaacggggttggtagaggtcagaaagggaagtgttctaggccagaatgttcctatttagaagacactcaaattatagtctatgttatgtatatatgccatttattcaatactactgtgtatataatggaaaacttaagtgcagtttgaaacatctagtctttctaggtgtttaaaagtgcacaatggtcaggtgcggtggctcactcctgtaatcctggcactttgggaggctgaggtgggcagatcacgaagtcaagggatcgagactatcttggccaacatggtgaaaccccatctctacaaaaaatacaaaaattagctggtcgtggtggcacatgcctgtagtcccagctactcgggaggctgaggcaggagaatcgcttgagcccgggagacagaggttgcagtaagccgagaccacaccactgcactccagcatggcgacagagcaagactccatctcaaaaaaaaaaaaaaaaaaaaaaaattccacaacataggttaaaagtagagggctaaagtaacacccctctaagcatttgttttcagtacttcctaggagtggttgcatttgggaatggaattgttaaaacttgatgcttaggagcgtatgctgactattcactgcgtggtggggtggggaggaggaggaggtatgcagggagaagggttctgtgcccctgagttagattagttcagatggtctaaccattgttctatgtatgcattttattgtgttaatattgtgtattaaaggataaacaagtcttaatgctcaaagtatgttaaaaatagatgtagtgaatcagtccctttgtgaatgtcctattgttagtttttaggaaggcctgtcttctgggagtgacctttattagtccacttcttggagctagacgtcctatacttagtcactggggatggtgaaagagggagaagaggaagggcgaagggaagggctctttgctagtatctccatttctagaagatggttttagatgataaccacaggtctatatgagcatttttagtaaagtgcctgtgtttattgtggacagagtttattattttgcaacatctaacctttatgaatatctgaggtgacaatgtgtgataaaaactagagctagtgggccaggcgcggtggctcatgcctgtaatcccaacattttgggaggctgaggcaggcagatcacaaggtcaagagatcgagaccatcctggtcaacatggtgaaaccccatctctactaaaaatacaaaaattagctgggcgtggtggcgcgtgcctgtagtcccagcttctcaggaggctgaggcaggagaatcacttgaacctgggaggcggaggttgcagtgagccaatattgcgccactgcactccagcctgggcaacacagcaagactccatctc

SEQ ID NO: 11850 - DNA, 2449 bp, Homo sapiens
tatatgtgacctttttaaaaaatgagctgtaagcagtctcccagacagtagctcagcctccagaactctctttctgcatagttgaagacccctcttcacacaagatggtagcaacaaatcataggtgcaattgcaccaaattcacagaagatcaattgaaaatcctcatcaataccttcactcaaaaaccttacccaggttatgctaccaaacaaaaacttgctttagcaatcaatgcagaagagtccagaatccagatttggtttcagaatcaaagagctaggcatggattccagaaaacaccagaacctgactttagatttaagccacagccatggacaagattaacctggtgtggagtttcaaaatagagaagccagatggtgttgtaccacctatagcacctttcaattacacacaatcatccatgcatttatgaaaaacccataccctgggattgattccggagaacaacttgctgaagaaattggtgcttcagagtcaagagtccaaatttggttccaaaatcaaagatctagatttcatctccagagaaaaagagaacctgttatgtccttagaatgagaagaccagagaagaccaggggcaaggtttctgagggacttcaaggtacagaagatacacaaagtggcaccagcctcactagcactctcatttctcaagagccagaacatggtgaatacagtcaagttcagtgtatttgataatatcaatttgggccccaaatctctctcacagtcttcctgggagtctattcttcttccaaaagtgcaagctaagccttctgaagatggtaaagaacttggccgggtgtggtggctcatgcctgtaatcccagcactttaggaggctgaggctggaagattgcttgagcctaggagtttgaaaccagtctgagcaacatagtaagaccctgtctctattctaaaaaacaaaataagtaaaaaggactgtaggaggccaagacaggtacaggaggcaccacactaccctgttgacacagcctggatccagagttcagcagaccttgagacaatgaaaacaaacttagtaataatcatttttcaatcattgcagtaattattgatttggacaaaaatcaattgacgtcaaaaccttaaagtgacgtttctctgcctatggagtggtcattcttttattcctttagtttcataataaattttcttttacttaaaaaaacttatagtttgatgaagagtgagatatatacctcatctcaaagaatcttcacacacacacttattaattacaaaaggaaaatcagtaattttgcagtggagacatatggccaactccaccttacccaagtggctgaaagtcactgcaccagtaatggcacaaaccaatgtgagatgattcctgatatgatacactaaaaagggcactgtctcttctgcatgttgcagacaaaaagtgggtaagctgacactgaaactaataattaggcaatgtcaagcaaatacaaattcaagttgacagtctgcaaagtaacatccatgtactcttcaacaatggatcgaccctagctactcaggaggctgaggtggaataattgtttgaggccaggagttccagatcagcctgggcaacatcatgcgaccccatctctaaaaacatctttttaaaaatgagccaggtgtggtagcatgcacccgtagtctcagctactcaggagcctgaggcaggaggatggtttcaacataggagatcgaggctgctgtgagctatgatcgtgctactgcactccagcctgggtgacacagcaagttcctgtttccaaacaacaacaagaaaacaaaacaaaacaaaacaaaaaatagatagaatagtgacaataaaaatggagaaaaagtaggctgactcaggaaatgcttagaaagtacagccatacctcaaagatattgtagatttgattcgagaccaccacaataaagcagatattgctacaaagtgagtcacacaaattgttttgtttccttgtgaatatgaagttatattggctgggtgtgatggctcatgcctataatcccagtactttaggagacggaggcgggagggtcacttgagcccaggaattgtgagatcaacctgggcatatagggagatcctgtctctatttaaaaaaagaagctatgtttacactacactatagtctatttaaagtgtgaaatggcgttatgtccttaattttaaaactcttgatgctggctgggttcggtggctcatacctgtaatcccatcactttgggaggccaagacaggttgattacttgaattcaggagttcaagaccagcctggacaacatggcaaaacacgtctttaaaaaaagaaaagaaaaaagaaaaacagaaagaaaaagaagaaaaactacttgctgcccttacttgaagctcaattatttaaaac

SEQ ID NO: 11851 - DNA, 2360 bp, Homo sapiens
  CDS (291)..(677)
aaaatcgcatttccaagcccaatgacatcgagctgtttcagatcgacgacgagacgttctttgtcatcgcagacagctcaaaggctggtctgtccacagtttataaatggaacagcaaaggattctattcttaccagtcactgcacgagtggttcagggacacggatgcggagtttgttgatatcgatggaaaatcgcatctcatcctgtccagccgctcccaggtccccatcatcctccagtggaataaaagctctaagaagtttgtcccccatggtgacatccccaacatggaggacgtactggctgtgaagagcttccgaatgcaaaataccctctacctttcccttacccgcttcatcggggactcccgggtcatgaggtggaacagtaagcagtttgtggagatccaagctcttccatcccggggggccatgaccctgcagcccttttcttttaaagataatcactacctggccctggggagtgactatacattctctcagatataccagtgggataaagagaagcagctattcaaaaagtttaaggagatttacgtgcaggcgcctcgttcattcacagctgtctccaccgacaggagagatttcttttttgcatccagtttcaaagggaaaacaaagatttttgaacatataattgttgacttaagtttgtgaaggtgtggtgggtgaaactaagagaaatgtagcattagctctcacaaaagaggaccaagaaaaatcaacaaacaaatcaaagccaggctcagagctctgaaattaaaaagcactgaaatagttagatgttttcaaacttttagaactcacattttaatcagggattgcatttattggctaactgcatgacatgcccattctaccattttaaaaaaaatcttaaagcctgtaatttctgagaaaagagtacagcatttactcttatcatctagaaatgtaatatgcttcccccccgctttttgatgaggaagaagacaattggataagatgggacagcacttataatgaaataaaaaaaaactttgagcccctctcattccactttagcaatctttttggtaagaactcttaaagccaaaagtctgctgaaaagatttgctgattattagtttaaaaatcttgtaacactcagcagtgctattttgagtcatcccagtttcctgaaagtaatgcccagtcttcctgaatcctccttaatagcagaaccttggtgattttgttggctcatatgaatgcttgtcatggatatgttaacaatttagtgtttgacattgcttcctctgccacaaagacaatactctggtgacacatgtctagacccagcacaggctgtaggcccaggagtgactcaaaggagtttttccctctttcttacggttcaaaggtgaccctggtggtggccagagcagtaatgcttgtttgatgctcttcatggctcatctgcttctcagaacccacccgttgagtttgtgggtaaccagcaggcaggccaaagactggtgcttttcatttcatcctttagagggatgaaacagttatttccgtctgatgagcattcggtagaatttttgaagtgagattttatgaagtcaaaggggactttacacagatctcgacctgctttgaaacctagaggtggccctttgatttgtgcgtgtccttgccctctggacaacttaatatttcaagtaatcgaataccaacttccctgccagcccacctgccttccgccccgcttgtgtaacagtcctgttttgttgagttgctgctattgcactgccagtgcagcccacaccaaatcacaacccaagatactcagataggaagactccttcctctcccagtactttaccaaaggaacccccgccaggacccacatggggccacgtgttggcagtggaatcagcctgtgcaggctggggatctcaggctgatcagtaggggccagctttggagccagccaagctgaatcccacactccaggtctgtgctcaagagaccagatggtgtatttccaaatgggcctctctggtatgggcaataggcaagctcctggggtctggttatgtggaagattcttagtggatgttccgcctggttagctggttctcttcagagaatataaagtgaatgcctttaggggtagctctgaaagagaaacccaacaacttcattcctagccatgaaagtagcacgatcatattgtactgtattgttattgtaaaatgactatttgccatgtcatgagtaggtagatgttttgccacaaatatgaatgtgtttgttgtttcctgactttaagcaatgaagattgagacaataaatagcactcagagaatg

SEQ ID NO: 11852 - protein, 129 aa, Homo sapiens
MEDVLAVKSFRMQNTLYLSLTRFIGDSRVMRWNSKQFVEIQALPSRGAMTLQPFSFKDNHYLALGSDYTFSQIYQWDKEKQLFKKFKEIYVQAPRSFTAVSTDRRDFFFASSFKGKTKIFEHIIVDLSL

SEQ ID NO: 11853 - DNA, 2347 bp, Homo sapiens
  CDS (91)..(2031)
ctggttctagtcttctcaaagaggaggaggaagatggtcaagaaggcagcattcacaatctaccacttgtaacatcccaaaggccattttatgatggacccatgccaactccccggcaaaagccatttcagtcaggttctacaccgttgcatctcactcacagattcatgcaagcttcactgcctgcactttagttcttgggattcaagcaaagagtggataatagacttgcctcagaatgaggatattgaagccatatgtctcggtcaaggatgggctgctgccgctactagtgccctgcttcttcgattgtttactattggaggggttcaaaaagaggtattcagccttgctggacctgtggtgtcaatggcaggacatggagaacagcttttcattgtttatcacagaggtacaggatttgatggggatcagtgccttggagttcaactgctagagctggggaaaaagaaaaaacaaattttgcatggtgaccctcttcctcttacaaggaaatcctaccttgcatggattgggttttcagctgaaggtaccccttgttacgtggattcagaaggaattgttcgaatgcttaacagaggacttggtaatacgtggactcctatatgtaatacaagagagcactgcaaaggaaaatctgatcactactgggtggttggtatccatgaaaatccccagcaactaaggtgcattccttgtaaaggttctcggtttcccccaacccttccacgccctgctgttgctatattatcctttaagcttccttactgtcagattgcaacagagaaaggacaaatggaggagcaattttggcgttcagttatatttcacaaccaccttgattatttagctaaaaatggttatgaatatgaagagagcactaaaaatcaagcaacaaaagagcaacaggaacttttaatgaaaatgcttgcgctttcttgtaaactggagcgagaattccgttgtgtggaacttgctgatctaatgactcaaaatgctgtgaatttagccattaaatatgcttctcgctctcggaaattaatactggctcaaaaactaagtgaactggctgtagagaaggcagccgaattgacagcaacccaggtggaagaggaagaagaagaagaagatttcagaaaaaagctgaatgctggttacagcaatactgctacagagtggagccaaccaaggttcagaaatcaagttgaagaagatgctgaggacagtggagaagctgatgatgaagaaaaaccagaaatacataagcctggacagaactcgttttccaaaagtacaaattcctctgatgtttcagctaagtcaggtgcagttacctttagcagccaaggacgagtaaatccctttaaggtatcagccagttccaaagaaccagccatgtcaatgaattcagcacgttcaactaatattttagacaatatgggcaaatcatccaagaaatccactgcacttagtcgaactacaaataatgaaaagtctcccattataaagcctctgattccaaagccgaagcctaagcaggcatctgcagcatcctatttccagaaaagaaattctcaaactaataaaactgaggaagtgaaagaagaaaatcttaaaaatgtattatctgaaaccccagctatatgtcctcctcaaaacactgaaaaccaaaggccaaagaccgggttccagatgtggttagaagaaaatagaagtaatattttgtctgacaatcctgacttttcagatgaagcagacataataaaagaaggaatgattcgatttagagtattgtcaactgaagaaagaaaggtgtgggctaacaaagccaaaggagaaacggcaagtgaaggaactgaagcaaagaagcgaaaacgtgtggttgatgaaagtgatgaaacagaaaaccaggaagaaaaagcaaaaaagaacctgaatttgtctaaaaagcagaaacctttagatttttctacaaatcagaaactatcagcttttgcatttaagcaggagtaaaggaagaaagtgaccctagggaagtaatggattttttttactcatctttgaatatagactcgagtctttgggaaactcattatatatatattttttaaagagtttgaagcaactgtttgtctttataagataatgtagtaattatattggtgtaggtaacaggacatatgtaaaaactatcatctttgcagattactctgcctccaaatgcagggcctttcagagatgcattgtgattgtaattactgagttgaagctccaaccaatttgaatttgtttcttaaccttgaaaaatcattaaagccaaggtatt

SEQ ID NO: 11854 - protein, 647 aa, Homo sapiens [sequence omitted]

SEQ ID NO: 11855 - DNA, 2622 bp, Homo sapiens
gaaacagcacagaacacgaggtggtccccatgtccctggcacactagcattccgggggatgaggaatccccagcccttgaggcagaggtgccgagtgactgccatgcttcgcccgtccgcatgggcgcttctgtccagctgcacccgaggccgggggtttccctcacctcggtcttcccaagatggagatgctaacgaaactgagaagggggcgtatcttgacgaaggtttgtgcaagtcaggcccttctggaacacagcagggcctacaacgaggggcctttgcgatgggctgtgaggatgggggtggtgggaagaattggccacgttagagaccccatgccaccccaccatggtgagtgctctgtgcctcctgctcacctgtggtgagctgggcgagctgggcgagctgggcgagctgggctggggagagcctgtgaggaccgagaggagaaatgagaagaaggaacaaaaatattatttctatgtaatttatattttacttatgccaaattatttatgataatttgccattgctatactgtaccagtgtcaaatgctgcagcctgccaagctgtgattttgtgaggcttgtccctatgtaggatgcaccgcaggcccctggccactgaaagagtgtgcagtggactgtgggtctcccatatgcggtgccgcccaaaggtggctttgcctcaagcaacctaccctgatgttttactcattggaatgtttttccccgattgtggatgacttcttttctgatggagagagtccaggagggatggaaaacgcctggatttaagctcagcatcccccacatgggcttttcgatcatcttcaggcctgaagctgcacgacctgaagttcgcctgcatttatcagccctctttgtgctgctccttgccaccttggggttcctgctggggaccatgtgtggttgtggcgtgtgtgagcagaagggaggatgaggaaaaagagaagaaaccccggtactgacaagctgtttttgagtgccactgtttgccatcatctaagccactgaatcaagtgtatttcaggcttatttcaacattccaatgccctggttttcctgcttgaatctgttcgtggtcaaaggtttgggggaatttgtgaccctggaacatccccagagtgaaagatggagctgggccacttcagaataaggccttggccccatcctctcacagcctaggtgctctgcaggcatgctgactgtcctgattgcgatccagcccgaaattccctcctctgctttcaaaagtcaaatcccccattcttaggccacactggtgtcacaagctcctgtcagggagctggggtttgggaatgtgctttgtgaactctgctttaaagtgaggggccgaggaaaacttagaaacaggcagagttggaagcagccaaatcacagtgggtgttgtgtgtgtgtgcgtgtgtgcatgcgtgcgtgtatgcgtgtgtgaaagcaggtggaccattccactttttagctcctattgatgcaccaaaccaagtgcctcatttctgtgccaaatgtttgccttggtcgttgtggacctccttctctaacttgcggtggcatgactgtcaggaggtgctggcattttcagcagatcctcatgtgttgaccctgatgtctttagcagaggcctctagcatctcggtttttcatccactgcaggaatgtggccacagggagcagaggtttgtactttccccaagaggtcctcatcctgagacggtctctacccatgtttaacccaaagagtgcaggccaggttccttatccttctgatgaaggatgggagagctcatttagaagtcagagcaaactagggtctcagtattgagaaacgcagcctgccagggaatcacagagacatcggggtgcccgtgatggccctcatgaagccatgcctcgacggcattcaggaagccctgcaaacgtgctttttgaactcattggccaggtgtgatttttacacaaggtaaacgtggtcaagggcatcggggaatttgctccaagcagatagctccctctgaggaaccaaaggaagcaagtttccacgatttctgaagagctggtataggaagtttctttcttccttttgtgttacatgtgcattaaacagaacaagctgtgtgtcatcacagattgtactgtgggctcagaaaccgtgagagagcccccaccgtggacaccggctctagggccacaggaaaaggaacgtttccaggcattttgtctccagggctcccgctggacaggcacgtactgccctggggagtaaatgcggagagttcacgaactgtgcccaacgcatgttatagccagggtcctactaactactcagtaaaagaacgtattgttgtattcctccagtgttaagctatagccatgttaaaagtcactgtgcatttattctcagcatcaaataccttgtaacgtcttctctgccttgttagtgcatatttttacttttctgatactgtaaagaatatatccagtatgtaaatgaatgttctataaatcttttgtatagtcattttctctgctccttaaatatcatctctattcagagtataataaaattatgaacttggt

SEQ ID NO: 11856 - DNA, 2726 bp, Homo sapiens
  CDS (53)..(2173)
ttcattttactggagaattaagaatgagccatatcaggtagtagaatgtgccatgcgagcacttcacttctcttccaggcacaataaagacattgccctggtccacctggcaaacgttctacacagagcacacttctctgctgatgctgctgtcgtggtccatgcagctctggatgacagtgacttcttcaccagctattacactttggggaatatatatgcaatgcttggggaatataaccactcagtgctctgttatgaccatgctttgcaggccagacctgggtttgagcaagctataaagaggaagcatgctgtcctatgtcagcaaaaactggagcagaaattggaggctcagcatagatctctccagcgaacactgaatgagttaaaagagtatcaaaagcagcatgaccactacctgagacagcaggaaatcctagaaaaacataaactgattcaggaggagcaaatcttaagaaatatcattcatgagactcagatggcaaaagaggcacaattaggaaatcatcagatatgccgactggtcaaccagcagcatagtttacattgccagtgggaccagcctgtacgctatcatcgtggagatatctttgaaaatgtggactatgttcagtttggtgaggattcatcaacctccagtatgatgtctgtgaactttgatgttcaatcaaatcagagtgatatcaatgattcggtcaagtcttctcccgtagcccattctattctctggatttggggcagggactctgatgcatatagggacaaacagcatattctatggcctaaaagagcagattgtacagaaagctaccctagagtccctgttggtggggaattgccaacgtattttctgcctccggaaaacaaaggactcaggatccacgaactcagcagtgatgattattctacagaagaagaggcccaaacccctgactgttccataactgacttcagaaaaagccacactctgtcctacttagtcaaagaattagaggttcgcatggatctgaaagccaaaatgccagatgaccatgcacgaaaaattttgctttcccgtattaataactatactatcccagaagaagaaattgggtctttcttatttcatgctattaataagccaaatgctcctatctggctcatactcaatgaagctggactatactggagagcagtaggaaatagcacttttgctattgcctgtcttcagagggctttgaatttagctccacttcaataccaagatgttcctcttgtcaacttggccaaccttttgattcattacggccttcatcttgatgccactaagctgctacttcaagctttggccatcaatagctctgagcctctgacctttttgagcctgggaaatgcttaccttgctctgaagaatatcagtggggcacttgaggcctttagacaggccttgaaattaaccaccaaatgtccagagtgtgaaaacagcctgaagttgatccgctgtatgcagttttatccttttctgtacaacatcacttcttctgtttgcagtggtaattgtcatgagaaaaccctggacaacagccatgacaaacagaaatattttgacaactcacagtcactggatgctgctgaagaagagccctctgagagaggaacagaggaggaccctgtattctctgttgagaattcagggagggactcagatgcccttagacttgaaagtacggtggttgaggagagcaatggttctgatgagatggagaattcagatgaaaccaaaatgtcagaagaaatactggctttggtggatgaatttcaacaggcatggcctttggaaggctttgggggtgcactagagatgaaagggcggcgtctagacttacaaggaatacgggtgctgaagaaaggtccccaggatggagtggccagaagctcttgctatggagactgcagaagtgaagatgatgaagcaacagaatggattacattccaggtcaaacgtgtaaagaaacccaaaggagatcataagaaaactcctgggaaaaaagtagaaacaggtcagatagaaaatggacatcgttaccaagcaaacctagagatcactggccccaaggtggcatctcctgggccacaagggctactagactggaagaccaggaaagtgccatagacataatgtaactggatttcagcaaggcatttaacagagcctcttatgatatccttgtgaaccagatggagagatgtgggcttgaagccttcccattgcctacaggataaaattcaaacttcctagtgtggtgtacaagaccctttacagcccgcctctgtgtacccttcaacaccattctctgaaccaaccatgctcatgtttttacctcagtgcctttgcacatgctattccctctgcctggaatgccctgtgccccctctgccctctgccgtgctaaaatatcactcatccttaaacttcaaaatcaagtgccatctcttccttgttaccttcaggcagaattagttactctttcctctgtgcaattgttctatatctccgctctagctcttttcctgttgtattgtaatgatttgtttatgtttaccttccttactagactgtgagctcaagagcaggccgtcttaattattcctttctgtacccctagtgtcttttatggttctcagccccttataacaggtgctcaataaatatttttcaaatg

SEQ ID NO: 11857 - protein, 707 aa, Homo sapiens [sequence omitted]

SEQ ID NO: 11858 - DNA, 3560 bp, Homo sapiens
ttcggatgcttggcttggttttgtgttgattctgcaagagcggttgattttggattgagtatcctgtggttcttgctttttactccttgttcatttgtctgttggtacagaccactttatggagctttcagtggttggatttcatcccttactggtctcaaccaaaatattcctgttggaatcatgatgataatcatagcagcacttttcacagcatcagcagtcatctcactagttatgttcaaaaaagtacatggactatatcgcacaacaggtgctagttttgagaaggcccaacaggagtttgcaacaggtgtgatgtccaacaaaactgtccagaccgcagctgcaaatgcagcttcaactgcagcatctagtgcagctcagaatgctttcaagggtaaccagatttaagaatcttcaaacaatacactgttaccttttgactgtacctttttctccagttactgtattctacaaatatttttatgttcaaaacacacagtacagacagcatggatatttcctgttcacttgtgcatgggctaaaaccaggaaaacttccttgtcttattactttacctaatagtttcttaatatttcagtgccccttgcagaaaaaatattacatgctaaataaatattctccatatttttgggggatgacattcagtgaattatttcagtggtgacccactgaaaattaataatggtacttatgattaaaaacgcatttaatactaactgcagtagttctttcaagaatctttagagataaggattgcacattggaaaagtaaaccatgtttcattcctttttccctatttatattgaaagaaataggccagcagagacttagggattttaaattggcttgctttttagctgtttcagtcaccagtgaagagcctatgtgcattttgtagtagataatgtaaaatttgtcatctttttcttttcttttttttagaatagctgatattttgataacaatctctaatttgcatgggcaccacatttcttatattaaaagaattagtgttttggcttctgtactgcttatggttgtaggattcaggggttaatggaatcacagaaatgatattctgcaagaatttcttttaaataaaaagtttgggggtgcaatataagaagtttatataatatgcagtacattatccaaaagagaaggtagttaatgcagtagaaagtagtggtaataattcctttttaaaaaaatttcggtagtcatatagtaacattttgctatatgaaaactttggtatattctgtggttacaactaagattgtgtctggcagctcttttttggggatgtgtgtgtgtgatttttaacagaggtattaaaggctagcctaactgttgtctaaaaagattgtacagtatttaagggattttccttttagcttttcatctccagtggcattaaacataaaaagaccctggcattttttcacatacttgaatccctaaatgcacctgtctttcactttttgagacagactgaatatatctaaaatttccagcaataaaaaaaaaagcatttaacttgcaccaagcaagaaaatataaatacagttaactgcattaagataatcacgttacaattgttactatgcagcacagaacttcattcttatagtattcttgggttcaacctttgaatcaattttaccactgattaaataaatgactcaaagacatctgtaagtcatgctgctgtgttttgaaagtctttaactaaattaagattgcagaatgatagtgattattcaattagattttaagtaaggattgtgatattagagctggaaatccttattttttaaaaaatcagataggcataaatagttaaatcactttcattctccccaaacctgtagttacagaaaaagttttatgctagaggtgggatgccaagttttcactatccatgaagcagcgctgcatgtcactaggtaacacagatccatccagatggtgtttacatttgatttatttgggatcttattgacatcaggtatacttggaagacatttcttttattcttcagcgtatgaatttaaagctattttttgtaaatatttctaatcagcgataatttctacctatgttctcaaccaacttagccagtttgtttttcagagcctgtagtcttattggaaatctattttatcagtgtgctttattgagtgtggattttgcatacattcaaaacattaaccacaaaatacagcaagtgcacctatattcaccattaacttatatcccaagtccattttttcctgtacactacaaacaaaagatatattagagacttttgaaaaatgctgaaatactttgcttcagaattggaatgtttatattatgtagaaatcttcaaaggtagcattattaaatagcaaagaataattagaacccacatatctttttttgtgtggatggggaaaatgttttaaaatccagttatttaatatgagtttgagagagaaaattgttttttaaaaatatatgtgcattgaaatgatggcaatgcttatagtatgatcaagtatgaaaggaactttaaattcttatatttacttttctctcagtaaattgttaaattttcactcagcaaaagattggcatttgttaagtgttctatatttagtactaaaatcacagtcatgaaatcatagtcataaaatggtcttcacacagcagtcatccgtgtcatttatcattttgtaatattaaattatggcaattttatttcaaactaaagtttgaacaccggaaagtcattactcagtgatttgtaatttgggacttggattatttatctagagatgtttgtatattttgtcagtaactaatactgcgctgccatcatggtgactgtcatggttctacagaaatgccctccatgtgtccctctaatgttgcatgtttcagtgggttggaagttttgtatatttattgtattaacacagagtgtcataaaataaaatgctgtttactggatgtttgtttgtataattttgaacactataatagcaattcagagacagacattgttaaaggtttgatgtatatagaaattccatgtttgattttttaaaatatgtgtataagtctgtcatgtgctaaacaaaataatatgaaagacctagttaaaaattctaaccaatgtaaaatgaccatttttctgttgcattagacctttacaggtaatggaacatgagcttcacccatattaaatattttggcccctttaaggtcaaaatacagatcatctagaagttagattcaaaatggaaaacctattcatggctcagatttttcattgtgggttaaaaatgggtgtctctgtactagtattgtatttattcaattgaacttgtattctgatttctaaccttgctacctattgctgttttatgtactgatgaaagtacctatttgtgtatattggatttttcacttggttagctaaagaagatgtaaaaatatctaaaataatgttcatggtgaatcttattttgagaaatacatgtt

SEQ ID NO: 11859 - DNA, 2513 bp, Homo sapiens
  CDS (56)..(1747)
aactagcccagccgcgcggagcgcctgggagaggagaaggagccgacctgccgagatggaggcgaccggcacctgggcgctgctgctggcgctggcgctgctcctgctgctgacgctggcgctgtccgggaccagggcccgaggccacctgccccccgggcccacgccgctaccactgctgggaaacctcctgcagctacggcccggggcgctgtattcagggctcatgcggctgagtaagaagtacggaccggtgttcaccatctacctgggaccctggcggcctgtggtggtcctggttgggcaggaggctgtgcgggaggccctgggaggtcaggctgaggagttcagcggccggggaaccgtagcgatgctggaagggacttttgatggccatggggttttcttctccaacggggagcggtggaggcagctgaggaagtttaccatgcttgctctgcgggacctgggcatggggaagcgagaaggcgaggagctgatccaggcggaggcccggtgtctggtggagacattccaggggacagaaggacgcccattcgatccctccctgctgctggcccaggccacctccaacgtagtctgctccctcctctttggcctccgcttctcctatgaggataaggagttccaggccgtggtccgggcagctggtggtaccctgctgggagtcagctcccaggggggtcagacctacgagatgttctcctggttcctgcggcccctgccaggcccccacaagcagctcctccaccacgtcagcaccttggctgccttcacagtccggcaggtgcagcagcaccaggggaacctggatgcttcgggccccgcacgtgaccttgtcgatgccttcctgctgaagatggcacaggaggaacaaaacccaggcacagaattcaccaacaagaacatgctgatgacagtcatttatttgctgtttgctgggacgatgacggtcagcaccacggtcggctataccctcctgctcctgatgaaataccctcatgtccaaaagtgggtacgtgaggagctgaatcgggagctgggggctggccaggcaccaagcctaggggaccgtacccgcctcccttacaccgacgcggttctgcatgaggcgcagcggctgctggcgctggtgcccatgggaataccccgcaccctcatgcggaccacccgcttccgagggtacaccctgccccagggcacggaggtcttccccctccttggctccatcctgcatgaccccaacatcttcaagcacccagaagagttcaacccagaccgtttcctggatgcagatggacggttcaggaagcatgaggcgttcctgcccttctccttagggaagcgtgtctgccttggagagggcctggcaaaagcggagctcttcctcttcttcaccaccatcctacaagccttctccctggagagcccgtgcccgccggacaccctgagcctcaagcccaccgtcagtggccttttcaacattcccccagcctcaacagtgggcatggacagggttaatgtctccagagtgtacactgcaggcagccacatttacacgcctgcagttgttttccggagtctgtcccacggcccacacgctcacttgactcatgctgctaagatgcacaaccgcacacccatacacaactacaagggccacaaagcaactgctgggttagctttccacagacataaatatagtccatctgcaatcacaagcacatagccaggtaacccaccaactcccctggatctgcagcccacacgtgggagtctggctgtcaccttcacaagccacagaaacggccacacatgttcacagctcacacgccctctccattcatcgaacttctcagtgtccctgtccctggtgcctggcacagggaacagcatgccccctccggggtcatgccacccagagactgtcgctgtctatggccccaactcatgctccctctcttggctacaccactctcccagcctgtgaccaccgatgtccacacacccccaaccacttgtccacacagctacccacgtacgacatcgtcccggctccccagagtatcttcccactgagacacgccgcccccacagaggcacagtccccagccacctctgcaactgcagccctcagtcacccctttttaagcaccctgattctaccaaatgcaaacacatctgggtctgcgattatgcacagagactttggacatacgaggaccctcagaccggaggaacacctgcccaaccccaacacgtgcttatgtaaccacgtggaaagcggcccctgctgcccctccacacacacatacacactcactgatctacagcccctgttcggcgtcagagtccccactagacccagtggaaggggttagagaccaagtaggggccagtttccaattcaccctgtcagggagtgagccggatctgacgttccttgtgacttaagggtccggcttgggaattaaagtttgtttctggccttt

SEQ ID NO: 11860 - protein, 564 aa, Homo sapiens
MEATGTWALLLALALLLLLTLALSGTRARGHLPPGPTPLPLLGNLLQLRPGALYSGLMRLSKKYGPVFTIYLGPWRPVVVLVGQEAVREALGGQAEEFSGRGTVAMLEGTFDGHGVFFSNGERWRQLRKFTMLALRDLGMGKREGEELIQAEARCLVETFQGTEGRPFDPSLLLAQATSNVVCSLLFGLRFSYEDKEFQAVVRAAGGTLLGVSSQGGQTYEMFSWFLRPLPGPHKQLLHHVSTLAAFTVRQVQQHQGNLDASGPARDLVDAFLLKMAQEEQNPGTEFTNKNMLMTVIYLLFAGTMTVSTTVGYTLLLLMKYPHVQKWVREELNRELGAGQAPSLGDRTRLPYTDAVLHEAQRLLALVPMGIPRTLMRTTRFRGYTLPQGTEVFPLLGSILHDPNIFKHPEEFNPDRFLDADGRFRKHEAFLPFSLGKRVCLGEGLAKAELFLFFTTILQAFSLESPCPPDTLSLKPTVSGLFNIPPASTVGMDRVNVSRVYTAGSHIYTPAVVFRSLSHGPHAHLTHAAKMHNRTPIHNYKGHKATAGLAFHRHKYSPSAITST

SEQ ID NO: 11861 - DNA, 2315 bp, Homo sapiens
  CDS (339)..(2315)
gctagccttgcgcggcgcgggagagcgcagtggcgccggcgggaaagggctgcggacctgcggcgccgcgttgtgcgttcgacgacgcggcaccggcttcgacgccctctgcccgctccagaagcagtaagaagacatgttggataacaagaagaggtgtagagtttgcatatatcaactgtggccttaatgagcatgttgacagcatcgatgctagacagacagtctttttactgctggattgtgcaagatatttaaccctattttgtttgaattatgacttaaatgtcaaacatcttaactaagaaaagggaaacattttagttttggaagtcagaatgccaaggagaaggaaaaatcttgggggaaatccttttcggaagactgcaaaccctaaggaagttgtcgtatccagtgttgctagtcgtgaggagccaaccactactctaccttccatgggtgagacaaaagttgatcaggaagaactcttcaccagtatctcagagatattttctgatctggatcctgatgtagtgtatttgatgctttctgaatgtgatttcaaagttgaaaatgctatggattgtctattagaattatctgccactgataccaagatagaagaatcatcttcacaaagtttcgttgcttctgagaaccaagtaggtgcagcagaaagtaaaataatggaaaaacgtcctgaagaagagagtgaagattcaaaaatggattcatttttggacatgcagctaactgaagacctggattccttaatacagaatgcttttgagaaattgaactcttctcctgatgaccaagtatactcatttttgccttcacaagatgttaatagttttaatgactcaagtgagtttataaatcctgattcaagtaatatgactcccattttttctacacaaaatatgaatttgaacggtgaaaatttagagaattctggttctactttaagtttaaacccattaccttcacattcagttttgaacgagtccaagtgttttataaaggataacacattggctttggaaagtaactacccggaagattctcttctcagtagttctttaaatgtagcaagtgactccatcgcaggttgtagcagtctcaatcaaaaacagaaagaacttttagaatctgagtgcgttgaggctcaattctctgaagctcctgtagatttggatgccagtgaacctcaggcttgtttaaaccttccagggcttgatttacctggtacaggtggggatcagaaatctactcgggtctctgatgtgtttctaccttccgaagggttcaacttcaagccacacaaacatcctgaactgccaactaaggggaaggatgtgagttactgcccggtacttgctcctctcccattgctgttgcctcctccgccacctccaccgatgtggaatccaatgattcctgcttttgacctcttccaaggaaaccatggctttgtagctcctgttgtaaccacagctgcacactggagatctgtcaactacacatttccaccctcagttatttctcacacttccccaacaaaagtatggagaaataaagatggaacaagtgcttatcaagtacaagaaaccccagtttttcaggttgtaagaaagaagacatcttacgttggactagttcttgttcttctcagaggtcttccgggatctggaaaatcttttttggcaaggactttgcaagaggataatccaagtggagtcattcttagtactgatgattatttttatataaatggacagtaccagtttgatgtaaagtacttaggagaagcacatgaatggaaccagaatcgtgcaaaagaagcatttgagaagaagatatctcctataattatagataatacaaacctacaggcatgggaaatgaaaccatatgttgctttgtctcagaaacacaaatataaagtcctttttcgggaaccagacacatggtggaagtttaaaccaaaggaacttgcaaggcgtaacattcatggggtaagcaaagaaaaaataacaagaatgttggaacattatcaacgttttgtttcagtgccaataattatgagttcttcggttccagagaaaattgaacgtattgagttgtgtgcatattcttgtgaggatagaagcactagcccaagagacgatgaagatattatctctgaaaaagaagaaaatattttatctttatctttgaagcatctagagttcactgaagagaagaatcttgatgtaaccaaagaaacaatgttacctgagaatgttgcatatctctctaatgcagatttaaac

SEQ ID NO: 11862 - protein, 659 aa, Homo sapiens
MPRRRKNLGGNPFRKTANPKEVVVSSVASREEPTTTLPSMGETKVDQEELFTSISEIFSDLDPDVVYLMLSECDFKVENAMDCLLELSATDTKIEESSSQSFVASENQVGAAESKIMEKRPEEESEDSKMDSFLDMQLTEDLDSLIQNAFEKLNSSPDDQVYSFLPSQDVNSFNDSSEFINPDSSNMTPIFSTQNMNLNGENLENSGSTLSLNPLPSHSVLNESKCFIKDNTLALESNYPEDSLLSSSLNVASDSIAGCSSLNQKQKELLESECVEAQFSEAPVDLDASEPQACLNLPGLDLPGTGGDQKSTRVSDVFLPSEGFNFKPHKHPELPTKGKDVSYCPVLAPLPLLLPPPPPPPMWNPMIPAFDLFQGNHGFVAPVVTTAAHWRSVNYTFPPSVISHTSPTKVWRNKDGTSAYQVQETPVFQVVRKKTSYVGLVLVLLRGLPGSGKSFLARTLQEDNPSGVILSTDDYFYINGQYQFDVKYLGEAHEWNQNRAKEAFEKKISPIIIDNTNLQAWEMKPYVALSQKHKYKVLFREPDTWWKFKPKELARRNIHGVSKEKITRMLEHYQRFVSVPIIMSSSVPEKIERIELCAYSCEDRSTSPRDDEDIISEKEENILSLSLKHLEFTEEKNLDVTKETMLPENVAYLSNADLN

SEQ ID NO: 11863 - DNA, 2548 bp, Homo sapiens
  CDS (10)..(2187)
aaaaaaaagatgaatcactgcaacttgtgggacagccaccaccctgaggtaccccagcgcatcttgcggatcatgtgccgtctggaggagctgggccttgccgggcgctgcctcaccctgacaccgcgccctgccacagaggctgagctgctcacctgtcacagtgctgagtacgtgggtcatctccgggccacagagaaaatgaaaacccgggagctgcaccgtgagagttccaactttgactccatctatatctgccccagtaccttcgcctgtgcacagcttgccactggcgctgcctgccgcctggtggaggctgtgctctcaggagaggttctgaatggtgctgctgtggtgcgtcccccaggacaccacgcagagcaggatgcagcttgcggtttttgctttttcaactctgtggctgtggctgctcgccatgcccagactatcagtgggcatgccctacggatcctgattgtggattgggatgtccaccacggtaatggaactcagcacatgtttgaggatgaccccagtgtgctatatgtgtccctgcaccgctatgatcatggcaccttcttccccatggggggtgagggtgccagcagccagatcggccgggctgcgggcacaggcttcaccgtcaacgtggcatggaacgggccccgcatgggtgatgctgactacctagctgcctggcatcgcctggtgcttcccattgcctacgagtttaacccagaactggtgctggtctcagctggctttgatgctgcacggggggatccgctggggggctgccaggtgtcacctgagggttatgcccacctcacccacctgctgatgggccttgccagtggccgcattatccttatcctagagggtggctataacctgacatccatctcagagtccatggctgcctgcactcgctccctccttggagacccaccacccctgctgaccctgccacggcccccactatcaggggccctggcctcaatcactgagaccatccaagtccatcgcagatactggcgcagcttacgggtcatgaaggtagaagacagagaaggaccctccagttctaagttggtcaccaagaaggcaccccaaccagccaaacctaggttagctgagcggatgaccacacgagaaaagaaggttctggaagcaggcatggggaaagtcacctcggcatcatttggggaagagtccactccaggccagactaactcagagacagctgtggtggccctcactcaggaccagccctcagaggcagccacagggggagccactctggcccagaccatttctgaggcagccattgggggagccatgctgggccagaccacctcagaggaggctgtcgggggagccactccggaccagaccacctcagaggagactgtgggaggagccattctggaccagaccacctcagaggatgctgttgggggagccacgctgggccagactacctcagaggaggctgtaggaggagctacactggcccagaccacctcggaggcagccatggagggagccacactggaccagactacgtcagaggaggctccagggggcaccgagctgatccaaactcctctagcctcgagcacagaccaccagacccccccaacctcacctgtgcagggaactacaccccagatatctcccagtacactgattgggagtctcaggaccttggagctaggcagcgaatctcagggggcctcagaatctcaggccccaggagaggagaacctactaggagaggcagctggaggtcaggacatggctgattcgatgctgatgcagggatctaggggcctcactgatcaggccatattttatgctgtgacaccactgccctggtgtccccatttggtggcagtatgccccatacctgcagcaggcctagacgtgacccaaccttgtggggactgtggaacaatccaagagaattgggtgtgtctctcttgctatcaggtctactgtggtcgttacatcaatggccacatgctccaacaccatggaaattctggacacccgctggtcctcagctacatcgacctgtcagcctggtgttactactgtcaggcctatgtccaccaccaggctctcctagatgtgaagaacatcgcccaccagaacaagtttggggaggatatgccccacccacactaagccccagaatacggtccctcttcaccttctgaggcccacgatagaccagctgtagctcattccagcctgtaccttggatgaggggtagcctcccactgcatcccatcctgaatatcctttgcaactccccaagagtgcttatttaagtgttaatacttttaagagaactgcgacgattaattgtggatctccccctgcccattgcctgcttgaggggcaccactactccagcccagaaggaaaggggggcagctcagtggccccaagagggagctgatatcatgaggataacattggcgggaggggagttaactggcaggcatggcaaggttgcatatgtaataaagtacaagctgtt

SEQ ID NO: 11864 - protein, 726 aa, Homo sapiens [sequence omitted]

SEQ ID NO: 11865 - DNA, 4220 bp, Homo sapiens
  CDS (89)..(3646)
acgttgcccgggatgcggacaggttccgccgcctccagcgccccatcctgagccgattatctgcaattatgaaatgaagtaactcaagatgagcaagttaaaagtgataccagaaaaaagccttaccaataattctaggatcgtaggactcctggctcaactggagaagatcaatgctgagccttcagaatcagacactgcccgatatgttacatcaaaaattcttcatctggctcagagtcaagaaaaaacaaggagagaaatgacagccaaaggttctacaggaatggaaattctgctgtcaacattagagaacacaaaagatcttcaaactacacttaatatcttaagcattcttgttgagctggtgtcagctggtggaggtcgaagagtgagtttcttagtcaccaaaggtggttcacaaatattgttgcagttacttatgaatgccagcaaagaatctcccccacatgaggacttaatggtacagattcattctattcttgcaaagattggaccaaaagataaaaaatttggagtaaaggctagaattaatggggctctgaatataaccctgaatttggtcaagcagaatttgcagaatcatcgcttggttctaccttgccttcagcttttacgagtatattctgccaactctgtgaattcagtatccttagggaaaaatggagttgtggaactgatgtttaaaatcattggaccatttagtaagaagaattccagtcttataaaggttgctttagacactcttgctgcattgctaaaatcaaaaacaaatgccaggagagctgtagacagaggatatgtccaagtgcttttaacaatttatgtagattggcaccgccatgataaccggcatagaaacatgctcattcggaaaggaattttacggagtttaaaaagtgttacaaacatcaagttgggaagaaaagcatttattgatgccaatgggatgaaaattctgtataatacttcgcaattgcctgttattcctgtgactggtcctgtggctcagctctacagcttacctcctgaagtggatgacgtagtagatgaaagtgatgacaacgatgatattgatgtagaagctgaaaacgaaactgagaatgaagatgacctagatcaaaattttaagaatgatgatattgaaacagatattaacaaactaaaaccccagcaagaaccgggacgaacaatagaagatctaaaaatgtatgaacaccttttccctgagcttgttgatgattttcaggactatgatttaatctccaaagaaccaaagccttttgtatttgagggaaaagtacgtggtcctattgttgttcctacggcaggcgagggaacatctgggaattctggcaatttaagaaaagttgtaatgaaggagaacatatcttctaaaggagatgaaggtgaaaagaagtctacctttatggatctagcaaaagaagatattaaagataatgatagaacattacaacagcagccaggtgatcaaaatagaactatttcatcagtccatggtttaaacaatgatattgtaaaggccttggaccgaattacattgcagaatattccttctcaaacagccccaggttttactgcagaaatgaagaaggactgcagtcttcctcttactgtccttacctgtgctaaagcatgtccacacatggctacttgtggaaatgttctgtttgagggaagaacagttcagctagggaagctttgctgcactggagttggaactgaagatgatgaagatactgagtcaaattcatcggtagaacaagcatcggttgaagtacctgatggaccaacactccatgacccagacctctatattgagattgtgaaaaatacgaagtctgtcccagaatattcagaggtggcttatcccgattattttggtcacattccgcctccattcaaagagcctattttagaaaggccttatggtgtacaaaggacaaaaattgctcaagatattgaaaggctaatacatcagagtgatatcatagatcgtgtggtatatgacttggataacccaaattacaccattccagaagagggagatattttgaaatttaactccaaatttgagtctgggaatctgcgcaaagtaattcaaattagaaaaaatgaatatgatcttattctgaactcagacataaacagcaatcattatcatcagtggttttactttgaagtcagtggaatgcgaccaggtgttgcttacaggtttaacatcattaactgtgaaaagtccaacagtcagtttaattatggtatgcaaccactcatgtattcggttcaggaagcattaaatgccagaccatggtggattcgtatggggactgacatttgttactataaaaatcatttctcaagaagttcagttgctgcaggtgggcaaaagggaaaatcctactatacaattacatttactgtcaattttccacataaagatgatgtttgctactttgcttatcactatccatatacgtattcaactttacagatgcatcttcaaaaattggaatcagcacacaatcctcagcaaatctattttcggaaagatgtgttatgtgaaaccctgtctggaaacagctgccccttggtgactataacagcaatgccagagtctaattattatgaacatatctgccatttcagaaatcgcccttacgttttcttgtctgctcgggtacatcctggagaaactaatgcaagttgggttatgaaaggaacgttggaatatctcatgagcaataaccccactgctcagagcttacgagaatcttatatttttaaaattgtccctatgttaaatccagatggtgtcatcaatggaaatcatcgctgttctttaagtggagaggatttgaataggcagtggcaaagtccaagtccggatttacatcctacaatttaccatgctaaggggctgttgcaatacttggctgcagtgaagcgtttacccttggtttattgtgattatcatggccattcccgaaagaagaatgtatttatgtatggttgcagcatcaaagagacagtgtggcataccaatgataatgcaacttcatgtgatgttgtggaggatacgggatacaggacattgcctaagatactgagccatatcgccccagcattttgcatgagcagctgtagcttcgtagtggaaaaatctaaagaatccacagcacgtgttgtagtttggagggaaataggagtacaaagaagttataccatggagagtactttatgtggctgtgatcagggaaaatacaagggtttacagattggtacccgagaactggaagagatgggagcaaaattttgtgttggtcttttacgtttgaaaagactgacctctccattggagtataatctgccttccagcctgcttgactttgaaaatgatttaattgaatcaagctgcaaagtaactagccctaccacttatgtcttggatgaagatgaacctcgattccttgaagaagttgattacagtgcagaaagtaatgatgagttagatattgagttggctgaaaatgtaggagattatgaaccttctgctcaagaagaagtactttctgactctgaattatcaagaacatacctaccttgagcccgctgccatctcttgttaactgcaaagaataaatgaaatatcttggtttttatttcccaggaagcttgagagaaatgagtttatacagagctgactcaaaaagacaaaaagtaacttgggccagtttggtttcaagataataaatgtgttattaattaatgataaaattggcgcttgttttattttcgatattcaatgcactttatgtagcattgaatgatcaaatattggatttacctttaaaaaaaaaaaacctgagtatcattgcatgaatttttatctccctatggttatatcctgcatcaagtggataattttgaagtgtgttcagaatataaaattgaaattttagagttgttgaaaatcctgacttgttgaaaactaatatatatgtacatggatttctatagatgtgtttgtttagaagtgggtagatattgcagataagactgttcttcagaatcatgttaactattgggttgtgactgaagtagtgcagggtttgccttgaaaccattacattctacatttaccaaattaaacaaataaaaactgtattaaatgttgc

SEQ ID NO: 11866 - protein, 1186 aa, Homo sapiens
MSKLKVIPEKSLTNNSRIVGLLAQLEKINAEPSESDTARYVTSKILHLAQSQEKTRREMTAKGSTGMEILLSTLENTKDLQTTLNILSILVELVSAGGGRRVSFLVTKGGSQILLQLLMNASKESPPHEDLMVQIHSILAKIGPKDKKFGVKARINGALNITLNLVKQNLQNHRLVLPCLQLLRVYSANSVNSVSLGKNGVVELMFKIIGPFSKKNSSLIKVALDTLAALLKSKTNARRAVDRGYVQVLLTIYVDWHRHDNRHRNMLIRKGILRSLKSVTNIKLGRKAFIDANGMKILYNTSQLPVIPVTGPVAQLYSLPPEVDDVVDESDDNDDIDVEAENETENEDDLDQNFKNDDIETDINKLKPQQEPGRTIEDLKMYEHLFPELVDDFQDYDLISKEPKPFVFEGKVRGPIVVPTAGEGTSGNSGNLRKVVMKENISSKGDEGEKKSTFMDLAKEDIKDNDRTLQQQPGDQNRTISSVHGLNNDIVKALDRITLQNIPSQTAPGFTAEMKKDCSLPLTVLTCAKACPHMATCGNVLFEGRTVQLGKLCCTGVGTEDDEDTESNSSVEQASVEVPDGPTLHDPDLYIEIVKNTKSVPEYSEVAYPDYFGHIPPPFKEPILERPYGVQRTKIAQDIERLIHQSDIIDRVVYDLDNPNYTIPEEGDILKFNSKFESGNLRKVIQIRKNEYDLILNSDINSNHYHQWFYFEVSGMRPGVAYRFNIINCEKSNSQFNYGMQPLMYSVQEALNARPWWIRMGTDICYYKNHFSRSSVAAGGQKGKSYYTITFTVNFPHKDDVCYFAYHYPYTYSTLQMHLQKLESAHNPQQIYFRKDVLCETLSGNSCPLVTITAMPESNYYEHICHFRNRPYVFLSARVHPGETNASWVMKGTLEYLMSNNPTAQSLRESYIFKIVPMLNPDGVINGNHRCSLSGEDLNRQWQSPSPDLHPTIYHAKGLLQYLAAVKRLPLVYCDYHGHSRKKNVFMYGCSIKETVWHTNDNATSCDVVEDTGYRTLPKILSHIAPAFCMSSCSFVVEKSKESTARVVVWREIGVQRSYTMESTLCGCDQGKYKGLQIGTRELEEMGAKFCVGLLRLKRLTSPLEYNLPSSLLDFENDLIESSCKVTSPTTYVLDEDEPRFLEEVDYSAESNDELDIELAENVGDYEPSAQEEVLSDSELSRTYLP

SEQ ID NO: 11867 - DNA, 2506 bp, Homo sapiens
  CDS (710)..(2302)
cgatgaagatgaagaggataatctttttgggggtacagctgctaagaagcagacattgtctctacaagctcagagagaagagaaagcaaaagcctccgagctctccaaaaagaaagcatctgccctgttgttcagcagtgatgaggaggaccagtggaatattcctgcttcacagacccacttagcatctgacagcaggtctaaaggagaacccagggattctgggaccctccagagccaggaggccaaggctgtgaaaaagaccagtctctttgaggaagacaaagaagatgatctttttgccattgccaaggacagccaaaagaagacccagagagtgtcactcctctttgaagacgatgttgatagcggaggctctctgtttggctctcctcccacatctgttcctcctgcaacaaagaaaaaagagactgtctctgaggcaccacctttgctgttcagcgatgaagaagagaaggaggcacaacttggagtgaagtctgtggataagaaggttgagagtgccaaggagtcattaaaatttgggagaactgatgtggctgagtcagaaaaggaaggacttttgactagatctgctcaggagacagtcaagcattctgatttattttcttcatcatccccatgggacaaaggaaccaagcctagaaccaaaactgttcttagcttgtttgatgaggaagaggataaaatggaagatcaaaacattatccaggctccacagaaagaagtaggaaagggctgcgatcctgatgcccaccccaagagcacaggtgtcttccaggatgaagagctgcttttcagccacaagctccaaaaggacaatgacccagatgttgacctttttgctggcaccaaaaaaaccaagctgttagagccaagtgttgggagcctgtttggggatgatgaagatgatgatcttttcagctctgccaagtcccagcctttggtacaagagaaaaagagagtagtgaaaaaagaccactctgttaactctttcaaaaaccagaaacatcctgaatccattcaaggtagtaaagaaaaaggcatatggaagccggaaacacctcaggactcatcaggtctcgctccatttaaaaccaaagaaccattcactcggatcgggaagatacaagcaaatttagcgatcaacccagcggccttgctgcccacagcggcttcccagatctctgaagtaaagcctgttttgccagaattggcttttccttcatctgaacacagaaggagccacggtctggaaagtgtgcctgtccttcccgggagtggggaggccggtgtgagttttgatcttccagctcaggcagacaccttacacagtgcaaacaagagccgtgtcaagatgagagggaagcgtagaccgcagacccgtgcagctaggcggctggctgctcaggagtccagcgaggctgaggacatgagcgtccccagaggacccattgcacagtgggctgatggcgccatttccccaaatggccatcggccacagctcagagcagccagtggagaagacagcactgaggaggccctggcagctgccgctgcaccttgggaaggtggtcctgtgcctggagtggacacaagcccctttgcaaagtctctgggtcattccagaggggaggctgacctttttgattctggggacattttttccacgggcactggatctcagtccgtggagagaacaaaacccaaggcaaagatagcagagaatcctgccaacccaccagtgggtggtaaagcaaagagccccatgtttcctgctctaggcgaggccagcagtgatgatgatctctttcagtctgctaaaccaaaaccagcaaagaaaacaaatccctttcctctcctggaagatgaggatgacctctttacagatcagaaagtcaagaagaatgagacaaaatccagtagtcagcaggatgtcatattaacaacacaagatatttttgaggatgatatatttgctacggaagcaattaaaccctctcagaaaaccagagagaaggagaaaacattggaatctaatttatttgatgataacattgatatctttgctgacttaactgtaaaaccaaaagaaaagtccaaaaagaaagtggaagccaagtctatatttgatgatgatatggatgacatcttctccactggtatccaggctaagacaaccaaaccaaaaagccgatctgcacaggccgcacctgaaccaagatttgaacacaaggtgtccaacatctttgatgatcccctgaatgcctttggaggccagtagagcacacagggtatccacatgttaccctgcagctacattgttgagttagtgatgatattgtatatgctcatggtcttaactggattacaaaaagcaaatactagaacagctagctcatcttttacccaatgtacttagtatttttctgcactggtttaatcatgcttaatactacaaaacaaaaataaatatttcacagtg

SEQ ID NO: 11868 - protein, 531 aa, Homo sapiens [sequence omitted]

SEQ ID NO: 11869 - DNA, 2528 bp, Homo sapiens
aggccatgtaaaaattttccgtggagaagtttgattctaaagtagcttctctaaagtaggctttggtaggtaatcaacttgacagcagtctagatgtctcacaggacaggagggagtgagggaaaggggccatgattggctgctttgtggttttattttggttctttccattctccgccattcattggaggcttcgttccagacctgcctgggaaaacagcttctgagccattttggggagcagttcttcatctgaatggatggacatctgggcttccttcaagggccattgaatgggaactagaaaaccactggaaactagaaatttgagctattgggcccaccagtagcagcatgtgatactagatggttaaaatcatgaaagcagtcactatccaattagaagcagagtcacaacaactgttgggaaatgtgactcttggaggaaggtggggagggagtggccttgccagccctgtgggacgtcccctgaagtttgtaataagaccccttttccaaagggatgtgaattggagtgaaaaggaaatctttcatcttagaaaacttctggtccttaacgcagggtggtatttgggtatgtgcttggaaattgagatctcaagagtgtttgccttggagccagctccccaggaggccttttccagggacaaggcaaaagttgaaattctccatgggtagctagaaagccaatacatctagccctgctaagtcagaaaaagattatgaaaaatgttgaaatttacattcaaagcctcatttgcttatcttgctggagccaacccagtctaatagcaaaatagctgtcattgatacagaaacatcctcatttttaaatgtctgctttaccctgttactgagtttgagatgacttaaatcactgtgttgaccctcttctgaaccaaatctttagcattgatgaaaatagttattttattctttacatccttcaccccacactatggtcagggcatgaaacaccctgttgatcccttcccaggctcggcactgtctgctcactggagccggactcccaggttgtaattctaatgttgcctcatgagaacagaatggcagaaagtttagtcctgacagattcccccatagggagtaatgaggacagcatgaaacttggataggttttacccttagtccctataaggtggattttactaaggttttttaaatgatactgtcatcctcttggggtttatcagccaggttagaggagcccagtgtcctaacctctctcagatcatggcagagaaggagctgcctccagcccctttcttgctgagtttcatttgagcagttccatgtgtagacattccaagtcactgcttggtagttgctgtgggagcctgtcattggctatggccagttagttctcagctgagcttcctagggccagtgcaacagggccagaggctgctatagtgtaaattgaaataagaatagatcattgttttgtacacacacacaataaaatgtaatgatggtgctaatttcacggtataaataagcactgccaagggttgagggactggcagctcaagaaacccgggttcctgtttgggaggagattttatgtagaaaagtttgaggctttgttaaaagtggggagaaggaagatcctcagtgaagcctgcacccaaccctggagtggcccagtgcaatccagaggtggaagagatcctatatccaggtgaaggtggccattgagtttctcagggctggggccaccttgtccatagcctccgtccacgctgcctggagcaggttgttagagagctctggttgttgggtcttcctcagctcccttctgcccctctctacctcttccactcatggaagcccctctactgcttatgaagattaagggtagtattttctaaggaagtggaaagaattaaactagaaatccacaacctcggaagaagtgtttcgagtttaacatgcgctgtttctgcttatgtggttccttctctagagctgctttcccatggctttcaaaacatcaggttattgtggggcttcaggtgtaaggtcctggaagttcagcaaagtttcgtggacaagacatgggcacagagagtagaagcagaaataaatggttctatgttttcaacttccagggttggggcaggccagagcaaggcggtctcatcgaggtgggtgctacctgtgtgtgtgtagatgagtgtgctgaaggtggggagggcagcacacagcagctcatggcagagccgcctcctaggtcttggcaaagaggcaagctgacgatagacatctacctatattgttaagaaaggggtcggggggatcagccaaggtccatcattgcttttttgccgcgccccccccccccgcccccatagattgtcagctgtaagtgaaactcctagtgaaaaagaggggagccctgtgttaggagtccccataaacatgtactgtaattctttgtatatagaaaaaaaatttactgtaaagtaaagtttaactttactcat

SEQ ID NO: 11870 - DNA, 2241 bp, Homo sapiens
aagcagaatggcagacagaacctcaggagccccccatccctgagtccctggccgctgcagccgctgccgcccaacagctccaagtggctaggaagcaggatactcggcagacggccaccttcaggcagcagcccccacctatgaaggcctgcttgtcatgtcaccagcaaattcaccggaatgcacctatatgccctctttgcaaggccaagagtcggtcccggaaccccaaaaagccgaaacggaagcaggatgaataaagaaagggagagcacatgaagctttgctaattataacccctcaccttgaccagagtcattgatgtcctgatgtgaaacaacccttgcccaaccccacgaagtctcctatttaatgtgatggaagcacaacccctctctcactttgctcctatttctttctgctcttgggatttctggtttaggaagagatgtggttcaggtgctaaacagtgtgtctgatgatcccttctctcccactcacatttcaacccctgcccttgtttggagctaagggaagggcaaaaggctcagatatgattctctatctcttgtgcctgaggcctggagcctaaggagctgtagggtctgaggggcaggggaggcccatatcttgtttcaggtaaaggacccagtatttcccctccttgtacttttgccttaggttctcaagggacaatagtcttcatgttggattctccaacaggctgggtgcatgtatccccctactcctaccctcatctcatccttaaggcccagaggtagcttggacaagccctccttttcataatcatttgggaggcatggctgtaattctttagctttctccacttctgtctcccacatatactaaaattcttaggtactaggctgtgtgtcttgggatcttaagatcaatgaacctttccccaatatctagtctttgcaaattctagtagaagatttccacagtgaaatcagtgagccagaccaactctacatctcctgcctaacctactgcctaagtcattagggctgagggctcggctgtaggggcttccttaggctgagagtgcccccaggctgacatctgtgttggcttttgttcagaaccattactctggcacatgctcaatggtatattgcagggaggagaggagtagatttagatttgagtaaatgccaatcactttacacatgaaggtgggtgggactttccttccattcatcccttgctctcttggatctgaactcttctggagcctcagctcaggatagctgctggccactcctgtcctgtggattgtgcaggtggcctttcctcccaaaagaaaaggcatcaggctccccaagccccacagctctcctttccaccaaagccaggtttcctggtaaggtcactcgaagataagggatggggatgggggctgactgacaaaaaattttagccccaggtctcagtacctggctggggagggggatatttttccttccttaagtagttttacattgccacagtgtgtatgtgttcactatataaaatgttcctctgctctttgaaagtaagagtgttgtgtctgtacaaatccttttaacatgcattcattggagtaaattctgagtatctactgtgtattggataatacaaaagatgtaatgtcatttacctttctgggtagctcttgtttgctcttattcattccaccttacaaatgagaaagccaggcaccaaggacaataatttacctaattatcacaataatttccatttatttagcacctactctgtgccaggtacctatgcaagttgcttaatataaatgattgtatttgacttccaaaataccttacaagctaagtattcttatcaccattttaaaaaaaaagggatactgaacctccaaaaacttaaaagctttttcagagttaaacagctagtaagaggaaattgcaggatttggagccagctttgtccaactccagagctcatttttttctacttcttctccatgatcatttttaagaaaacctttctccctttcagaatggcttgatgatgagagtggttgaaataactttggaactgaaatcaagaactgggtgtcaaatgactgattcagggatataaaggccaagggctctctaaataatatcctgtacactaatctgtctctgtgcttgtcagggaattcaacagctaaataaaacctctctgtgcctcagtgtcctcatctggaaaatgggg

SEQ ID NO: 11871 - DNA, 2463 bp, Homo sapiens
  CDS (19)..(1920)
gtgcatacggctgccggcatggcacattacaacttcaagaaaattacggtggtgccgtccgccaaggacttcatagacctcacgttgtcgaagactcaacgaaagactccaaccgttattcataaacattaccaaatacatcgcattagacatttttacatgagaaaagtcaaatttactcaacagaattaccatgatagactttcacaaattctaacagatttccccaaattggatgatattcatccgttctatgctgatttgatgaatattctctacgacaaggatcattacaagttggctctggggcaaataaatattgccaaaaatttagtggacaatgttgctaaagattatgtgcgactgatgaagtatggcgactctctctaccgctgcaaacagctgaagcgtgcggccctgggacggatgtgcacagtgatcaagaggcagaagcagagtttggagtatttggagcaagtgcgtcagcatttatcccgtttgccaaccattgatccgaataccaggaccctgcttttgtgtgggtacccaaatgttgggaagtccagcttcatcaacaaggtgacgagagcagacgtggatgtccagccctatgcgttcacaaccaagtctctgtttgttgggcacatggattataagtatctacgttggcaggttgtagacactcctgggatcctggaccaccctctggaggataggaacaccatcgagatgcaggccatcactgccctggcccacctccgtgctgcggtcctgtatgtgatggatttgtctgagcagtgtgggcatgggctgagggagcagctagaactcttccagaacatcagacctctcttcatcaacaagcctctcatagttgtagccaacaaatgtgatgtgaagagaatagctgaactttctgaagatgatcagaaaatatttacagatttgcagtctgaaggattccctgtaatagagaccagcaccctgactgaggaaggtgttattaaagttaaaacagaggcttgcgataggcttttggctcatcgagtggaaaccaaaatgaagggaaataaagtgaatgaggtgctgaatagactgcacctggctatcccaaccaggagggacgataaggagaggccccctttcatccctgaaggagtggtggctcgcaggaagaggatggaaactgaggagtccaggaagaagagggaacgagatcttgagctggaaatgggagatgattatattttggatcttcagaagtactgggatttaatgaatttgtctgaaaaacatgataagataccagaaatctgggaaggccataatatagctgattatattgatccagccatcatgaagaaattggaagaattagaaaaagaagaagagctgagaacagctgctggagagtatgacagtgtatctgagagtgaagacgaagagatgctggaaatccgacagctggcaaagcaaattcgagagaaaaagaagttgaaaattctggagtccaaagaaaagaatacacagggacccaggatgccgcgaactgctaagaaggttcagaggacagttttggagaaggagatgcatagtcttggtgttgacatggacgataaagacgatgcccattacgcagtccaggcaagaagatcccggagcatcactaggaaaagaaagcgggaagactctgctcccccatcctctgtggcccggagtgggagttgctctcgaactccacgtgacgtttctggtcttagggatgtcaagatggtgaagaaagccaagactatgatgaagaatgctcagaagaagatgaatcggttggggaagaaaggggaggcggatagacacgtgtttgatatgaagcccaagcacttgctgtctgggaagaggaaagctggtaaaaaggacaggagatagtatccgtttggttggcgtggcttcgctagagtgttgctgtttatttcctggtttggcacagtatggtttcatgaaattggagctctgtataaactgaaaaagacaaaataagtaaagcacttgttgctttgctgaaaactatggttaaccctatataggtgtgggaaatttttgtcactgcataatattacaaatattttgagtagacagtgtttccacatttaatggagtatcagttgcttcagattttcagaactgggaagatttactggtgtaactgggttgtttttgatggagaaaaaccttattttcttttgtaagagctgggagcaaacacgtttatgagtgtgtcggaatcccgtgcttaaaatacgctcttaaattattttctagtcttattttacaatgtctcattgtagtctgtcttcaactattttatccaaaataaacctccagaagaaagtagttttcatttacttagctcatgttttggtttagttatagtcgctatggatttggccaaataaaaaggcaaacaac

SEQ ID NO: 11872 - protein, 634 aa, Homo sapiens [sequence omitted]

SEQ ID NO: 11873 - DNA, 2792 bp, Homo sapiens
  CDS (98)..(700)
attgcttctgggactaaaagataaagaggggtacacatctttctggaatgactgcatatcatcaggcctgcgagggggcatcctgatagagctggccatgcggggtcgaatctatctggaacccccgaccatgcgtaagaagcgactactagacagaaaggtactgctaaagtcagacagcccaacaggtgatgttttactggatgaaactctgaaacacatcaaagcaactgaacccacagaaactgtccaaacatggatagagctactcactggtgagacctggaaccccttcaaattacagtaccagctgagaaatgtacgagagcgcatcgcaaagaacctagtagagaaaggtattctaaccactgagaagcagaatttcctgctatttgacatgactactcatccagtgaccaatacaacagagaaacagcgactagtgaaaaaacttcaagatagtgtactagagcggtgggtaaatgaccctcagcgtatggacaagcgaacactagcactcctggtgctagcccactcctctgatgtgctagagaatgtcttctcctctctgacagatgacaagtatgatgtggcaatgaatcgagccaaggacttagtagaactggaccctgaagtggaagggacaaagcctagtgccacagaaatgatctgggctgtgctggcagccttcaataaatcttaaagccggcaggtggatttctccttttcccctgctggctggtgactgtcagagaccccatcactgagttttgtgcgatgagatgttttcatcatttttgtttccttttcttgaatcagacttgtgatttggggagagcaacttcagggcttctccatagaccttgaccattataagcagaccttatttctccctacacttccactccataggtaaataaactgggtgaacccacacacacccaatgaacattttctcccatttggtggtttagtttcacccagtgtgcttttggataagcagaaatatctaaatgggattttgagttctccagctatagaatgtgaatgagataaaaagtgaactatctattatatttttctgagtttgttttctatcataaatacatgttttcacagcctttgtctctcagactctgctaaataatgtagcttattgaaataactgtcgctgaataaggagcaatgagaaacaaaactaatttttggagcagatggtctctggaattgcatatcctgctagtgattttctcatctttccttttctaacctaatgagaatgtcccagattcaattacctggatgtcaaagtcctagagccagaaatatattctctcatccctcttagcattctcttgctccctcattcactagggcaaatgtctaaatgaagaaaagtctctctcaacacctcgttcatgcaatcagcattagaatttgtaaggaaggaaggggggtggcatgaaaatttccattcttggggtatatgactgtcctgtttcccccaggccactttttttttttttcttttgagacagggtcttgctcttgcccaggcaggagtacagtagtgcaatcacagctgactgcagccttgacctccagggctcaaggatcctcctgcctcagtctcccaactaagtgggactacaggcacgtgccaccatactcagcttttttttgtttgttttagacaagagtctcgctttgttgcccaggctggtcttgaattcctgggctcaagcaactcttccacctcagcctcccaaagtgctgagattactggcttgagccactgcacccacccctccagactactttaaatgtctctgctctgactgagttgaaggaattgtaagtttcagttgctgaatatatcagtatatctgaactccggatctttttatttcctatttttggcttcctacataaattaataaagtctgtctatatttaaggtttctgggagtagttttgtctatatttaatccatagatgtgctcctagtcatcagtcttatttcagtaaaaccatctttctggccaaatctctaacacgttttttacttcagtagtgagggcaatgagaagctttattaagaaagatcctatttaaagggctaatttggtattgaaagcatgctgatataaagtccagtatttgaggatataaagaggatgtgcactgagctgtgctgatgttcagcatttattatactttaatgggatagtgcttcttgaccattatagaacaacaaactgtcaaagggttaatacagatgacccagacctgacattaaatcctcttgattagaaataattaaatgaattatttattcatttctctcctctgccaaatctacttagccccacaaaaatgccccagctcagttaacatttttttgtttttcactttaggtatctcttaggcaaatagagatataaattgtaataggaaacagtctctaaatgtgaggctgaatacagcttcagtctggctctctaataggacaaaagccagtccatgtgttgtctctcactgatttagctttttcttttctttgaacaattcggcatgaattgaaaccaggttttcctgtggaaagttatagcttgattgggagatagaagttgaattgagttctttcttgcaactcttagtgtttatttttatatctcagtaagacgaggataccttcagtttgaatctgcataatgttcactgccaaactccttctcatttaatgcttatggccttcacatttctgtataataaagatcaattatcagctc

SEQ ID NO: 11874 - protein, 201 aa, Homo sapiens
MRGRIYLEPPTMRKKRLLDRKVLLKSDSPTGDVLLDETLKHIKATEPTETVQTWIELLTGETWNPFKLQYQLRNVRERIAKNLVEKGILTTEKQNFLLFDMTTHPVTNTTEKQRLVKKLQDSVLERWVNDPQRMDKRTLALLVLAHSSDVLENVFSSLTDDKYDVAMNRAKDLVELDPEVEGTKPSATEMIWAVLAAFNKS

SEQ ID NO: 11875 - DNA, 2554 bp, Homo sapiens
  CDS (251)..(2377)
atctaaacaagaaagtagtgagagtttgccaaaagaagcctttctggtcctctctgatgaagaggatatttcgggtgaaaaagatgagtctgaagttatatcgcaaaatgaaacgtgctctccagcagaagtagaaagtaatgaaaaggacaacagacctgaggaagaagagcaagtaatacatgaagatgatgaaagaccttctgagaaaaatgaattttctagacgaaaacgttctaaatcagaagacatggacaatgtacagtctaaacgtcgtcgatatatggaagaagaatatgaggcagaatttcaagtaaagattacagccaaaggagacattaaccagaaacttcaaaaggttatacagtggttgctggaagaaaaattgtgtgcgctgcagtgtgctgtatttgataagactttggcagaattgaaaacacgagtggaaaagattgaatgtaacaagaggcataaaacagttctcactgaactacaggccaagatagccaggttaaccaaacgctttgaagcagccaaagaagatcttaagaaaagacatgaacatccacccaacccaccagtatcaccaggaaaaactgtaaatgatgtcaacagcaataataacatgtcttacagaaatgcaggcacagtgagacagatgctggagtccaaaagaaatgtaagcgagagtgcaccaccatcctttcaaactcctgtgaatacagtatcttcaaccaatcttgtcactcctccagcagttgtcagtagtcaacctaaattgcagactccagtgacttcgggttccctcacagcaacgtcagttcttcctgcacccaatacagctactgtagttgctactactcaggtgcctagtggaaatccccagcctacaatctctttacagcctttgccagtgattttgcatgtacctgttgcagtatcctcccagcctcagcttctacagagccatccagggactttggtgactaatcaaccatctggcaatgttgaattcatttctgtgcaaagcccacctacagtgagtggtcttaccaaaaatccagtatccttgccatccttgccaaatcccactaaaccaaacaacgttccttctgtgcccagtcctagtattcaaaggaaccctactgccagtgctgcaccattgggaacaacacttgctgtgcaggctgttccaacagcacactctattgtacaagccacaaggacttctttacccacagtgggcccatcaggactctatagtccatcaactaatcgaggtcctatacagatgaaaattccaatttctgcatttagtacttcgtctgctgcagaacagaacagcaataccaccccaagaattgaaaaccagacaaacaaaacaatagatgcttctgtcagtaagaaagcagctgatagcacatcacagtgtggaaaagccactggcagtgattcaagtggtgtcattgatctcacaatggatgatgaagagagtggagcttcacaagaccccaaaaaactaaatcacactcctgtatcaaccatgagttcttctcagcctgtgtcacgaccattgcaacccatacaaccagcaccgcctcttcaaccatctggggtgccaacaagtggaccatctcagaccaccatacacttactacctacagctccaactaccgtgaatgtaacacatcgtccagtaactcaggtgaccacaagactccctgtaccaagagctcctgcaaaccaccaggtggtttatacaactcttcctgcaccaccagctcaggctcccttgcgaggaactgttatgcaggctcctgctgttcggcaggtcaatccccaaaatagtgttacagttcgagtgcctcaaacaaccacatatgttgtaaacaatggactaaccctgggatcaacaggacctcagctcacagtgcatcaccgaccaccacaagtgcatactgagcccccacgccccgtgcacccagcacccttaccagaagctccacaaccacagcgtctgcccccagaagctgccagcacatctctgcctcagaagccacacttgaagttagcacgcgttcagagtcaaaatggcatagtactgtcatggggtgtcctggaggtggatcgaagctgtgccactgttgatagctaccatctctatgcttaccatgaggaacccagtgccactgtgccctcacaatggaaaaagattggggaagtcaaggcacttcccttgcccatggcatgtactctcacccagtttgtatctggtagcaaatactactttgcagtacgagccaaggatatttatggacgttttgggcctttctgtgatcctcagtcaacagatgtgatctcttctacccagagcagttaaaccttggagcctttatattttcctcttttaaaatttccaccttttggtcttgtttttaatcttgtgcatgataccccatgtaaaatccaccttgtgcaagatttcttggacagatgtgtgtatacactacatttgtttataaccagaagcaaaataaactcagcccacaaagct

SEQ ID NO: 11876 - protein, 709 aa, Homo sapiens
MDNVQSKRRRYMEEEYEAEFQVKITAKGDINQKLQKVIQWLLEEKLCALQCAVFDKTLAELKTRVEKIECNKRHKTVLTELQAKIARLTKRFEAAKEDLKKRHEHPPNPPVSPGKTVNDVNSNNNMSYRNAGTVRQMLESKRNVSESAPPSFQTPVNTVSSTNLVTPPAVVSSQPKLQTPVTSGSLTATSVLPAPNTATVVATTQVPSGNPQPTISLQPLPVILHVPVAVSSQPQLLQSHPGTLVTNQPSGNVEFISVQSPPTVSGLTKNPVSLPSLPNPTKPNNVPSVPSPSIQRNPTASAAPLGTTLAVQAVPTAHSIVQATRTSLPTVGPSGLYSPSTNRGPIQMKIPISAFSTSSAAEQNSNTTPRIENQTNKTIDASVSKKAADSTSQCGKATGSDSSGVIDLTMDDEESGASQDPKKLNHTPVSTMSSSQPVSRPLQPIQPAPPLQPSGVPTSGPSQTTIHLLPTAPTTVNVTHRPVTQVTTRLPVPRAPANHQVVYTTLPAPPAQAPLRGTVMQAPAVRQVNPQNSVTVRVPQTTTYVVNNGLTLGSTGPQLTVHHRPPQVHTEPPRPVHPAPLPEAPQPQRLPPEAASTSLPQKPHLKLARVQSQNGIVLSWGVLEVDRSCATVDSYHLYAYHEEPSATVPSQWKKIGEVKALPLPMACTLTQFVSGSKYYFAVRAKDIYGRFGPFCDPQSTDVISSTQSS

SEQ ID NO: 11877 - DNA, 2431 bp, Homo sapiens
  CDS (346)..(1086)
tccgggttcggcaataacctggagccggcggcgtaggttggctctttagggcttcaccccgaagctccaccttcgctcccgtctttctggaaacaccgctttgatctcggcggtgcgggacaggtacctcccggctgctgcgggtgccctggatccagtcggctgcaccaggcgagcgagacccttccctggtggaggctcagagttccggcagggtgcatccggcctgtgtgtggcgcgaggcagggaagccggtacccgggtcctggccccagcgctgacgttttctctcccctttcttctctcttcgcggttgcggcgtcgcagacgctagtgtgagcccccatggcagatacgaccccgaacggcccccaaggggcgggcgctgtgcaattcatgatgaccaataaactggacacggcaatgtggctttctcgcttgttcacagtttactgctctgctctgtttgttctgcctcttcttgggttgcatgaagcagcaagcttttaccaacgtgctttgctggcaaatgctcttaccagtgctctgaggctgcatcaaagattaccacacttccagttaagcagagcattcctggcccaggctttgttagaggacagctgccactacctgttgtattcactcatctttgtaaattcctatccagttacaatgagtatcttcccagtcttgttattctctttgcttcatgctgccacatatacgaaaaaggtccttgacgcaaggggctcaaatagtttacctctgctgagatctgtcttggacaaattaagtgctaatcaacaaaatattctgaaattcattgcttgcaatgaaatattcctgatgcctgcgacagtttttatgctttttagtggtcaaggaagtttgctccaaccttttatatactatagatttcttacccttcgatattcgtctcgaagaaacccatattgtcggaccttatttaatgaactgaggattgttgttgaacacataataatgaaacctgcttgcccactgtttgtgagaagactttgtctccagagcattgcctttataagcagattggcaccaacagttccatagtttaacatctagttaagctacaaatatagtataagcattattagcagctggtacttctgctaggggttgtaaattccaggtgttacgctgacctcaatccaatttacataatttacataaatgcatctcggtggaaaaataatcattttcttggcatgttaaatcaagcttaaaaagttttgagaaaattttactgtgctgtgttgctaatggttaaagaagtctgtatctagtgataaatataccagtttttttagaaagatgctgttgtgcctatatcatgaagtacattaatttctcatgtaaaaaaaatagctctaaaatttgtttcaacctaattggtaacctgagtttatatctggcatgaattcattatggtgatacacatatgtgaattcagtacattttgagacagtattctaccattcagtaattttggttaatgattttaacacttctcagtgtatttaatttcaaattgtttttttaattggttttatgctgctttgttaggacagatgtgttttgaatgtaccattataagaagaattctatgtatcttaaactatgatcttctaaaattttatttccgtaagtacttctgtggccttgagtattttttaaaaggctcaactgtaagcctcttagccagttggataaatatttggggtcacctagccattgaaagcagaaagcagtagtgacacagctttcccttcaaagagccattgagaaacatttctcaaacaggaaatccttcttttactaatgtggacatatagattattcgtattatagtttgtagaactacctagttcagaatcttgactgccagttttcttggtttcttaggcttgaattttcatagacaattgcaacagtttagatgccttttgaaaggaatgtaatgaagattcagcatctgactatatgtgtgtctatcctgaaataataatggagagtatactgtagattacatgtttacccatcaaatctgacttaaaaggttaaatggaaggttttataggtaaggtaattgattgggaatggggtagggggaggagttgtgggggaataatgtgcatttcagtctcaacgcatagataaatttaggggaattggatgtattattcaactttgatttgggttgtaaaatgtgttaaatcctgttcattgaactcccatcaactcttataaaattcatgctgatcttcattaccgttgcatgattggaaatgtttaaaacattgtacagttttagtatagagaaatgtaatggtttttgtgaccagtttctgtctgcatgtaatttggatttctcaaatacattcattagtaattt

SEQ ID NO: 11878 - protein, 247 aa, Homo sapiens
MADTTPNGPQGAGAVQFMMTNKLDTAMWLSRLFTVYCSALFVLPLLGLHEAASFYQRALLANALTSALRLHQRLPHFQLSRAFLAQALLEDSCHYLLYSLIFVNSYPVTMSIFPVLLFSLLHAATYTKKVLDARGSNSLPLLRSVLDKLSANQQNILKFIACNEIFLMPATVFMLFSGQGSLLQPFIYYRFLTLRYSSRRNPYCRTLFNELRIVVEHIIMKPACPLFVRRLCLQSIAFISRLAPTVP

SEQ ID NO: 11879 - DNA, 2503 bp, Homo sapiens
agctgattttctgacagccccttctcctctcctcactggatatccagtttccagggtctgtgtgtggtgggaagcaaactggcctgaggttccatccactggtagaaatgaccccaaagacttcccatgcagggagggcaaagaagaaagtgctttggaatggagataccccttttcctcctcctgaatgtatcagagttagttatcaatgctgactgagtgtgcactctcctagacaccatggggagaggcagaagaggaaaccagatatggtccttcttcttgggactctcctgacctaggaaaagagacagatgaatgcagataactgagtctatatacagggactgccacaagctcacactttactgaatgttcagacctagtcatacatcctaagggcattgttggaagcttctggaactaagtctctggggatttgaatcaactcagaagactgactcattcacttggctgtggaggctgttccagatattaggagctatgtatgtggagccccggatttgggccaaaagatgcatttgactggagagaagggattgagatttgagcagttgttggacaacacagaaatgaaacagccatagcaaacttgcctgccgtgatttctctgctgagataatgggacttttcagactccctgtaactgagatctagataaaaagagacgtctggaaaaaaactggtcccaattgtcgcttggctttgctttcataactatctgagtgtggcatatgtcagactttgaaatgctgggtctcttggaaatacaaataccatctgggtctggataattcccagaaacctaggctactcagtaggaaatgaggagctggaaacataataccgagaccaggggcttgtccttgggccaccctgtctcgtgtcctggacacagtcacatgactcgtacagaaaatgtcactgggaagacaccataaggctcatcttttcacgacacagtgacctctgttatggacatcttgatttctctttgagaagccatccctcccccagtgtgtatagtctagcagccaagtccgccttgcctctggccaagggcagcctgaaactcaaacagggcccatcccttatccctggatggaaatcttgagcagagtgcctgacgggactgaagatggctgaaattccagcaagcagacagtggttctctgaagaggctcccctccgcccacacccatgagtgtctgctccccagatgctccaatcctacttctccagctttaccttctgttccataagctgcttcattttctgtctccaaatccctcttttgctggttggacaaagattgtttctgttgcctgcaatcaaataacccaaaaggatgaacaggtgaaatcataaacatacttttaagtgcctggaatatgcctgcttctgtccatctttcaacccacttgcatcagaagcccccttggaggatgagagcctgtcctgtgaaccatggtggttcagagtggaacacagcagagtgtggaacaccaggaatttagagcaatcagtgaaatatgatgtaggcctctatgtcagaaaaattactaataagcagttgattattagtaatcaataatagccttcccattttatatcgagcacagcagtcagcatgttaaaaacaaggactgctggacaccagctgcgatgaaatgctttatcagaggacggcccttgatgtctatgtccatttgcaagtgcggcattaattacaaggctggtttaagtataatcagtaagtttatatgctggatgctcaagatgatttctggctaaacatggaatttctatttctattttccttatgttaaaagccggaacagcaaaatgtattcctaatgtcactattatgacatttacatcccgaaaagttgcagtaactgatcaatacaatagtggaatgcctggaaacctgttccttttttgctaaaaaaaggagggcactttttatgtctttgatgtgaagttcatgttctttgacagtgattgatggaatatgctacagaaaaggctgattacattttactagagaagtaaaaaagaaatgcaggagaatcccacagctctgggattgaatggaaagcaaaggaggagctcctctagggggctatgggatgcctctgtgtagctattgaatctctggggccatggatgagaatttgcttggtcagtaggtcagcattcaagagtatgggctggatgcagagtaaacgacctgctgagagtaatggccactgctttacttctgtcttcaaaatcctgaacaagctcctcttttggccaactctaacctggaaccatgcagattaggaagagaaagagaagtggattgtgagaaagattttagcttggtcaagttgataacgggatgattcagaagaatgcaacccttatcaactaggtatatctcttttttcctacatttattgtccaaataaagcaaaatcatgctttcacctgcctg

SEQ ID NO: 11880 - DNA, 2442 bp, Homo sapiens
  CDS (74)..(1975)
aaggaagtcccacctgcgcccgacggcggaagttccgggagtgccaagtacccgcgtgcatacggctgccggcatggcacattacaacttcaagaaaattacggtggtgccgtccgccaaggacttcatagacctcacgttgtcgaagactcaacgaaagactccaaccgttattcataaacattaccaaatacatcgcattagacatttttacatgagaaaagtcaaatttactcaacagaattaccatgatagactttcacaaattctaacagatttccccaaattggatgatattcatccgttctatgctgatttgatgaatattctctacgacaaggatcattacaagttggctctggggcaaataaatattgccaaaaatttagtggacaatgttgctaaagattatgtgcgactgatgaagtatggcgactctctctaccgctgcaaacagctgaagcgtgcggccctgggacggatgtgcacagtgatcaagaggcagaagcagagtttggagtatttggagcaagtgcgtcagcatttatcccgtttgccaaccattgatccgaataccaggaccctgcttttgtgtgggtacccaaatgttgggaagtccagcttcatcaacaaggtgacgagagcagacgtggatgtccagccctatgcgttcacaaccaagtctctgtttgttgggcacatggattataagtatctacgttggcaggttgtagacactcctgggatcctggaccaccctctggaggataggaacaccatcgagatgcaggccatcactgccctggcccacctccgtgctgcggtcctgtatgtgatggatttgtctgagcagtgtgggcatgggctgagggagcagctagaactcttccagaacatcagacctctcttcatcaacaagcctctcatagttgtagccaacaaatgtgatgtgaagagaatagctgaactttctgaagatgatcagaaaatatttacagatttgcagtctgaaggattccctgtaatagagaccagcaccctgactgaggaaggtgttattaaagttaaaacagaggcttgcgataggcttttggctcatcgagtggaaaccaaaatgaagggaaataaagtgaatgaggtgctgaatagactgcacctggctatcccaaccaggagggacgataaggagaggccccctttcatccctgaaggagtggtggctcgcaggaagaggatggaaactgaggagtccaggaagaagagggaacgagatcttgagctggaaatgggagatgattatattttggatcttcagaagtactgggatttaatgaatttgtctgaaaaacatgataagataccagaaatctgggaaggccataatatagctgattatattgatccagccatcatgaagaaattggaagaattagaaaaagaagaagagctgagaacagctgctggagagtatgacagtgtatctgagagtgaagacgaagagatgctggaaatccgacagctggcaaagcaaattcgagagaaaaagaagttgaaaattctggagtccaaggaaaagaatacacagggacccaggatgccgcgaactgctaagaaggttcagaggacagttttggagaaggagatgcatagtcttggtgttgacatggacgataaagacgatgcccattacgcagtccaggcaagaagatcccggagcatcactaggaaaagaaagcgggaagactctgctcccccatcctctgtggcccggagtgggagttgctctcgaactccacgtgacgtttctggtcttagggatgtcaagatggtgaagaaagccaagactatgatgaagaatgctcagaagaagatgaatcggttggggaagaaaggggaggcggatagacacgtgtttgatatgaagcccaagcacttgctgtctgggaagaggaaagctggtaaaaaggacaggagatagtatccgtttggttggcgtggcttcgctagagtgttgctgtttatttcctggtttggcacagtatggtttcatgaaattggagctctgtataaactgaaaaagacaaaataagtaaagcacttgttgctttgctgaaaactatggttaaccctatataggtgtgggaaatttttgtcactgcataatattacaaatattttgagtagacagtgtttccacatttaatggagtatcagttgcttcagattttcagaactgggaagatttactggtgtaactgggttgtttttgatggagaaaaaccttattttcttttgtaagagctgggagcaaacacgtttatgagtgtgtcggaatcccgtgcttaaaatacgctcttaaattattttctagtcttattttacaatgtctcattgtagtctgtcttcaactattttatccaaaataaacctccagaagaaagt

SEQ ID NO: 11881 - protein, 634 aa, Homo sapiens [sequence omitted]

SEQ ID NO: 11882 - DNA, 2642 bp, Homo sapiens
  CDS (141)..(821)
acttccgggaacgccggggaaccgcagtagccgcctgctagtggcgctgctagccggccggcgcaggctgccgagcgggtgagcgcgcaggccaggccaaagccctggtacccgcgcggtgcgggcctcagtctgcggccatgggggcgtccgcgcggctgctgcgagcggtgatcatgggggccccgggctcgggcaagggcaccgtgtcgtcgcgcatcactacacacttcgagctgaagcacctctccagcggggacctgctccgggacaacatgctgcggggcacagaaattggcgtgttagccaaggctttcattgaccaagggaaactcatcccagatgatgtcatgactcggctggcccttcatgagctgaaaaatctcacccagtatagctggctgttggatggttttccaaggacacttccacaggcagaagccctagatagagcttatcagatcgacacagtgattaacctgaatgtgccctttgaggtcattaaacaacgccttactgctcgctggattcatcccgccagtggccgagtctataacattgaattcaaccctcccaaaactgtgggcattgatgacctgactggggagcctctcattcagcgtgaggatgataaaccagagacggttatcaagagactaaaggcttatgaagaccaaacaaagccagtcctggaatattaccagaaaaaaggggtgctggaaacattctccggaacagaaaccaacaagatttggccctatgtatatgctttcctacaaactaaagttccacaaagaagccagaaagcttcagttactccatgaggagaaatgtgtgtaactattaatagtaagatgggcaaacctcctagtccttgcatttagaagctgcttttcctaagacttctagtatgtatgaattctttgaaaattatattacttttatttctactgattttattttggatactaaggatgtgccaaatgattcggatactaagatgcatcgtttgaaatcatctagtgtgttgtatgcagttatcctcaaaaacatcagcgatgtctgaacctttaaaacatctgttagagcaaaattaaaagagcatttggtagtaatctaactttttgttcagttaataagtggttgataaagtttccatatttttctggaaaagttaaaaaaagttacatgtcatttggagaaaatacgtaatcagaaatttgtgcatagattgatgccaaaaaagacatttccagcattgtggaacatggtgagacactatataaaattccagaaagaaagcaactggatttacagatttattgtgagacacaaattcactgctgcctttacactaagaaatgtatatgttaaccatatatgctgtatttattttgtcgttaagcatactttcagtttactcagaattttcaatttgctataaagatgtatcaattagcatatagaaaaatattactttaagatgacttgtttcctttgaaaatacctgtgtactgagggttatgatttgtgtcaaaaattgacataagtgcttttacaagcaccaaagttgaatgaattttcaacaaaatgtaattaaagtctatgttttcagttatgactcaggttaagaaatgtgttttaggatctacttgctggtttttctttttgatccaaatgtgtgatctgccctgataaataacaagttatagtaccatctcccccgccaataaaaaagagaagaaaaaagagaaacccgtggcactatgtaaataaagtaagcatactttgttgttagtaaatagatgaggcatgcctgggaaatgctcccttggcataaatagcaatcaattataattagtaaacaggtgtaccaataaaaagaatttacatgataggttaacaaggaccaggaaagtgagtttcctgaaggagttctttgttcctgatcaaagaaattgatacctgttagcattcactgccaccatattttaaggagaaagaactctattggtgtcgtctgagcagccatttaaaaattggaatctaaaggatggttgctgatgtactgtgtggtctggtagaagtggggaaatatgagagatggaggaaaaacttgattatgtcttccatggcatatttactcttactttacttcgtgccaaatcaaatgaaacaagccgtcttacaagtcgttattgcctttaaaaatctgttccgtttttttcccaggtacttaaaatacaagtgccagtaagtggttcttatgtgttttggggggaaaattttatttcccttttcttctgatatttaaaaaattcatcgatctttcaagatgaaccaaggttttttaaaagaaatataggaaacacttcattctttataaaactttctataatgccttatttgaatgttaatcttatgtgctttctaaaaaatgttgtgaaataccaaacttatggattatcactaggttatcaagcatatattagtctttatcagaataaaatgaaatttcataactgtggctattactttgttcttggtccttcacagggcctgctccatcccaccttcctttctgctgcctgatgtctcaatggcttctgaatgactgttctaataaatgatcttaaaacagt

SEQ ID NO: 11883 - protein, 227 aa, Homo sapiens; identical to SEQ ID NO: 11492

SEQ ID NO: 11884 - DNA, 2920 bp, Homo sapiens
  CDS (112)..(2814)
ggcgacactttgctacggagtgcatcggacgtcgaagcctagagtctctgcgtctttccctcttccgctgcctcattcctttccttcctagccttggtcgtcgccgccaccatgaacaagaagaagaaaccgttcctagggatgcccgcgcccctcggctacgtgccggggctgggccggggcgccactggcttcaccacgcggtcagacattgggcccgcccgtgatgcaaatgaccctgtggatgatcgccatgcacccccaggcaagagaaccgttggggaccagatgaagaaaaatcaggctgctgacgatgacgacgaggatctaaatgacaccaattacgatgagtttaatggctatgctgggagcctcttctcaagtggaccctacgagaaagatgatgaggaagcagatgctatctatgcagccctggataaaaggatggatgaaagaagaaaagaaagacgggagcaaagggagaaagaagaaatagagaaatatcgtatggaacgccccaaaatccaacagcagttctcagacctcaagaggaagttggcagaagtcacagaagaagagtggctgagcatccccgaggttggcgatgccagaaataaacgtcagcggaacccacgctatgagaagctgacccctgttcctgacagtttctttgccaaacatttacagaccggagagaaccatacctcagtggatccccgacaaactcaatttggaggtcttaacacaccctatccaggtggactaaacactccatacccaggtggaatgacgccaggactgatgacacctggcacaggtgagctggacatgaggaagattggccaagcgaggaacactctgatggacatgaggctgagccaggtgtctgactccgtgagtggacagaccgtcgttgaccccaaaggctacctgacggatttaaattccatgatcccgacacgcggaggagacatcaatgatatcaagaaggcgcgactgctcctcaagtctgttcgggagacgaaccctcatcacccgccagcctggattgcatcagcccgcctggaagaagtcactgggaagctacaagtagctcggaaccttatcatgaaggggacggagatgtgccccaagagtgaagatgtctggctggaagcagccaggttgcagcctggggacacagccaaggccgtggtagcccaagctgtccgtcatctcccacagtctgtcaggatttacatcagagccgcagagctggaaacggacattcgtgcaaagaagcgggttcttcggaaagccctcgagcatgttccaaactcggttcgcttgtggaaagcagccgttgagctggaagaacctgaagatgctagaatcatgctgagccgagctgtggagtgctgccccaccagcgtggagctctggcttgctctggcaaggctggagacctatgaaaatgcccgcaaggtcttgaacaaggcgcgggagaacattcctacagaccgacatatctggatcacggctgctaagctggaggaagccaatgggaacacgcagatggtggagaagatcatcgaccgagccatcacctcgctgcgggccaacggtgtggagatcaaccgtgagcagtggatccaggatgccgaggaatgtgacagggctgggagtgtggccacctgccaggccgtcatgcgtgccgtgattgggattgggattgaggaggaagatcggaagcatacctggatggaggatgctgacagttgtgtagcccacaatgccctggagtgtgcacgagccatctacgcctacgccctgcaggtgttccccagcaagaagagtgtgtggctgcgcgccgcgtacttcgagaagaaccatggcactcgggagtccctggaagcactcctgcagagggctgtggcccactgccccaaagcagaggtgctgtggctcatgggcgccaagtccaagtggctggcaggggatgtgcctgcagcaaggagcatcctggccctggccttccaggtgttcatgaagtctgtgaagctggagtgggtgcaagacaacatcagggcagcccaagatctgtgcgaggaggccctgcggcactatgaggacttccccaagctgtggatgatgaaggggcagatcgaggagcagaaggagatgatggagaaggcgcgggaagcctataaccaggggttgaagaagtgtccccactccacacccctgtggcttttgctctctcggctggaggagaagattgggcagcttactcgagcacgggccattttggaaaagtctcgtctgaagaacccaaagaaccctgggctgtggttggagtccgtgcggctggagtaccgtgcggggctgaagaacatcgcaaatacactcatggccaaggcgctgcaggagtgccccaactccggtatcctgtggtctgaggccatcttcctcgaggcaaggccccagaggaggaccaagagcgtggatgccctgaagaagtgtgagcatgacccccatgtgctcctggccgtggccaagctgttttggagtcagcggaagatcaccaaggccagggagtggttccaccgcactgtgaagattgactcggacctgggggatgcctgggccttcttctacaagtttgagctgcagcatggcactgaggagcagcaggaggaggtgaggaagcgctgtgagagtgcagagcctcggcatggggagctgtggtgcgccgtgtccaaggacatcgccaactggcagaagaagatcggggacatccttaggctggtggccggccgcatcaagaacaccttctgattgagcggttgccatggccggtctccgtggggcagggttgggccgcatgtggaagggctctgagctgtgtcctccttcattaaaagtttttatgtctcgtgtc

SEQ ID NO: 11885 - protein, 901 aa, Homo sapiens [sequence omitted]

SEQ ID NO: 11886 - DNA, 2728 bp, Homo sapiens
  CDS (1)..(618)
atggacgaggacgtgctaaccaccctgaagatcctcatcatcggcgagagtggggtgggcaagtccagcctgctcttgaggttcacagatgatacgtttgatccagaacttgcagcaacaataggtgttgactttaaggtgaaaacaatttcagtggatggaaataaggctaaacttgcaatatgggatactgctggtcaagagaggtttagaacattaactcccagctattatagaggtgcacagggtgttatattagtttatgatgtcacaagaagagatacatttgttaaactggataattggttaaatgaattggaaacatactgtacaagaaatgacatagtaaacatgctagttggaaataaaatcgataaggaaaatcgtgaagtcgatagaaatgaaggcctgaaatttgcacgaaagcattccatgttatttatagaggcaagtgcaaaaacctgtgatggtgtacaatgtgcctttgaagaacttgttgaaaagatcattcagacccctggactgtgggaaagtgagaaccagaataaaggagtcaaactgtcacacagggaagaaggccaaggaggaggagcctgtggtggttattgctctgtgttataaactctgggaaattccatctcttgcatatttgatcagatagtgacatctttctgtatataaactctttaactgctattttagggaccttgcagtttgcacataattgttttatatcatagcagtaaatatttgcaagaaatcccactcatcgaccccgggtaaaatgttatggtaagcatgcacagtttgcagtctacagtttttttatgtagcacaaaataggtgtacctttataagtacattcaattttatgatttacatttatcatgtaatttttaaaaaaatccatctatctaggatatgttgatacaaagtctgcttttgctattctttttgcttaaatactcctatcattttctgaattacttggtatttagaactcctagcaccacggggaagaatagaggtatcatcaaacgtggcaaattttctttcaggaataataaagagcatgattccacagctcttctgggatgtttgagattcttttttagtactaagcaaaattctcatcacagaatgtagcccaggccaatttataactaaatctctatttgttcggatgatgcttctaaaacagcattgataggttaaagaagcttggtatttttaatttacttcaatgattagctcagttgcttaactggagttttaatcctgtgatatgtacattggattcatgactgtgcagcatttttagttatgtggtgtttggcagaatgacaataaggttttcccccattttggtttcaggaggacatgaatagtgtgtttattgtaactcctcatacacttttaaaaccaacatcttttttcataaatgttggtagtgtttgtccaggtaccttaactgtagcttgtgtaatgttgatgaatatctgtatcttacggcttccataatggctagttgatattcaaaaacctatttctgtgttttgaggggtggggaaaaaaaacactaagtgataatttgaaaaaggcatattgcttccagattctgatgtgtgagggaaaatactgtcacaatgaaaatcttgacaatttacttaacaagtaaccagtagttcatcaaaaccaacttgtacagactaataaatctttttcacagtattcagttttctcacctcttgctattgtatattgtagatttttttcattcatgtgttatttaatttacactgatctctgctattttaaccccccaaataagttatttgtcctttaaggttggttactataatacccctcagtaagattccagtattaatttctgggcagtttgttctctgtatacaattgcaaatgataagcatttttgtgagtgaccacctttgcaatatgtttgttaatttacttcatgttgggttctttctgaaatgtacatctttacatataaaaacctcacattctacttgatttacacttcctagtctacattacatgtggttgaaggttttatacattctatatgcttttactaaatatacaagatttactactagaaatttggagaaagaacactaacacatgtacttgtgatttgttcatgttatattaaaacttgagatttgtgtatttatgtagagtctgtattgacaagactgttgttttttgctccttgagctatataataatctgtgtattggattgttgtcttgatttggtctaaatttgaatatatatgagttacttgaatataacaaaaatgaattttgtttgatagatttatattgtaacctttttctagttcttgaataaatatagcctgctttccctagatgcatttgtgtaggaagtatatacatttccctattactctcatcagctgaagaatatgtactattgtgttactcaaattatgtggctttcattttgttgttttgttgcaagcttagtgttttgtagtggaggttttgtaaatgaaacagttgtaatatctaaggtcaggcacctagtaacagggttttgttaattcttttcagaatcattgaagcagtcttaaagggtcttttgcagatggtacaaattagaacaattagaatatagtattttgagttctagtagtactgagattgacccaaacaaataaaaaactattcaatttctg

SEQ ID NO: 11887 - protein, 206 aa, Homo sapiens
MDEDVLTTLKILIIGESGVGKSSLLLRFTDDTFDPELAATIGVDFKVKTISVDGNKAKLAIWDTAGQERFRTLTPSYYRGAQGVILVYDVTRRDTFVKLDNWLNELETYCTRNDIVNMLVGNKIDKENREVDRNEGLKFARKHSMLFIEASAKTCDGVQCAFEELVEKIIQTPGLWESENQNKGVKLSHREEGQGGGACGGYCSVL

SEQ ID NO: 11888 - DNA, 2864 bp, Homo sapiens
  CDS (286)..(2514)
ctaattttccttactctttttgtttgtttgtttcttagtgtggtttattgacaatcatttacaatgccgaagagtgctgtagtgagccagcacagtgggtaacacagcaacggagaacagatgcaggtttgaggaatttaacttgctaaaaccttgaactgaagtcttagagattggaacatacgggtttgtataaataggcttttaagccctgtttgcaatgggttactgataggagaaacttgcttgtggaatgtcagctgcgtgagctcactgtcagacaagatggaagaagaagggctggagtgtccaaactcttcctctgaaaaacgctattttcctgaatccctggattccagcggtggggatgaggaagaggttttggcctgtgaggatttggaacttaacccctttgatggattgccatattcatcacgttattataaacttctgaaagaaagagaagatcttcctatatggaaagaaaaatactcctttatggagaacctgcttcaaaatcaaatcgtgattgtttcaggagatgctaaatgtggtaagagcgctcaggttcctcagtggtgtgctgaatattgtctttccatccactaccagcacgggggcgtgatatgcacacaggtccacaagcagactgtggtccagctcgccctgcgggtggcggatgaaatggatgttaacattggtcatgaggttggctacgtgatccctttcgagaactgctgtaccaacgaaacaatcctgaggtattgtactgatgatatgctgcaaagagaaatggtgtccaatccttttttgggtagctatggggtcatcatcttagatgatattcatgaaagaagcattgcaactgatgtgttacttggacttcttaaagatgttttactagcaagaccagaactgaagctcataattaactcctcacctcacctgatcagcaaactcaattcttattatggaaacgtgcctgtcatagaagtgaaaaataaacaccctgtggaggttgtgtaccttagtgaggctcaaaaggattcttttgagtctattttacgccttatctttgaaattcaccactcgggtgagaaaggtgacattgtagtctttctggcctgtgaacaagatattgagaaagtctgtgaaactgtctatcaaggatctaacctaaacccagatcttggagaactggtggttgttcctttgtatccaaaagagaaatgttcattgttcaagccactcgatgaaacagaaaaaagatgccaagtttatcaaagaagagtggtgttaactactagctctggagagtttttgatctggagcaactcagtcagatttgttatcgatgtgggtgtggaaagaagaaaggtgtacaacccgagaataagagcaaactcgctcgtcatgcagcccatcagccagagccaggcagagatacgcaagcagattcttggctcatcttcttcaggaaaatttttctgcctgtacactgaagaatttgcctccaaagacatgacgccactgaagccagcagaaatgcaggaagccaacctaacaagcatggtgctttttatgaagaggatagacattgcgggcctaggccactgtgacttcatgaacagaccagcaccagaaagtttgatgcaggcattggaagacttagattatctggcagcactggataatgatggaaatctttctgaatttggaatcatcatgtcagagtttcctcttgatccacaactctcgaagtctatcttagcgtcctgtgaatttgactgtgtagatgaagtgctaacaatcgcggccatggtaacagctccaaattgcttttcacatgtgccacatggagctgaagaggctgccttgacttgttggaagacatttttacatcccgaaggagatcactttaccctcatcagcatttacaaggcttaccaagacacaactctgaattctagcagtgagtactgtgtggaaaagtggtgtcgtgattacttcctcaactgttcagcactcagaatggcagatgttattcgagctgaactcttagaaattatcaagcgaatcgagcttccctatgcagaacctgcttttggctccaaggaaaacactctaaacataaagaaagctcttctgtccggttactttatgcagattgctcgggatgttgatggatcaggtaactacttaatgctgacacataagcaggttgctcagctgcatcccctgtctggttactcaatcaccaagaagatgccagagtgggtcctcttccataaattcagcatttctgagaacaactacatcaggattacctcagaaatctctcctgaactatttatgcagctggtaccacaatactatttcagtaatctgcctcctagtgaaagtaaggacattctacagcaagtagtggatcacctatcccctgtgtcaacaatgaataaggaacagcaaatgtgtgagacgtgccctgaaactgaacagagatgcactctccagtgactccccagcaaacacaaggtgcagcagggtcccaaaggtagctggatggctgaactgctggatatgggagatacatgacgcgaagacggatttcacatccacaggacggtcttgaagaaaataacactgtgtatattattttaaaataaaaaatagaagtttttattgagttctttaaattacgactccatgcttttcttcttcttggaaaagtttttaaatcaaccactcataatttgaccaaaattttaaaaaactggtattttgtaaatgtgtcagagacacatgggacagaaccctactttttgtagaggaacttaatctgaataaagtctgagtttttcagt

SEQ ID NO: 11889 - protein, 743 aa, Homo sapiens
MEEEGLECPNSSSEKRYFPESLDSSGGDEEEVLACEDLELNPFDGLPYSSRYYKLLKEREDLPIWKEKYSFMENLLQNQIVIVSGDAKCGKSAQVPQWCAEYCLSIHYQHGGVICTQVHKQTVVQLALRVADEMDVNIGHEVGYVIPFENCCTNETILRYCTDDMLQREMVSNPFLGSYGVIILDDIHERSIATDVLLGLLKDVLLARPELKLIINSSPHLISKLNSYYGNVPVIEVKNKHPVEVVYLSEAQKDSFESILRLIFEIHHSGEKGDIVVFLACEQDIEKVCETVYQGSNLNPDLGELVVVPLYPKEKCSLFKPLDETEKRCQVYQRRVVLTTSSGEFLIWSNSVRFVIDVGVERRKVYNPRIRANSLVMQPISQSQAEIRKQILGSSSSGKFFCLYTEEFASKDMTPLKPAEMQEANLTSMVLFMKRIDIAGLGHCDFMNRPAPESLMQALEDLDYLAALDNDGNLSEFGIIMSEFPLDPQLSKSILASCEFDCVDEVLTIAAMVTAPNCFSHVPHGAEEAALTCWKTFLHPEGDHFTLISIYKAYQDTTLNSSSEYCVEKWCRDYFLNCSALRMADVIRAELLEIIKRIELPYAEPAFGSKENTLNIKKALLSGYFMQIARDVDGSGNYLMLTHKQVAQLHPLSGYSITKKMPEWVLFHKFSISENNYIRITSEISPELFMQLVPQYYFSNLPPSESKDILQQVVDHLSPVSTMNKEQQMCETCPETEQRCTLQ

SEQ ID NO: 11890 - DNA, 2366 bp, Homo sapiens
  CDS (149)..(1276)
aacgctggtcccggggactgagtaaggtgtctggatcggagggaggttcgggtgggcatcgggcggctggaagagctcgactcgtcccgctgggaaagcgcgagtctgagtggaaccctggacgacttgcagagcggctggcgcagtcatggcggactactggaagtcacagccaaagaaattctgtgattactgcaagtgctggatagcagacaataggcctagtgttgaatttcatgaaagaggaaagaatcataaggaagatgtggcaaaaaggatcagtgagattaaacagaaaagcctggataaggcaaaggaagaagaaaaggcatcaaaggagtttgctgcaatggaggcagctgccctgaaagcataccaagaggatttgaaaagacttggcttagagtcagaaattttggagccaagcataacaccagtaaccagcactatcccacctacctcgacatcaaatcaacagaaagaaaagaaagaaaagaagaaaagaaaaaaagatccttcaaagggcagatgggtagaaggcataacctctgagggttaccattactattatgatcttatctcaggagcatctcagtgggagaaacctgaaggatttcaaggagacttaaaaaagacagcagtgaagaccgtttgggtagaaggtttaagtgaagatggttttacctattactataatccagaaacaggagaatccagatgggagaaacctgatgatttcattccacacactagtgatctgccttctagtaaggtcaatgaaaattcacttggcaccctagatgaatccaaatcatcagattcgcatagtgattctgatggggaacaggaagcagaagaaggaggggtctctacagagacagaaaagccaaaaataaagtttaaggaaaaaaataaaaatagtgatggaggaagtgacccagaaacacagaaagaaaaaagtattcagaaacagaattcattaggttcaaatgaagaaaaatcgaaaactcttaagaaatcaaacccatatggagaatggcaagaaattaaacaagaggttgagtctcatgaggaggtagatttggaacttccaagcactgaaaatgagtatgtatcaacttcagaagctgatggtggcggagaacccaaagtggtatttaaagaaaaaacagtcacttctcttggagttatggcagatggagtggccccagtcttcaaaaagagaagaactgaaaatggaaaatctagaaatttaaggcaacgaggtgatgatcaatagttgcaggagagctttttgtacatgcttttaggacagaatggagacttatacacccaaagtttatctgtgtttgtttgtaagtattatgatgctaaaaatttagatttattctaaacgtatttgatgtgaactaaaataaatattttttcatgtgaaatttattttggttcctaaaatggaagcctaccacattgcattgtaatacagtgtattatgttcagtgtctaaaaactgctaattaagtcataatttaagatgctatgtatctgttatttaaaacatggagaaacagggcctttattccattcatattcataagagcatatttatcctgcattgaaaatgcattacttttgcacattgatattaactgttgtccaacaaataagtatcggagtacgtgagaatattcccagcccagtgatgatttggttctgaggctgatgtgagaaagctgatgtaaaaaatgtatgcatattggcttaccttactcaatttaaagtcaaaagccaacagccaggagcagctcaggtacttcagatgtgcttaatatggagtgaaaactggaccagaggtggaaagatgtatttgccccagttcacttcaaagcagcaaacgttgtttaagcattttagtttgaaccaggcattgtgttaggaatccagggataaagatgaatgaaatgtatttctgttcttcaggagttcacattctagcatatgccttttttcccccagtcatgcactctttttagcagtcttatatgtactagaaaagattttttaaagtttatttaaagctgtgtagatgaaggtttgatctaaaatagtataaggtctccagcttcagtaaaagtttttagtgtttacttaaattagtaatttctcactttctgtctggttaaaatgtcttaaaaagtagaattttcttctttaatccgtttagtagttacctcccttttacttttcaaattcacaaaattacatttctcataaattgtatagtatttaacttataatagttaatatttgtctttttaagatgactgtacatgtaagaaaaaagcttattaaaaacttgatcaaag

SEQ ID NO: 11891 - protein, 376 aa, Homo sapiens [sequence omitted]

SEQ ID NO: 11892 - DNA, 2182 bp, Homo sapiens
actcagtgcagagggaaattgacacagccatgatgaggcctggctcacaagagccatagttactgtaggagtttctgtggctaaatatgcttagctattgaggcaaggacatgtgctggatgtgtatgcagtctttgaagctggagaggcctgtgttggaaactgtgctctgtcccatgccagttccctgaccttggaacccctagagcaatcaacagacagacagagccctgcttcatggagcgtctgctctctcctggagctcacacgctgaaacagacaggatgcaacacctcagggttgttggagaaccagaggctgttgcaattaggatggcgaatggtgaaaaacagtgtggttgaattgaacataagctgaagggctagacatcatggcttcaatccttgtggaggagccttcatctaccacataagaattgcagcaaaccctgcagctatcctgaagctgccatgctgaaaaggccaattgggagaccacatagagaccgagagagacttccaaggactccagccaatcctgggccccagcagtttgaatctcccagcaatgccaccatacaggagagggagcaaatactcagaagattcaagtgccagctgcatgggttgatacctacataaaaggcattgggtatgtgctcttgggtgattcccctaatcatagtggaaagatgggagctgagactctaagactgtaagtaacttggccaagacttatggcttgatacggatcttctaactcaaaatcgtgtgttcttctcactacccaattattgcttcacacttcatcattttgcagatgactgtgtgttgatgagaggctgccataatttgaagtcattagaacaatgaaatagtatctgcacatatgcacagtcctcggatgcgatgggcattccctcaagctgcagtccagcaggaaattttcagtgctagaagagttaaactataagctgacttgagatgtagtagttcaaaacccttgccaataactctttattatgtgcagcattttcaaagcaaaattacaacatgttagaaagtgaatgaggcaaattactggtgatgtcatcaaagtaataactgctaatgacccttttactcctgggcattgcctgaggccacactgacaggaagagcagatctgctttctgtgaatccatttggattatctagaaggcatcctgaaagttatgaaaacataatgtgagaaaatgatagatcaaagtgtgaatacaatgcagggacaacagaaaggaaaatgtactctctgttgtgtaatgggtattttggccagtgtttgaagagctttattaaggagtgacaacaaacatatatttaaatgatgacatttcctccaaaataaaataaacaaataaatatgtagaatttaaaacttttttgtttccatgaaagagtttggaatacccttccaaactctcctcattcattgagacgatggatctcttgttattaaccgagacactgaattttgaggtgacatcctgttctggaggcagaaacattgccagcacttctccttcagcagttgatttattatgtgacagtcggtgatgagcttatcctcatgaagatgctccctcccacggacagccgtatcatacttgaggcctccctgccacttacccaggccactgcaatagcccctttgttgtcatctggttaagaactaaggttcttccttaaccagtccattcccctgacttccacagagaaaccattctataaactgctcatctgtcagctgttcaccagctcaaaaaccattcagaatcccacaccttctcccactgtccacagaatattgtcagtactccttctaagagaattcaaagcaacatgacatcatcctatatttctagccttacctaataaatattcataccgactacctactgctttctatacagggaaacatttcaaggcctccgaggtctgcttggaattctcccatccaccatcatttctgctgcctattaatattccacctataatttattcaccaaatattccttgaatgagtgccaggtgtcagatacctcagttccaaggtcctttcttttgtgaagcttttcttggaagctccctttctgagctcacactctaattgggacattatttaattatagtctgtattgaac

SEQ ID NO: 11893 - DNA, 3354 bp, Homo sapiens
  CDS (30)..(1865)
taattttaaagccagtcccagcagatcaaatgatagtttctccgtcaagcaatacttccacttcaacttccactcttcagagccctgtgggagctggcacacacactgtcacaaaaattcagtctggcataactgggacagtcatatcggctccttcaagcactcccatcaccccagccatgcccctagatgaagacccctccaaactgtgtagacatagtctaaaatgtttggagtgtaatgaagtcttccaggacgagacatcactggctacacatttccagcaggctgcagatacgagtggacaaaagacttgcactatctgccagatgctgcttcctaaccagtgcagttatgcatcacaccagagaatccatcagcacaaatctccctacacctgccctgagtgtggggccatctgcaggtcggtgcacttccagacccacgtcaccaagaactgtctgcactacacgaggagagttggttttcgatgtgtgcattgcaatgttgtgtactctgatgtggctgctctgaagtctcacattcaaggttctcactgtgaagtcttctacaagtgtcctatttgtccaatggcgtttaagtctgccccaagcacacattcccacgcctacacacagcatcctggcatcaagataggagaaccaaaaataatatataagtgttccatgtgcgacactgtgttcaccctgcaaaccttgctgtatcgccactttgaccaacacattgaaaaccagaaggtgtctgttttcaagtgtccagactgttctcttttatatgcacagaagcaacttatgatggaccatatcaagtctatgcatggaacattgaaaagtattgaagggcctccaaacttgggtataaacttgcctttgagcattaagcctgcaactcaaaattcagcaaatcagaacaaagaggacaccaaatccatgaatgggaaagagaaattggaaaagaaatctccatctcctgtgaaaaaatcaatggaaaccaagaaagtggccagtcctgggtggacgtgttgggagtgtgactgcctgttcatgcagagagatgtgtacatatcccacgtgaggaaggagcacgggaagcaaatgaagaaacacccctgccgccagtgtgacaagtctttcagctcgtcccacagcctgtgccggcacaaccggatcaagcacaaaggcatcaggaaagtgtacgcctgctcgcactgcccagactccagacgtacctttaccaaacgtttgatgctggagaagcacgtccagctgatgcatggcatcaaggaccctgacctgaaagaaatgacagatgccaccaatgaggaggaaacagaaataaaagaagacactaaggtccccagtcccaagcggaagttggaagaaccagttctggagttcaggcctccccgaggagcaatcactcaaccactgaaaaagctgaaaatcaatgtttttaaggttcacaagtgtgccgtgtgtggcttcaccaccgaaaacctgctgcaattccacgaacacatccctcagcacaaatcggatggttcttcctaccagtgccgggagtgtggcctctgctacacgtctcacgtctctctgtccaggcacctcttcatcgtacacaagttaaaggaacctcagccagtgtccaagcaaaatggggctggggaagataaccaacaggagaacaaacccagccacgaggatgaatcccctgatggcgccgtgtcagacagaaagtgcaaagtgtgcgcaaaaacttttgaaactgaagctgccttaaatactcacatgcggacacacggcatggccttcatcaaatccaaaaggatgagctcagccgagaaatagccacagatgctccatgaggaaaatccctgtccacattggaataaaaaagacatttttgttacaaagtttgcagtataatagagttaacagtactgtctaggctgttgcaatatattctctttcaatgtaccttccttcacctcgtcgtatatatcctcgataagtattaaaacagtatttgagtttaaaagagtttgtatatatttaaatgaataactttttatactctttgttacatgtttgtatcagtatttagtggaaaaccatttgagttgttttgggttagaatttttctttttgtactgtttctttaaaacagagttcttagtaacaggggcagttcctgaattcaaataaaccattttgtatgtttggattttgaatgggttaactaattacaggctaaaataatgccttttttagtgtttttaatttttagaattcactacataaattgtaagtaattgtgggtctcaaaaacactaggaacttttaagtgtcttagcacttcctcgatgtgcctgccctgagggagtgagttcacatttgagacaactgcactccagtgtggacgtgcctttgtcttcaggccatgccgaagggtgtttaaagcagtcttgcaggtcgctcctttcccagccgtggataaaaactgaagctaggaatctaataaggaatgctgatttcctcagttccattttgaggaatggggaaggctattctaaagaaaaaaatgggatttgttttctcggcagatctgcaaggctggctttaagagcacaaggagggaaagtaacgaaagggctggactactataaaagttacaaatacgtagttagaccaatagatttatatagtcaggtttttgtcatgtaatttattaactaactattacagaaacacagctaagaatatcaagtatttctctggctcttgacagaaaaaaatcagttgacttaaccctttgctgtcaaaagagttggcgtttcctgttctgggtgctactgccaaacgttatggtacttagagtcgggatgcacaacttcaaccaccgacttatcaatgcagccgcctgtgtattgcaattggccgttaccttaagcactgagccacccgggtttagttcagccatttcaagaagtatatttaacgtcggtagttctgctttattaaaatgcagcagaggtactcttctgtcccttccgtttatagttctctgagagagttctattttttggttttgttttgtgttttcttttgcattttgtatcttgtatttatccctgaacatgttttgtaccttttttttttttttttttaagaaaaggaattcttttgtgtatatatagatacttgcatgatatactgtagtcaatgttcggttcctcaaaaggtcttgctgctgtcaggtgttatgcactccatccatcataactgtatgaaacacatttcatatgtaaataaacgtgggacatttggcccttgt

SEQ ID NO: 11894 - protein, 612 aa, Homo sapiens
MIVSPSSNTSTSTSTLQSPVGAGTHTVTKIQSGITGTVISAPSSTPITPAMPLDEDPSKLCRHSLKCLECNEVFQDETSLATHFQQAADTSGQKTCTICQMLLPNQCSYASHQRIHQHKSPYTCPECGAICRSVHFQTHVTKNCLHYTRRVGFRCVHCNVVYSDVAALKSHIQGSHCEVFYKCPICPMAFKSAPSTHSHAYTQHPGIKIGEPKIIYKCSMCDTVFTLQTLLYRHFDQHIENQKVSVFKCPDCSLLYAQKQLMMDHIKSMHGTLKSIEGPPNLGINLPLSIKPATQNSANQNKEDTKSMNGKEKLEKKSPSPVKKSMETKKVASPGWTCWECDCLFMQRDVYISHVRKEHGKQMKKHPCRQCDKSFSSSHSLCRHNRIKHKGIRKVYACSHCPDSRRTFTKRLMLEKHVQLMHGIKDPDLKEMTDATNEEETEIKEDTKVPSPKRKLEEPVLEFRPPRGAITQPLKKLKINVFKVHKCAVCGFTTENLLQFHEHIPQHKSDGSSYQCRECGLCYTSHVSLSRHLFIVHKLKEPQPVSKQNGAGEDNQQENKPSHEDESPDGAVSDRKCKVCAKTFETEAALNTHMRTHGMAFIKSKRMSSAEK

SEQ ID NO: 11895 - DNA, 2463 bp, Homo sapiens
  CDS (246)..(734)
cttctgggagcaagcctgcagcccggctcacctggagaaagggtgaccaagaactccacggagaaccaacccgcatacaggaagatcccaatggtaaaaccttcactgtcagcagctcggtgacattccaggttacccgggaggatgatggggcgagcatcgtgtgctctgtgaaccatgaatctctaaagggagctgacagatccacctctcaacgcattgaagttttatacacaccaactgcgatgattaggccagaccctccccatcctcgtgagggccagaagctgttgctacactgtgagggtcgcggcaatccagtcccccagcagtacctatgggagaaggagggcagtgtgccacccctgaagatgacccaggagagtgccctgatcttccctttcctcaacaagagtgacagtggcacctacggctgcacagccaccagcaacatgggcagctacaaggcctactacaccctcaatgttaatgaccccagtccggtgccctcctcctccagcacctaccacgccatcatcggtgggatcgtggctttcattgtcttcctgctgctcatcatgctcatcttcctcggccactacttgatccggcacaaaggaacctacctgacacatgaggcaaaaggctccgacgatgctccagacgcggacacggccatcatcaatgcagaaggcgggcagtcaggaggggacgacaagaaggaatatttcatctagaggcgcctgcccacttcctgcgccccccaggggccctgtggggactgctggggccgtcaccaacccggacttgtacagggaggcaggtgccaccttgacacctctcttccatagcaatgggaaagtgatgagtgcgggagtcctgaggagatgtggcctgcagacaacatgcagccatgcagggacccaggactgtaacctggggaggacgcgggtccctgcaaggaagagtagatttggagaggaaggatggaggtggactctcaccccattccccccgaaatgaacaaagccgggccctttccataggaactgcccttggagatagcagagtgtggctgcccctccttgctccagcagcagtgggagaggcactgctctggggcctgaactgcctctgcttcccccactgaggggcccctcactcttacccaagactctggattgttgcacggcaaccactcctcccatggcattgctcagcaactacttctcccttcccggccaccctgtgcccccttcctggtcccaacgccagcccttcatccttcctccctcagcagccaggcagacataacaacaaaactactaaaaggagcttcactgcagtgagctgtttcctgcccaaactaagggaataatgtgaactgtgtgcatgtgtgtggtgtgtatgcatgtgtgcatgtgtgtgtgtgtgtgtgcatgtgtgtgagtgagtgagaggcagagcgaggaactgaggaggagggctaagagccaggggtcctgggcaagtggacagggctgtgggacatgttggggaggctttgggaatggggtattcctagtcagggttcacacctcacctgggatgttgttccatgctggtatttcctctgccacccccaatgcccatcggtcttggagaaaggagtccccgggtgtgtgtttgcccagctgtccattctatctctcccttaaacacagagcattcagcccttccctggatttccctcctctgagccatggagtcagtgccacagcctttgttatgcacctctcaggcctctccctggcgttgaccctggaaagacctaccaccacctattttttcccatagtctgtacccagtgagttgaaggctgggtccccacccttccttttgatttcctgtcttccttctcgtggccccagctggttgctgtggagatgaggttcctggtcctccctgtcctggctggactgccccgcctcagatccaggatgcccttggcatcgctcccaccctcccccagcttttcctccctggtctgacaatgggcatgcaaaaaggggcagctgcaatctagcaggcctgcccacccccttcagttcaggtaatacagttgtgaatcttccagccgctggttagggccttgggcaccacaggcagcccctcacctaagccggggcctactcctcttacaacagcaagagagccctggggccccaggcctgttgagcttcttgtctcccagcacccgcttttgggaaaatgacttttcctcttcaagctgaaccactctgtccatattacacagaagccatatttgtacgggggggtgggagggagaggggctgttgtgctgtgtgtgtctgtccaggggtgggggggtgggggaagggagcagggaggggaccgtgtatctttataatctttctaactctcctgtgctaatctcagaggggtcaccctcaatatatctgg

SEQ ID NO: 11896 - protein, 163 aa, Homo sapiens
MIRPDPPHPREGQKLLLHCEGRGNPVPQQYLWEKEGSVPPLKMTQESALIFPFLNKSDSGTYGCTATSNMGSYKAYYTLNVNDPSPVPSSSSTYHAIIGGIVAFIVFLLLIMLIFLGHYLIRHKGTYLTHEAKGSDDAPDADTAIINAEGGQSGGDDKKEYFI

SEQ ID NO: 11897 - DNA, 2266 bp, Homo sapiens
  CDS (142)..(2265)
gatgaagatgatgaatctgatgacagccaatcagaatcagatagtaattcagaatcagatacagaaggatcagaagaagaagatgatgatgataaagaccaagatgaatcagatagtgatactgaaggagagaaaacttcaatgaaactgaataaaacaacttcctctgtcaaaagcccttccatgagtctcacaggtcactcaacacctcgtaacctccacatagcaaaagccccaggctctgctcctgctgccttatgttctgaatcccagtcacctgcttttcttggtacatcttcttccacacttacttcaagcccacactctggcacttccaaaagaagaagagtaacagatgaacgtgaactgcgtattccattggaatatggctggcagagagagacaagaataagaaactttggagggcgccttcaaggagaagtagcatattatgctccatgtggaaagaaacttaggcagtaccctgaagtaataaagggaatgcagtggtgtcttttgaaagaagaggatgtcattcctcgtatcagggcaatggaaggtcgtagaggaagaccaccaaatccagatagacaacgagcaagagaggaatccaggatgagacgtcggaaaggtcgacctccaaatgttggcaatgctgaattcctagataacgcagatgcaaagttgctaagaaaactgcaagctcaagaaatagccaggcaagcagcacaaataaagcttttgagaaaacttcaaaagcaggaacaggctcgggttgctaaagaagccaaaaaacaacaagcaataatggctgctgaggagaagcggaagcaaaaagaacagataaagattatgaaacagcaggaaaaaattaagagaatacagcaaatcagaatggaaaaagaacttcgagctcagcaaattctagaggctaaaaagaaaaagaaggaagaagcggcaaatgccaaattattggaggccgagaaacgaataaaggaaaaagaaatgagaagacaacaagctgttcttctgaaacatcaggaacgagagcgaaggcgacaacacatgatgcttatgaaagctatggaagctcgtaaaaaagcagaagaaaaagagcggttgaaacaagaaaaacgtgatgagaaaagattaaataaagagcgtaaactagagcagcgaagattagaattagaaatggcaaaggaactaaagaagcctaatgaagacatgtgcttagcagaccaaaagcctttgccagagttgcctcgtattccaggacttgttctctctggaagtacattttcagactgtctcatggtggtgcagttcttacgaaactttggtaaagttttgggctttgatgtgaatattgatgttccaaacctgagtgttcttcaagagggattgctaaatataggggacagcatgggtgaagtacaagacttgcttgtgaggctcctctcagctgctgtatgtgatccaggtctaataacaggatacaaggctaaaacagctcttggagaacatttgctgaatgttggtgtgaatcgagacaatgtttccgagattttacagatatttatggaagcccactgtggacaaactgagcttactgaaagtctgaagaccaaagcttttcaggctcacactccagcacagaaagcttcagtcctggctttcctgatcaatgaactggcatgcagcaagagtgtggtcagtgaaatcgacaagaacattgattatatgtcaaacttgaggagagataaatgggtggtagaaggtaaactccgcaagctcagaatcattcatgctaagaaaacaggcaaaagagacacttcaggtggcattgatctgggagaagagcaacatcccttgggcacacccactccaggacgcaagcgaagaaggaagggaggagacagtgattatgacgatgatgatgacgatgacagtgatgaccaaggggatgaagatgatgaggatgaagaagataaagaagacaaaaaaggaaaaaagactgatatctgtgaagatgaggatgaaggtgaccaagcagcaagtgttgaagagctggaaaaacagattgaaaaactgagtaaacaacagagtcagtacagaaggaagctctttgatgcgtctcactcattgcgttcagtgatgtttggccaagatcgttacagacgccggtactggattcttccccaatgtggggggatttttgtagaaggcatggagagtggtgaaggactagaagaaattgcaaaag

SEQ ID NO: 11898 - protein, 708 aa, Homo sapiens
MKLNKTTSSVKSPSMSLTGHSTPRNLHIAKAPGSAPAALCSESQSPAFLGTSSSTLTSSPHSGTSKRRRVTDERELRIPLEYGWQRETRIRNFGGRLQGEVAYYAPCGKKLRQYPEVIKGMQWCLLKEEDVIPRIRAMEGRRGRPPNPDRQRAREESRMRRRKGRPPNVGNAEFLDNADAKLLRKLQAQEIARQAAQIKLLRKLQKQEQARVAKEAKKQQAIMAAEEKRKQKEQIKIMKQQEKIKRIQQIRMEKELRAQQILEAKKKKKEEAANAKLLEAEKRIKEKEMRRQQAVLLKHQERERRRQHMMLMKAMEARKKAEEKERLKQEKRDEKRLNKERKLEQRRLELEMAKELKKPNEDMCLADQKPLPELPRIPGLVLSGSTFSDCLMVVQFLRNFGKVLGFDVNIDVPNLSVLQEGLLNIGDSMGEVQDLLVRLLSAAVCDPGLITGYKAKTALGEHLLNVGVNRDNVSEILQIFMEAHCGQTELTESLKTKAFQAHTPAQKASVLAFLINELACSKSVVSEIDKNIDYMSNLRRDKWVVEGKLRKLRIIHAKKTGKRDTSGGIDLGEEQHPLGTPTPGRKRRRKGGDSDYDDDDDDDSDDQGDEDDEDEEDKEDKKGKKTDICEDEDEGDQAASVEELEKQIEKLSKQQSQYRRKLFDASHSLRSVMFGQDRYRRRYWILPQCGGIFVEGMESGEGLEEIAK

SEQ ID NO: 11899 - DNA, 2470 bp, Homo sapiens
  CDS (129)..(1595)
gacgggccgtctcgagagccggcatctcctaggagctagtcctggtcctcggctaggcggcttggggtcgcggcgtaactggggagccagcctgacgccggcggaccccgcctgtgatcctggcaacgatggatgatgacttgatgttggcactgcggcttcaggaggagtggaacttgcaggaggcggagcgcgatcatgcccaggagtccctgtcgctagtggacgcgtcgtgggagttggtggaccccacaccggacttgcaggcactgtttgttcagtttaacgaccaattcttctggggccagctggaggccgtcgaggtgaagtggagcgtgcgaatgaccctgtgtgctgggatatgcagctatgaagggaagggtggaatgtgttccatccgtctcagcgaaccccttttgaagttgaggccaagaaaggatcttgtagagaccctcctgcatgaaatgatacatgcctatttatttgtcactaataacgacaaagaccgagaagggcatggtccagaattttgtaaacatatgcatcgcatcaacagcctgactggagccaatataacggtataccatacttttcacgatgaggtggatgagtatcggcgacactggtggcgctgcaatgggccgtgccagcacaggccaccgtattacggctatgtcaaacgagctactaacagggaaccctctgctcatgactattggtgggctgagcaccagaaaacctgtggaggcacttacataaaaatcaaggaaccagagaattactcaaaaaaaggcaaaggaaaggcaaaactaggaaaggaaccagtattggccgcagagaataaagataaacccaacagaggtgaggcccagctagtaatcccttttagtgggaaaggatatgttctaggagaaacaagcaatttaccttcacctgggaaactgatcacttcacatgccattaataaaacccaagatcttttaaatcaaaaccattcagcaaatgctgtaagacttaattctaaaatcaaggtgaaatttgaacagaatggttcaagtaaaaattctcatctggtctcccctgctgttagtaacagtcaccaaaatgttctaagcaactactttcctagagtatcatttgccaaccaaaaggctttcagaggtgtgaatggatctccaaggataagtgtaacagttggcaacatccctaaaaactcagtctcttctagttctcagagaagggtttcatcttctaagatatccctaagaaattcttcaaaagtaacggaatcagcatctgtgatgccatcccaggatgtgagtgggtctgaagatacattcccaaataaacgacctaggctagaagataagactgtttttgacaatttttttatcaagaaagagcaaataaaaagcagtggtaatgatccaaagtatagtacaaccacagctcagaattccagcagttcatccagtcagagcaaaatggttaattgcccagtttgtcagaatgaagttctggagtctcagattaatgagcacttggactggtgccttgaaggtgacagcatcaaagtcaaaagcgaagaaagtctttgaaaaaggtttcaaagtctcaagtaccacctgtattatctcactaatgtgctatgtcagccagtcaggaagttctggttaatactaagatttgtaggttataatctagttcacataaccaatagaaagtgtcctattttatatatacgcatataagattgtaattttaagatgttttgtgtctcagggtgctacattcactcttgccttaggtatactgtaacccaggttctgcctgtcgtgtataatttttagatacttttgttctttcttgctcttaaggattttaaaaacctgttaatctttttatttgtatactttcctaaaaatattcatatggggaatcctgtcaggtgtttggttatattgactatttattaatagtattagaactcattccctgaactgatgtaaatcttcatagtgtcagacatactgaccaaaaccacaatctagactacaaagtatattgttttagagtactcaaattgtattatttattaattttttgtttgcaaaatcttaacaggaactgtattttctatattttaaagaattttatttgtcccacttttactaaacagtggcagcagattttaagttaaagaatatggaatatagtaaaataagtaaatttcttttggaatatttttagtaacaaatagccactataattctgtaggccaaattttatattgagtttagctgttttctcaaaatttagcagagtggttaaaattctgtgctgataagtaactgatacatataacataaacataacaaagttgcctagttgatgtaacagtggaaagttatctggaaatagtattttgaactttaagccaagtttaaaacattataataaaaggaatacc

SEQ ID NO: 11900 - protein, 489 aa, Homo sapiens
MDDDLMLALRLQEEWNLQEAERDHAQESLSLVDASWELVDPTPDLQALFVQFNDQFFWGQLEAVEVKWSVRMTLCAGICSYEGKGGMCSIRLSEPLLKLRPRKDLVETLLHEMIHAYLFVTNNDKDREGHGPEFCKHMHRINSLTGANITVYHTFHDEVDEYRRHWWRCNGPCQHRPPYYGYVKRATNREPSAHDYWWAEHQKTCGGTYIKIKEPENYSKKGKGKAKLGKEPVLAAENKDKPNRGEAQLVIPFSGKGYVLGETSNLPSPGKLITSHAINKTQDLLNQNHSANAVRLNSKIKVKFEQNGSSKNSHLVSPAVSNSHQNVLSNYFPRVSFANQKAFRGVNGSPRISVTVGNIPKNSVSSSSQRRVSSSKISLRNSSKVTESASVMPSQDVSGSEDTFPNKRPRLEDKTVFDNFFIKKEQIKSSGNDPKYSTTTAQNSSSSSSQSKMVNCPVCQNEVLESQINEHLDWCLEGDSIKVKSEESL

SEQ ID NO: 11901 - DNA, 3554 bp, Homo sapiens
  CDS (139)..(1863)
gtggcccctgagtgctgggtgggaccgcggtgactgaacctagaaggtggagaggaatcgtcctcggtgcccagaggcggctctgcagccccgtgacggcgaccactgctcccgggccgtgcttccccaagtagtccgatggcagcggctgtgccgaggcgcccaactcagcagggcactgtgacctttgaagatgtggctgtgaacttttcccaggaggagtggtgtcttcttagtgaggctcagaggtgcttgtaccgtgatgtgatgctagagaacctggctctcatatcctcgctgggttgttggtgtggatcaaaagatgaggaggcaccttgtaagcagagaatttctgtacaaagagagtctcagagcaggactcctagggcaggtgtttctcctaagaaggctcacccctgtgaaatgtgtggcctcatcttggaggatgtttttcactttgctgaccaccaggaaactcatcacaagcagaagctgaacaggagtggagcatgtggaaaaaacttggatgacactgcataccttcatcagcaccagaagcagcatattggagagaaattctacagaaagagtgtcagagaagcatcgtttgtaaagaaacgtaagctcagggtgtcacaggagccatttgtcttccgcgagtttgggaaggacgttctgcccagttcaggattgtgccaagaagaagctgctgtagagaagacagacagtgaaactatgcatggcccaccctttcaggagggaaaaactaattacagttgtggaaaacgcacaaaagccttcagcaccaaacactcagttattccacaccagaaacttttcactagagatggatgttatgtgtgcagtgattgtggaaaatcctttagcagatatgtcagcttcagtaatcatcagcgagatcacactgcaaaaggaccttatgattgtggagagtgtgggaaatcttatagtcgaaagagcagccttattcaacatcagcgagtccacactggacagacagcttatccctgtgaggagtgcgggaaatcttttagtcagaagggcagccttattagccatcagcttgttcacactggagaagggccttatgagtgtagagaatgtgggaaatcttttggtcaaaagggtaacctcattcaacatcagcaaggtcacactggagagagagcttatcactgtggggaatgtgggaaatcttttcgtcagaagttctgctttattaaccatcagcgtgttcacactggagaaaggccttacaagtgtggagaatgtgggaaatcttttggtcaaaagggcaacctcgttcaccatcagcgaggtcatactggagaaaggccctatgagtgcaaggaatgtgggaaatcatttaggtacagatcccacctcactgaacaccagagacttcacactggggaaagaccttacaattgtagggaatgtgggaaattatttaacaggaagtatcatcttctagttcatgagagagttcacactggagaaaggccatatgcgtgtgaggtatgtgggaaattatttggcaataagcacagcgtgactatacatcagaggattcacactggagaaaggccgtatgaatgcagtgaatgtgggaaatcatttctttccagctctgcgcttcatgttcataaaagagttcattctggacaaaagccttataagtgcagtgaatgtggaaaatccttttctgaatgttccagtctcattaaacacaggagaattcacactggagaaaggccttatgaatgcaccaaatgtggaaaaacatttcagcgaagctctaccctccttcatcatcagagttcacacaggagaaaggccttatgagtacacaccaccacgcccagctaatttttgtgtttttagtggggatggggttttaccatgttggccaggctggtctcaaactcctgacctcaagtgatccacccgccttgactcccaaagtgctgaaattacaggcatgagcctctgcacctggccttcattcttttcgtattgcttagaatatgacatgctgaaccaggcatggtggctcatgcttgtaaacctgatgctttgggaggacaaggtggttcattggaggccaggagttggagatcagcctgggcaacatggccagacctcctctctacaaaaagaaaaaagaatgacatgcttcttgtttttgtctgttataaatgaaactgctatatttgaatgcagttgttcatgtaggtatgtttcactatggtaatatggtggtgtgcagtgcctgagtcacgtgatagattaaagtacaactcttttttgagacagagtctcactctgtcacccaggcgggagttaggtggcatgatttcggctcactgcaacctctgcctcccaagttcaactgattcttctgcctcagcctcccgagtagcagggattaccggtgtgcaccaccatgcctggataacttttttttttatttctattagcaatggggtttcaccatgctggccaggcttgttatgaactgacctcaagtgatctgcctgcctcagcttctcaggtgtgacctactgtgcttggcctaatgtacaactttttaagcaatgccaaactatgacttaagaatgaaattattgctcatttgtatatctatctaccatcagtgtccaagaatttctgttctatcttaccaagagggagtatggttagtatttgaaattgtttattattttaataagtggttataacttttgagtcagtggtttatgttttgcattttttttgttttgagacagagtctcgctctgtctcccaggctagagtaccgtggcacaatctcggctcattgcaacctctgcttcctgggctcaagcactctgcccacctcagcctccagagtagctggaaatacagtgccacccagatagcctcacaaaactttgacccagccactgttagtgtcgccaccgcccataaaggagctgagcccagcaggggcactgcctggggccctgtagccaaaaggctacagcaggagctgatgaccctcatgatgcctggtgacaaaagaatttctgcctaccctgaaagccttatcaaatggacaccatccatgaagcagctggcacagtgtatgaagatctgaggtataagctcttgctggagttcctcaatgactacccacctttacgatgcacccacagtgaagttcctcacaccctgctaccaccctaacgtggacacccagggtaacatatgcctggacatcctgaaggagaagtggtctgccccgtatgatatcaggaccatcctgctctctatccagtgcctgctaggacaactcaacattgatagccctttgaacacacatgctaccaagctctgggaaaaccccatagctttaagaagtacctgcaagggtcaggcgcagtggctcacacctgtaatcccagcactttgggaggccgaggtgggtggatggatcacctgacgtagagagtccaaggcctgacaaacatggagaaatgtcatccctattt

SEQ ID NO: 11902 - protein, 575 aa, Homo sapiens
MAAAVPRRPTQQGTVTFEDVAVNFSQEEWCLLSEAQRCLYRDVMLENLALISSLGCWCGSKDEEAPCKQRISVQRESQSRTPRAGVSPKKAHPCEMCGLILEDVFHFADHQETHHKQKLNRSGACGKNLDDTAYLHQHQKQHIGEKFYRKSVREASFVKKRKLRVSQEPFVFREFGKDVLPSSGLCQEEAAVEKTDSETMHGPPFQEGKTNYSCGKRTKAFSTKHSVIPHQKLFTRDGCYVCSDCGKSFSRYVSFSNHQRDHTAKGPYDCGECGKSYSRKSSLIQHQRVHTGQTAYPCEECGKSFSQKGSLISHQLVHTGEGPYECRECGKSFGQKGNLIQHQQGHTGERAYHCGECGKSFRQKFCFINHQRVHTGERPYKCGECGKSFGQKGNLVHHQRGHTGERPYECKECGKSFRYRSHLTEHQRLHTGERPYNCRECGKLFNRKYHLLVHERVHTGERPYACEVCGKLFGNKHSVTIHQRIHTGERPYECSECGKSFLSSSALHVHKRVHSGQKPYKCSECGKSFSECSSLIKHRRIHTGERPYECTKCGKTFQRSSTLLHHQSSHRRKAL

SEQ ID NO: 11903 - DNA, 2263 bp, Homo sapiens
  CDS (774)..(1079)
ttgaagcaatgtgggttaaagttagaccctggggaaaccttgcaggggtctgtaggcctgtgaagaactggactaggtgagaagaagaagcttttgacccatgtcactccctggcccagaactatatcctacccacaggtgggttgagttcaggactgctgcttccagcccccagcagcaaggttcaagtgagagctgactcacctagggccccttgttagagcctcagagccaggtgaaaagccacacacaggctgggcgcgatggctcacgcctgtaatcccagcactttgggaggccgaggcaggtggatcacctgaggtcaggagttcaagaccatcctggccaacatggcaaaatcccgtctctactaaaaatacaaaaattagtcctgcctggtggcacatgcctgtagtcccagctactcgggaggctgaggcaggagaatcgcttgaacccgggaggcggaggctgcagtgagccgagatcatgccactgcactccagcctgggtgacagagcgggactctgtctccaaaaaaagaaaagccacacaggtgtgtgtgtaggggcaagggagtttcctactgtcttcctagcagaaaatggggagaaactgttaaagccagaatgagggagggctgtgtgtggcctgggactggcaacagaagtgtcaagctgccaggtttcaggccagtacagagcacggttctacctgggttatgtgttgccggcactaatggttagagacatctgtcactggtgagggcagaaatgtatgcaggagtgggtgtgggaagctggcctcactggtgggtggggttggagactttgccaggcctggtcaggaaaagctgctacaaaacagcaaaactgctcctagtgcagcgatccccaacctttttggcaacagggagtattttcctggaagaccatttttccatggagagggagggcggggctggtttcgggatggaagtgttccatctcccatcatcaggcattagtcaaactctcctaaggagcacacaaaacctacactcctggcgtgcacagttcacaggagggcttctgcttctgtgagaaccaaatgtcccactgatgtgacaggatcagagcgccatcgctgctcacttcctgcatgcggccctgttcctgacaggccacggaccagtacctggggtttggggtcccccgccctaggggatgaaagaagggaaacctgggtctaatgggttactgtgattctccctgcgatgcagggaagagacaggacagaggtgggaaagaacatggtcaccaggagtcgggacagcactcttccaggtccttcccctggggctgagtaagcaccctgcgcgtagctcttcctggccgcctgtgggctctgggatctaaacggactatgcagccattctcactttcattcacagctcggacagggacagtgtgtgttgaggcggaaagacaaaacatgtatgtgagagactttgtatgagccggttcctgatgaagtcctatctttcagcctcgtatttactgcccaggcagatggggctcttttcttcaccctcccgctttttttttttgagacagaaaacttaatagaaattttgtttgcagttcttacattctcagtgtgagccaatctgtgacccaccgccccacccagaagtggcccagtcctggtgcagggtaggaagggaagggtggagtgagaagagccccatttttcctcagtgccagggggctggagacaccacccccttctcctgcctctgggctccaggaaggagtgcagatggactctcaggcctatggttcctcctccacaccactgtcccccaggttggaggggagtgagagatacagggagagaaggggacagaggcaagaaaaggtgttgatcaagaaaggcaagaaccaggggtgagggctgacagagaatcaaagataaaacactagtaggccgggcgcggtggctcatgcctgtaatcccagcactttcgggagccaaggcgggcagatcacctgaggtcgggaattcgagaccagcctgaccaacatggagaaaccctgtctctactacaaatataaaattagccgggtgtggtggcacatgcctgtaatcccagctgctcaggaggctgaggcaggagaatcgcttgaacctgggaggcagagattgcagtgagccaagatcatgccactgcactccagcctgggcaacaagagcgaaactctgttggaaaaaaacaaacagt

SEQ ID NO: 11904 - protein, 102 aa, Homo sapiens
MYAGVGVGSWPHWWVGLETLPGLVRKSCYKTAKLLLVQRSPTFLATGSIFLEDHFSMEREGGAGFGMEVFHLPSSGISQTLLRSTQNLHSWRAQFTGGLLLL

SEQ ID NO: 11905 - DNA, 2604 bp, Homo sapiens
  CDS (292)..(1140)
ttgaattcagatgtgcctcagcaacgcccaagtgtagttgtctcaccacattctacaacctctgttatacagggacatcaaatcatagcagttcccgactcaggatcaaaagtatcccattctcctgccccatcatctgacgttcggtctacaaatggcacagcagaatgcaaaactgtaaagaggccagcagaggatactgatagggaaacagtcgcaggaattccgaataaagtaggagttagaattgttacaatcagtgaccccaacaatgctggctgcagcgcaacaatggttgctgtgccagcaggagcagatccaagcactgtagctaaagtagcaatagaaagtgctgttcagcaaaagcaacagcatccaccaacatatgtacagaatgtggtcccgcagaacactcctatgccaccttcaccagctgtacaagtgcagggccagcctaacagttctcagccttctccattcagtggatccagtcagcctggagatccaatgagaaaacctggacagaacttcatgtgtctgtggcagtcttgtaaaaagtggtttcagacaccctcacaggttttctaccatgcagcaactgaacatggaggaaaagatgtatatccagggcagtgtctttgggaaggttgtgagccttttcagcgacagcggttttcttttattacccacttgcaggataagcactgttcaaaggatgccctacttgcaggattaaaacaagatgaaccaggacaagcaggaagtcagaagtcttctaccaagcagccaactgtagggggcacaagctcaactcctagagcacaaaaggccattgtgaatcatcccagtgctgcacttatggctctgaggagaggatcaagaaaccttgtctttcgagattttacagatgaaaaagagggaccaataactaaacacatccgactaacagctgccttaatattaaaaaatattggtaaatattcagaatgtggtcgcagattgttaaagagacatgaaaataacttatcagtgctagccattagtaacatggaagcttcctccacccttgccaaatgcctttatgaacttaattttacagttcagagtaaggaacaagaaaaagactcagaaatgctgcagtgaaaaataattccacttacacagtgggggactcaaagtcagccacatttcacatactgttactgaagaaagcaccaagtcttaatggaacaaagaccatagaatgaattattttatctcctcccatgatgctgagaggaagcttcgtattctgatctctgagtgaatccctttgttctctgtttaaaaaaatctaaaaagaaaaaggaaaaaaaaaaagaactgctgtgggattgtcaaccagcttatctgcaggatgtttcagatctgataaatcctgatggaaactggtatgatcagaattcagtaccatccacattggaatatacatggaatattgtaaaacctacatgagcagatgaaatagaagcattaaatatttttatctatatccaaaaaggagcacatttttatatttacaaaaccgtttaagctggtttgaataatttaaaaaagtttcagcacacctatacccccgatctcagagggggccaccaatatctagctatggatcgtgtgttttgtttagaaatcagtagcttggttttcttacttgagccaatatattttcacttatttattatcataaaaatttaccagtctgaatagatcttgtaaatatttgtgaatagaatgaatacctttcatgccactgcagccactggaaatacattctgtggtgtcctagaagcattattggtaggttctaaagttttctagactttcctgtcaattgtaagtaattgtgatatattctatgcagtggatgaatgttctttaaatttgtgtaaatacttctgcaaaggtactgatgctgtaaagtcaaaacagttttgtggaactgtgatttttttttcttttttctttttttttttctttttttttttgtattatacaccttgtagaactcattttgctggctgaaagagtatggaataatatatctcatgtcattttttagaagaaaaactatttgaaggtattttttggttttccttaacatgtatccactgtaaacgtttgtcgtgtacaagctcagagcttggacagaattttttgtatttgtaaattggtttaaatacatggaattttatacaggttttctcctgtgttatatatgcattatgtgcaggtatgatattttcttcactactttttctatcttaatatagtgtggaattttattgtattattcttccattcttaatactgtaccacattcctgctcagaaactgctcacttccttaaattgtcttttttcccccagcgtgaaatgtatccatttataactgcctattgcctgttctattagcatccaaaaatgtggaaggcctcccaaccaccatttctgctgtgtccttaggatgtgcagtaaaaaatatagacctaacagtttatgttatagaatggctttatttactttggtgactgtttatagtttttaaataaaagactgaacattt

SEQ ID NO: 11906 - protein, 283 aa, Homo sapiens
MVAVPAGADPSTVAKVAIESAVQQKQQHPPTYVQNVVPQNTPMPPSPAVQVQGQPNSSQPSPFSGSSQPGDPMRKPGQNFMCLWQSCKKWFQTPSQVFYHAATEHGGKDVYPGQCLWEGCEPFQRQRFSFITHLQDKHCSKDALLAGLKQDEPGQAGSQKSSTKQPTVGGTSSTPRAQKAIVNHPSAALMALRRGSRNLVFRDFTDEKEGPITKHIRLTAALILKNIGKYSECGRRLLKRHENNLSVLAISNMEASSTLAKCLYELNFTVQSKEQEKDSEMLQ

SEQ ID NO: 11907 - DNA, 3434 bp, Homo sapiens
  CDS (184)..(1869)
agtccccacagctgcgccggtgactgaggggccgggcagtggagaagtggtggcggcgggcggcgggcggcaaaggagcagccatgagggccgggcccagtcaccgaccgtgctgaggagtcatggaagagtttttaaaccagtgtgagccactgccccatgttgtgttgatgccaatctgccatgctagcctgtctaccagggccaggtgacctgtcctttcagcctctttctcacacgcagatgaacactggacttcagaaatgggacactacacagaaaatgagaactgctcactatcctaccccagccgaattggatgcgtatgctaagaaggtcgcaaacaacccactgactataaaaatcttccccaacagtgtgaaggttccccagcggaaacacgttcgtcgtactgtgaacggcctcgacacatcagcccagcgctacagcccctacccgacacaggctgccaccaaggcaggcctgcttgccattgtcaaagtgccagccaaaagcatactcaaggactttgacggcacccgagcccggttgctccctgaggccatcatgaaccccccagtggcaccctatgctactgtggcacccagcactttagcccacccccaggcccaggctctggcccgccagcaggccctgcagcatgcacagaccctggcccatgcccctccccagacgctgcagcaccctcagggtatcccgccaccccaggcactgtcccaccctcagagcctccagcagcctcagggcctgggccaccctcagcccatggcccaaacccagggcttggtccaccctcaggccctggctcaccagggtctccagcacccccacaatcccttgctgcatggaggccggaagatgccagactcagatgcccccccgaatgtgaccgtgtctacctcaactatccccctttcaatggcggccactctgcagcacagccggcctccggacctgagtagcatcgtgcaccagatcaaccagttttgccagacgagggcaggcatcagcactacctcagtgtgtgagggccagatcgccaaccccagccccattagtcgcagtctgctcatcaatgcaagcacccgggtgtcgacccacagcgtccccacaccaatgccttcatgtgtggtcaatcccatggagcacacccacgcggccaccgccgcgttgcctgctgcaggtcctgtcaacctgcccacaggcatctctcgcgtccccactggctaccctagcgacctcaagccagtcacctggaaccagcaccagctggcccacctacagcagatgtgcagcgaggctagtgggacgccagcccctggcctgacaggcaagcatgcggcaggacgcgagttggcagggcctggctttgtgggcaaggcccctgcctacccgcaggaactctgcctggcgcagtccttccatctgaagccacccctggaaaagccgaccccatccccaccagtcaacggcatggcagccccattggcctaccccaatggtcactacttccaacccctgtggaacaacattctgcccactcccaatagcgacagctcggggtctcaggaccttgccatgccgttccacggtgggcagcccacaggtgcacccctcgactgtgcggcagctcccggggcccactaccgagcagggaccgggggcggtccagtggcaagccagaacagcttgatgcaaacagtggattacctaagtggggatttccaacaggcctgcttccgagaacagagcctggccatgctgagcaaggcccaccgagcccctggcaaccgagcccccgatcccacagagagtcgaagtcttcatattctgcacccagggtatagataggtagccctgctgccctccacgtgcaacacatcatacatcaccctcctaggtttagtcttttaagtaactggatagtttcaaagtttcactgctccagtgtgatcattcttagatgtctaagaaagggaatttggtgggatctaagtggggacagaaggggtcctctcgtcctcccctccagcaacttttggttttatgttagaacctaaccctaagcccaggcttttctctccactgactgcctgtcagctagtctctccaccttggccatttccagccagctcccacccatcttttcttgaatctcttcctgtttcccttaggacgactgaggtgtgggctgacggaatgccctagttgaggtagtataggtgctcaggcccctaatccagacctctacctgttgctaccccccttcccctccctccaggactaagaagcaagatttcccaggtgctctgaaagctaattacttactcatcggaggatctcaaatcaaagctgacccagtcttcatatccttcaagttcctttccattcctcaaggctttgttttgtgtctatattgatcccacagccactgcacttgcccttgccacacttgatctcaagggcatcttggaagtatttgaccatttcttgagatatggggggaaaaagtctttgtattggcatcttggttccagactcccctttccaaacctagaaaaatacagtgacctttgagcatacccaagatccctttctcactgttgcctgtcccctaactcacctccccacagcccctatcctttccccctcaacaaaaacaaaatctaccttacttgaggaattaggtaggtaaggaatgatcacattggagtttgggattaaaaacaccaaaaaaaaaaaaatgcatttggttctctctacactggctaagaatattgctctacactgtaagttttaaacgttacgtttctgtatgaatgtagtgtgggtttgagtagcattgtgtgtgagtggccccacaggtagattcaccctctagtgcagcccctcagtttaatgaaggaaaaaaaaaacaaacacaaagccttaagctctttgagtacttcctttaccaaatgagcatggttctaacacctggagctgggcctacattggaaacaagcccctcctgccctctgtccattcttagagcataccttcatccactccatgctcagcacgtctcatcccaagcgacaattagttggctagaaacacttttctgtaattttaaacttagactgttttgttacaaatttttgcaccattctgttaaagatgcagaattgggcttttttattttttacagatgaaataagcccttacctttcctcttgtctctggggaatgtcagctgatggttcttatttaaggttttgcattttgttcactatccactactgttcgttagccagaaattctctagtgatctgaagcaatgtgactgaagaccagttttaagttatgtgttggcaagttgccttatatttaaaaggaaaaagaaaaaaaaaaaagcctgattgtgttatgcc

SEQ ID NO: 11908 - protein, 562 aa, Homo sapiens
MLACLPGPGDLSFQPLSHTQMNTGLQKWDTTQKMRTAHYPTPAELDAYAKKVANNPLTIKIFPNSVKVPQRKHVRRTVNGLDTSAQRYSPYPTQAATKAGLLAIVKVPAKSILKDFDGTRARLLPEAIMNPPVAPYATVAPSTLAHPQAQALARQQALQHAQTLAHAPPQTLQHPQGIPPPQALSHPQSLQQPQGLGHPQPMAQTQGLVHPQALAHQGLQHPHNPLLHGGRKMPDSDAPPNVTVSTSTIPLSMAATLQHSRPPDLSSIVHQINQFCQTRAGISTTSVCEGQIANPSPISRSLLINASTRVSTHSVPTPMPSCVVNPMEHTHAATAALPAAGPVNLPTGISRVPTGYPSDLKPVTWNQHQLAHLQQMCSEASGTPAPGLTGKHAAGRELAGPGFVGKAPAYPQELCLAQSFHLKPPLEKPTPSPPVNGMAAPLAYPNGHYFQPLWNNILPTPNSDSSGSQDLAMPFHGGQPTGAPLDCAAAPGAHYRAGTGGGPVASQNSLMQTVDYLSGDFQQACFREQSLAMLSKAHRAPGNRAPDPTESRSLHILHPGYR

SEQ ID NO: 11909 - DNA, 2298 bp, Homo sapiens
  CDS (80)..(922)
aatagaagatcgctcgggaattcttactctcgataaagattataacaacataggaaaattcttaaatagaattttaggcatggaggtgcatcagcagaatgcgttatttcagtattttgcggacacacttactgcagttgttcaaaatgccaaaaaaaatggaagatatgatatgggaatcttagatcttggttctggagatgaaaaagtgcggaaaagtgatgttaaaaagtttctgactccaggatattcaacctctggccacgtagaattatacacaattagtgtagagaggggaatgtcatgggaggaagctaccaagatttgggctgagctgacaggaccagacgatggcttttacttgtcattgcaaataaggaacaacaagaaaactgccatcttagttaaagaagtgaatcctaaaaagaaacttttcttagtttatcgaccaaatactgggaagcagctcaaattagaaatttatgctgatctaaaaaagaaatataagaaggtcgtctcagatgatgccctgatgcactggttagatcagtataattcatctgcagatacttgtactcatgcttattggcgcggcaattgcaaaaaagcaagcttggggctagtttgtgaaataggtcttcgttgccgtacatattatgtattatgtggttcagtgctgagtgtctggacaaaagttgagggtgttctagcatctgtcagtggcacaaacgtgaagatgcagatcgtgcggctaagaacggaagatgggcaacggattgtaggtttgatcattccggcaaattgtgtgtctcctcttgtaaatctcctatcaacttcagaccagtctcaacagcttgcggtccaacagaaacagctatggcaacagcatcaccctcagagcatcaccaacttgagcaacgcatgaagaacagacaggtttcaacatggatggatctgaaatgctgttgaagcatatcatttgcataaaaatcagggacagtttccaaagaattatatatttttttcagttgtgctctctagttagtttttttgggagtaaggacaaacctggaatagatagcaaaactgaaaatcagcagtgctgatggtggtacatatgtctttcctttagcttctcccctgataattcccatctgcttttacttcgggtgagcagagggggatgtgtgtgtgcgtgtgtgtcagtctgtttgtgagtgtgttaaaggctacagaccacagttggtttaaaatgcttggaacttcccaaactggctttactttatgtttatacagtgctcagggttaacgcagtacatccatgccattgctgtgggaggtatccccggatgcatgtgttttgagtctataaatatagaaaatatatattggtttctttttccaacttaataggtttattaaagcatgaaatgaaaggttgcatatcatgcattcaggttattttctaatttttgttctgacagtgcatgtctttggaagcatgctgaaacaagattaacacaggagtcgagtaacagagagaaacatttgttagatgtacagcattggttattgcatttttatagtgtttatacctgggtattgcttcaaaccctgcagacccctccttccccttctccctgccctgggtttctggtcaaggtaatgaatacatacatttttctgtgataaaactcttaaaagttaattttaatgtattaatagtattcctaatgtgtgctgcagaaatggctatgagcctcttaaatttacatttgcaacttaaaggtagttttagaaggaagtacaaattggctttcatcttgcaaacaatcgttttttacttcattatcttaatttgctttgtcactcataaaaaggaaaccatacctgagttgtagacaatgaggaaacacttgaggcttctgctgtgtgttcttttgttattgttgttattgttgttactcagtaacttgaatattgtttaatgtgttgtaagacgtagagtttatctcaagctgttaaaaatggtaatgtacaaatgtgaatagacacttatctatataatatgggtaagttttgtttcgcctataatagatgtttataaaaacaagtgaggggacagttggtctttttatcttttctttctttttctttcttttctttttttcttttttttctttttttttttttttgcttccacaggttgcactattgaaaaatcgagattgtataaacctggtaaaaagctgcaagatgccaaaatcttgtagatgtcaaataaaaagttattatact

SEQ ID NO: 11910 - protein, 281 aa, Homo sapiens
MEVHQQNALFQYFADTLTAVVQNAKKNGRYDMGILDLGSGDEKVRKSDVKKFLTPGYSTSGHVELYTISVERGMSWEEATKIWAELTGPDDGFYLSLQIRNNKKTAILVKEVNPKKKLFLVYRPNTGKQLKLEIYADLKKKYKKVVSDDALMHWLDQYNSSADTCTHAYWRGNCKKASLGLVCEIGLRCRTYYVLCGSVLSVWTKVEGVLASVSGTNVKMQIVRLRTEDGQRIVGLIIPANCVSPLVNLLSTSDQSQQLAVQQKQLWQQHHPQSITNLSNA

SEQ ID NO: 11911 - DNA, 2944 bp, Homo sapiens
  CDS (175)..(732)
atatgatccgctcggcttcctgggtctggctgctgccgcccgccggtgtccgcccgtgtcgcgccggggcaccaaggagccgttggagggtccgggcggaggcccgctcgtgtggaagtcgtcgacgccgccgctcgtccgtcctcccgtccgttctcgctcccggccgccatcatgctggcgctcatctcccgcctgctggactggttccgttcgctcttctggaaggaagagatggagctgacgctcgtggggctgcagtactcgggcaagaccaccttcgtcaatgtcatcgcgtcaggtcaattcagtgaagatatgatacccacagtgggcttcaacatgaggaaggtaactaaaggtaacgtcacaataaagatctgggacataggaggacaaccccgatttcgaagcatgtgggagcggtattgcagaggagtcaatgctattgtttacatgatagatgctgcagatcgtgaaaagatagaagcttcccgaaatgagctacataatcttctagataaaccacagttacaaggaattccagtgctagtgcttggaaacaagagagatcttcctaatgccttggatgagaaacagctaattgaaaaaatgaatctgtctgctattcaggatagagaaatttgctgctattcaatttcttgcaaagaaaaggataatatagatatcacacttcagtggcttattcagcattcaaaatctagaagaagctgaagcatctcttgaagtcttccagtccttcttggctataatcctagaattattgtccgttcctctgaagtaattcccagaatacggtccttcctaaaccccagaaattgcctttttcagagtctatttctcatgtgcactgctgaagatgaatatccctaatccttcataaagaatcagctagagttgtcatgataaagtcagcacacacaaaaaggcttcttacacataccaaaaaaaatgtcttaaaccatgtgtagagctttaaaaacagaaaaaaaaccccatatacttatgaccatcttaaatcaagaaaattgcatatttccattctggtctttctgggccagatttttatattggttttcagtaaatgtctatctataatatttcattatagagtccagtagcttaatactgacactgacttgatacagcacgaagtttctagtgccacacacagtatttagaaaacctttaggcgtgaatgactcatgtgggatatatgtaaacataatgtttattttatctcacaaatgcatgtgaaatgtataattacatcttaggaatccaaaatggtctgcagagagtgagcggaggcaccagatcaatgttggttctttgcactggtgagattctgcctgatgaatattaaagatatcctgctttctgagaactctatcaccagatggcagttgggatatgggaggaactaaagcatcctgttttgtatctgtccagatcattatttctgtctcttgttttttcttcctggttcaggatacttttttaaggggttgagaattgaagattttccaaaagcgttcatgaatttagagcattccacccaatataataaaacctgttaagaatgtcagtctttgttcaaacatctgtttgttctatctccagtcattaaatcagtgctgctgcatgacactcttaactcctgactttttatatccagtcataaagttgactttcagcacaaaagatacttataaacaaataaaaaatttttatttttctctcttactgatgtaagctttggcactcttttgactggtgccattagacatcttgattattgtgacaactctagacctgcctgctttatctaatgtaatcatgctcaatgtctacaggttgtttaataatcagtcacacagagaactgaggaactgatgctgtttgtttgcttctatgatacagagatgtctaaaaacttcaaatggacatgttttgtagtttagcgacttccgtatacataaagggacatattaatactggttcatttgtaaattattattcatatagaccactgtagtagataaaactctatggtacacctgcttatgtgttgcctcacactgtgtgtgattttgtttcttttgttaagcagcacttatgtagactgcatttccaaatgtgttgagcactcggagtgtagtcaacagtaagttcttttaatgaatatcagttttaatttatagactgccatggccttaaaaatattctgtacaatatactgcactgtgttgcacagacactacttgcttttctccattcatatttttatgagtagaatctgggcttttaaatttctcttcttattctttgaagcatgttgcatactaccctggtgggatggatggttctgtaaatgaagggatatttaaacttgctactgttgttcaacaccattaatggtcagtgtgaaccattacaaagaatgtggcaacttgcttgtgcctaaaaggaggaattggaactagaatgtgtgactctgtggggactgcataggtttgttaattgacctatagctaaaccttaatgtgtttgtgtgtctatacattgctttccgcatttcaagacatccagacgctattaccaacattttcctgtgcattaacctctgcatgtgaaaacttttaacagttactgaactatgtaaatatgtgaatttttttatttaggtggatgcattttttgtctgtttactgctcttctcagctttattcaataaacttgcattttaagggttgtattggcaattttaacttaaaatgtgcatcatgatggaaggtgcagacttttttggaagtttccgagaggagggtctatagaccatttgtcagaaatcagatcagccctcaaagaatggggtctgtgggctagttaaaatagaaataaacttttaaaatatccacag

SEQ ID NO: 11912 - protein, 186 aa, Homo sapiens
MLALISRLLDWFRSLFWKEEMELTLVGLQYSGKTTFVNVIASGQFSEDMIPTVGFNMRKVTKGNVTIKIWDIGGQPRFRSMWERYCRGVNAIVYMIDAADREKIEASRNELHNLLDKPQLQGIPVLVLGNKRDLPNALDEKQLIEKMNLSAIQDREICCYSISCKEKDNIDITLQWLIQHSKSRRS

SEQ ID NO: 11913 - DNA, 3192 bp, Homo sapiens
  CDS (321)..(2867)
ggcctactggggacagtgtttctcgatcagaaattgccttgggttgcaaagacctcaatcatgtcagcttatcttctttgataccagaactagatgtcacctccgaatatattaattcagacactcttgtcagagagataaacaagcatacatctccagaagaatataatctaaatttatttctgcaagaaaaaaaacacataaacctgactaaactcggcttaaatgtacaaaaacatcctggaaatgagaaagaagattcactacaatatttggccaataagaaatatacacaaggccggggaagccacagccaagaaatgaggtacaatcgacaaaacagatggaaacggcagaactttcatgagtttcctcctttgtttgctttcccgagtctcagccaaacggatctggaagaacttacttattttttcccagaggaccatgctgaggatgtacagcaagagtttttcccctcttggcccactccctctggcctcaccgagtatagcaccttgaccctctgtcaggagactctagccaactccagcataggaaggctgtgtcttgcttttcttggcaagagattagacagtgttatagagatgtgtgtgaaggatgttctgttaaaagatgatcttagttgggcagaagcaggtgtggcccttttagaaaatgaatgtgaaaagaggattgtggaggaggggaaatataacacagaagagtatggcacatcaattgaagacattctctcagtattaaaatgccccaatttatgcagcggcaatgggcagtgcatggaatgggggtgtgcgtgttccccaagctttagttcctatgactgcagtgattcctatgacaaagctcctgaaattacagagcttgggaatgctggattctgtgatgttcaaaaatataattgtatgatggtgagagtttttggcaaaggcttcaaagaattaccttcaattaaatgtgaagttactaagctacagtataatagcagtgaatggatgcctggagaacccatctatacacagactgttttccacaatagcagagctgttgattgtcagctgcccactgatgttcagcagtttgataccatggatctggtgggtgggaaaccaactgggaagtggcagttgaaggtatctaatgatggttataaattcagtaatcccaaaataacggtcatatatgatggtgcttgccaagtttgtggtctctataaaaatgactcatgtactataaaggaaaatgtttgcattattgatggactctgctatgttgaaggagacaaaaatccaaccagcccttgtttgatttgtagacccaaaatttcaagatttacttggtcatttttagaaaacaaccagcccccagtgattcaagcattgcaagacaaattactgacattttatggtgaaaactttgagtatcagttcgtggccttcgatccagaaggttctgacatccattttacgttggactctggtcctgaaggggcaagtgtttcctctgcagggctttttatgtggaaaacagatttactaactacccaacaaattactgtacgccttaatgatgactgcgatgctgaaactagagtcacgattgaggtgactgtgaagtcttgtgattgcttgaatggtggatcatgtgtatctgataggaacttttctccagggagtggagtgtacctgtgtgtctgcttgcctggcttccatggcagcctttgtgaagtggacattagtgggtgccagtccaacccttgtggtcttggcagctatattagtggttttcacagttattcctgtgattgtccacctgagctcaaagttgaaacacagtttgtaaataaatttactacacaaactgtggttctcacaagatctgataaaagtgtaaataaagaagaggatgataaaaatgcccaagggagaaagaggcatgttaagccaacaagtggaaatgccttcaccatttgtaaatatccatgtggaaaaagtagggagtgtgttgccccaaacatctgcaaatgtaaacctggttacattggttctaactgccaaactgctctttgtgaccctgattgcaaaaaccatggaaaatgtattaagcctaacatttgtcagtgtcttccaggacatggtggagcaacctgtgatgaagaacattgtaacccaccttgtcaacatggtggcatatgcttggctgggaatctctgcacttgtccttatggttttgtaggaccaaggtgtgaaacaatggtttgtaacaggcactgtgaaaatggaggccagtgtcttacaccagatatttgccagtgcaaacctggctggtatggacccacctgtagtacagctttgtgcgaccctgtctgcctcaatggtggttcgtgtaataagccaaatacttgcctctgtccaaatggattctttggggaacactgtcagaatgctttctgtcaccctccctgtaagaatggtggccactgcatgagaaataatgtgtgcgtctgtcgtgaaggatacactggtaggagatgccaaaaaagcatctgtgatcctacgtgcatgaatggaggaaaatgtgtgggaccaagcacttgctcttgtccttctggttggagtgggaaacgatgcaacacacctatctgcttgcagaaatgtaaaaacggtggtgaatgcattgcgcccagcatatgccattgtccttcctcctgggaaggagtgcggtgtcaaataccaatttgcaacccaaaatgtctttatggaggcagatgcatatttcccaatgtgtgttcctgccgcactgaatactctggagtcaaatgtgagaagaaaatacagataagacgccattgagtagcatcaagtatgtgaattacaagcctgtatcttaagaatggaaatattttgttcagaaaaagttggagataacttggagtttatttgaacatcatccaaaaataccttaaagactgaagaaactaataaaatacataatgatctctgctgtaatcatagagaaaagcaaagaagaaatccaggtaatctaaatttgatgttgagatgggataggatatttacatattgagatgatgtatctgatattccacccattcacaatatttaataaactgaatattttctcagccctaaaaaaaaaaaaaaaaaggccacatgt

SEQ ID NO: 11914 - protein, 849 aa, Homo sapiens
MRYNRQNRWKRQNFHEFPPLFAFPSLSQTDLEELTYFFPEDHAEDVQQEFFPSWPTPSGLTEYSTLTLCQETLANSSIGRLCLAFLGKRLDSVIEMCVKDVLLKDDLSWAEAGVALLENECEKRIVEEGKYNTEEYGTSIEDILSVLKCPNLCSGNGQCMEWGCACSPSFSSYDCSDSYDKAPEITELGNAGFCDVQKYNCMMVRVFGKGFKELPSIKCEVTKLQYNSSEWMPGEPIYTQTVFHNSRAVDCQLPTDVQQFDTMDLVGGKPTGKWQLKVSNDGYKFSNPKITVIYDGACQVCGLYKNDSCTIKENVCIIDGLCYVEGDKNPTSPCLICRPKISRFTWSFLENNQPPVIQALQDKLLTFYGENFEYQFVAFDPEGSDIHFTLDSGPEGASVSSAGLFMWKTDLLTTQQITVRLNDDCDAETRVTIEVTVKSCDCLNGGSCVSDRNFSPGSGVYLCVCLPGFHGSLCEVDISGCQSNPCGLGSYISGFHSYSCDCPPELKVETQFVNKFTTQTVVLTRSDKSVNKEEDDKNAQGRKRHVKPTSGNAFTICKYPCGKSRECVAPNICKCKPGYIGSNCQTALCDPDCKNHGKCIKPNICQCLPGHGGATCDEEHCNPPCQHGGICLAGNLCTCPYGFVGPRCETMVCNRHCENGGQCLTPDICQCKPGWYGPTCSTALCDPVCLNGGSCNKPNTCLCPNGFFGEHCQNAFCHPPCKNGGHCMRNNVCVCREGYTGRRCQKSICDPTCMNGGKCVGPSTCSCPSGWSGKRCNTPICLQKCKNGGECIAPSICHCPSSWEGVRCQIPICNPKCLYGGRCIFPNVCSCRTEYSGVKCEKKIQIRRH

SEQ ID NO: 11915 - DNA, 2625 bp, Homo sapiens
aatgcctcatgccccagttcagcaaaaggaggaaaatgtgcctgcctcacagtcatcagtctttttaaatcttttttgttgttgttcttaagggtttgaatttgtctgcattccttgtctttaggggaaattcccttttcatattgtgtgcttcccaaagctatagtcatagatttcttccagaaactattgtcataattgtcactggagtgcttaaatatacgtactatactgacaaaatacatggaagtgagttataatgaggcagaaacaaaatcctcggtaacattgatgatactctaccgatcaccgtggttttggaaagtcagtcaacagttgtattattgcactcaatttcattgtgacattttatttaacttcttcatcttggtggtccttgcccagttattttgcctcattagacatcaagaaatggagaaagactgaaagttaatatcttaagtgcttgttcttcatgtttccttcttgttatttatgctattctctttgtggctccattcttctttcaatcttctcagcttataaccgtctttcccttatgctaaggatagcccttacactcatcccatctatgctgtcaagggctgctggttggtgctggtacaaggagcccactcagcagttttcttacctttgcctgccctgcctttcatggaataagaaaggcaacgttttgcagcttccaaatttctgaagaaactaatctcagattggcagttaaagtcaaaatgttgccaaatatttattccttttgcctaagtttggctacccggttcaattgctttttatttttaatgtcttgactcttcagagttcgtacctcaaaagaacaatgagaacatttgctttgctttctgctgaatccctaatctcaacaatctatacctggactgtccagttctcctcctgtgctatcttctcttctatccaagtagaatgtatgccaggagctccttccctctagcaatttctactaaaatgtccaagtagaatgtttccttttacaatcaaattactgtatttattaatttgctagaatccagtaaatcattttggtagctctggctgtgctatcaataaaaagatgaaagcaacaagttgattttttttaggtctactattgattgaacattctccaatgggcaaggctcattgtcaaagcagggtgaacatgatcagattttcttctgcatcatcacacaagctgcgagtgttgctgcaaagcacttctcagtactccttccctaacctcagtatgttaatagccattaatacttggcttaagcatcaccattctggccacagtctgagagattagtgatcaaagctcccttccctatcactaccaccacctactgataacaaagatttctgaatacttagtagtagtaaaatatttttcaagcacagagttacagctaatcctggatcacttgttctaaattcataagggagtatatcaagagcaaatgaagtaaatgattctttcctgcgtgtgggagtcaccatcattttattcaaagggagttcctgtgataggttcattccttaagtggtgctacagaaggaccctaggaaaatgctgatcttgtcctgagaggcaactgatttgagaaaatgattatactacagcaggaaggcagcaccagtgaacatatggtaaatggcaaaaacaagacagttttagaaactgctaattcagtagcagccttggcctttcccttaactcaagcaggctggaatctgtctttatagtcggcaactttccaagataaagcagtgataatagcagttggcaacactaaatatcaatatcatcaccctttaatgacatgttacccctttcagatctagaaaatcaggcaaaaagtgatgtcccaactctactctaaaaacctgctcctactattttagtcagtgtttctttaaggaagaagaggactatgtccccaaaagctaactctgttttatagccctggtggatccctgaaaaccctatttattctatactgggctttggaatatgaaaaatggacctgtgtggccgggcgtggtggatcacacctgtaatcccagcactttgggaggtcaaggtgggcggatcacttgaggtcaggagttcgagaccagcctggccaacatggtgaaactccatctctactaaaaatacaaaaattagccaggcatggtggcacacacctgtaatcccagctacatgggaggctgaggcaggagaattgcttgaacccgggaggcagaggttgcagtgagctgagattgcaccactgcactgcagcctgggcaacagagcaagtctctgtcttgcagcagggggaaggacctgtggtactcctacaaacttaacaactttagcttttcggggaacagtggtggtctccacagatagctagaatcttctaagatgaaaataaactgtttcatccagctgctttctgcctgttaacctttgccacttccattccttcaagtgtgtaatccccagggttgtcttgtattacacacatccttgttaagtaaatataccactgttgatttcttcttccagtgcaacatttggattaaataaaaatctttagtttccag

SEQ ID NO: 11916 - DNA, 3062 bp, Homo sapiens
  CDS (23)..(580)
agaagcgggcggcgcgggggagatgcataagcttaaatcgtctcagaaggacaaggtccgccagtttatggcgtgcactcaggctggcgagagaactgctatctactgcttaacgcagaatgagtggagactagacgaggccacggacagcttcttccaaaacccagactcgctccacagggagtccatgcggaacgctgtggacaagaagaagctggagcggctgtacggcaggtacaaagatccacaagatgaaaacaaaattggagtcgatgggattcaacagttttgtgatgatctgagcctggatcctgccagtatcagtgtattggtcatagcgtggaagttcagggcagcaactcagtgtgaatttagcagaaaggaatttctagatggcatgacagaacttgggtgtgacagcatggagaagctaaaggctcttctgccaagactggagcaggagctgaaggacacagccaagtttaaagatttttatcagtttaccttcaccttcgctaagaacccagggcagaaaggtttaggttcacctccatttctcaatgtgaaagctttacatcattaagatgagttgaatatagatttcaattaatgttcttcctaagtgataaggatgtagacttataagcaggacaagactaatcatcttcttagcattttactgcgggtcccatcgacttagaaatggctgttgcgtattggaaattagtgttatctggaaggtttaaatttttagatctctggaacacattcttaatggaacatcacaaaagatcaattccaagggacacctggaacctcctgctggactttggaaacatgattgcggatgatatgtctaactacgatgaagaaggagcttggcccgttcttatagatgattttgtagaatatgcacggccagtagtcacaggtggaaaacgcagccttttctaggcagcaagttaagcaggagtaagattatgaaatgatttgtatcctgcaaggagattgcagtcagttcctgggtgcattgtcgctgattccagaagtcattcttgaccagccatgaaaccagaggcgccatcccattctgccggaggacagccagcggctgctttgtggacaccgcaggaagttcctcgggacacggctgctttgggatgtttggagatttgtcatcatagcttttgcgttaggaaatttctgcatgattttttaatatttacaaaatactaaggtagagccatagcgccgcctgtgggaccgcagagcatgctgcgtagctcgcgcgtcaggcgaaccagcgtccggcagcgtcccgccgaatgacgttgcggtggcactggcaacacggcatgtgtcctctgcagggcgctgcgtttttatacacgtcaaagctgttaagaatgtgccctaagggagaggatcttgtcgtagagtctaatgttttttaaaattggtgccagcaattcacgatttatattttttgaattaccaaatatctagatttaccagctctatttttgttttcattttctctagacattcatctgaaaatcattttatggttctcaatccccatgtagctttgcatagcaacggcacacgtggcacgattccagcagagtttatctcacaccgtttatatatcactgggcctctcttacttaaatattatttgacctgcctgagaagcttcataaagtatgtttttttaaaatatattttaattacatttaaaaagacatttttccatgaaaaacatttattttatgagtgatgaattatagattttaaaatcaaggccgggcgtggtggctcacacctgtaatcccagcattttgggaggccgaggcaggtggatcacctgaggtcaggagtttgagaccagcctggccaacatggtgaaaccctgtctctactaaaaatacaaaaattagccgggcatggtggcacatgcctgtaatcccagctactcaggaggctgaggcaggagattcgcttgaactcaggagacggaggttacagtgagtcgagatcgcgccactgcactccagcctggacgacagagtgagattctgtctcaaaataaatacatacatacatacaataaaaccgaatgagctggttctttccatcctcttgtggtacccgtagtgcccagcatccagacctttgtgcccctgtgcacatttggaagctaaaatgtacatcgttgtctgaaaaaacccaaccccaaaaccttcatctgattggtgagctgaagtctgtccttgcaccatgttatcatctgtttctcgtgtccgcctggttgaggaggacccacgagtgctgccgaggtgtggagggctggtattgagttgtggacatcactgttgaccctacctcacgtgccgagactctcatgtcacaggcgtgccttgctgcccccctgcagcactgtgcaggacgtggaccagctggagctgctgcccagcacagaggagagtcgccgcagatgacctagctgcggtgtgagagagcatggcccagacaagcagctgggttggcttctgagaacaggacttaccctgggcttcaggaacatctgatggctgaggttagtgtgcttggaggctgcaggacgaactgtcgatgtttcttagcagagatggtcacagagggcagcagggacaggactggaagggacctgcagcctgcagaccccgcctggcccccgctggcttctggctggtccagtgatgggcaagtgacagaccttccccaggctctgcttccagaactctaatgggaaactgggcctgtctacctttagaagtcttcgattctcagagagcatttgtctaatacaataaaaactggcattaatacaaacctcaaaaacgtgagcgtatcttccaggcttcatggattcttgacatgtaattgttttgttcagaaaagtttatagaattcacataattctgtataaactatggagatccacagtacttttttgtttttgagatttaaagttctaagggattgtcaatagatatcaaaatattaatcattggacaaag

SEQ ID NO: 11917 - protein, 186 aa, Homo sapiens
MHKLKSSQKDKVRQFMACTQAGERTAIYCLTQNEWRLDEATDSFFQNPDSLHRESMRNAVDKKKLERLYGRYKDPQDENKIGVDGIQQFCDDLSLDPASISVLVIAWKFRAATQCEFSRKEFLDGMTELGCDSMEKLKALLPRLEQELKDTAKFKDFYQFTFTFAKNPGQKGLGSPPFLNVKALHH

SEQ ID NO: 11918 - DNA, 2983 bp, Homo sapiens
caaagaatgctaatgcttagcacttgctgttgagcatgctctaacttttaaagccctggcctcctgtctccttagctgcttagctacgcggcctagcagatcatcacccatcagtaatcctgtggctagatccaggggaaaattgtttatgtccaggccccacccctgtcactcataaataccccttgtgggggtggaattttagtgttttcagctaagaaaaccacattttctctttccttgcctctctgctaggactgtgagcatctcatagtccactccctaaacactttctggtaacacctagttttccgcctgagggtcagaggctagaatcattgcctgcacagcaggactaccttggttcttaaaacttggatcacccaggcaaggcgtggtggctcacgcctgtcatctcagcactttgggagactgaggctggtggatcacttgaggccacgagtttgagaccagcctgaccaacgtggtgaaaccccatctctactaaaaatacaaaaattagccaggcgtggtggtgggcacctgtaatcccagctacttgggaggctgaggcaggagaatcccttgaacccaggaggcggaggttgcagtgagcagagatggtgccgctgcagtccagcctgggtgacagagcgagactctgtctccaaaacaaaacaaaaaccacacacacatacagaaataaagagaaataatcaactagaaaaaaaacaaaacttggatcacccagaaagagcgtcacagaggcgagggagaatgaagcctcttgttatcctgatcgcctatgacaacgacatttccaactcttctttgaagcgcagttcttactcttaaatctggtcatacaagctttggcttggaatcctgtctgtctttgaaacagctgaagttagtgttttcctgtgttacccagtgttacatagtctcatctttgaacttttctgcgtcagccttctctctttgggaatgctgcctgtttctgtctaacttattctccctggtgtggtgtggcagtgaagtctgtgctgaagcccatctgcttggttcctccaagtgcacattatgcaagtgtatttggatagacagggagatgcccggaacgtggttttcctcctccctccctattggagccatacctcctaaatatattgtctgggtcccaaatgtttgagccctcttcctctgctctcagtgggctgctcttggcatgccctgtgcttggaacgggacctgcaggctgacaggcctctgagactgctagggccagcaaacgtacatgttattgggaaactccctttccccttttggtgagcttctaccacctcagtctaatcgttttgactgaaagctatttgtctgactgaaagctaaaatcttttatagtgtggcctgttagatactttggggtaaatgtggtctgaggcactggactagcacgggtagatggagaaagctgttgggaagttgcataatgtggtcatctgtgcctaattaaatgaggttagaggtgtgcacaccaccacaatgcctgggatctaaatcttcagatattaacgtttgaggctatggagctgtttccctgaatcacacacgagaaagcagtcaacatgggtgggccaaatgtggccaagatgagagagccagaagtgttggccttagagcagagcctctgtgtgtgagacattagaaggccagagccggggaggtgccggcgcagccactgccttccggtgggccggacggaaagcttggtcttatgctagattcagaagcactgaagaatggaggttgacactttagaggactaggaagggatcatttgtgcccttgcagctattgctgatagctagagccaaagaccattatattgctgaggcttgggtaagaaagttagggatgtgaggaggttgaaaatcctgaagaagagaaaaaatatgagggaggctaaggaaacttagacactttctgatcactgatgactccttaggctgcacctgagtgatggtggtgtttttggaggctgtacctgagtgatggtggtttttggggggctgcacctgagcgatagtgattttttttggaggctgcacagctggtcagaccatctctagatgttctttccacagtggttcatagggcgtcattcccccttcctggattattttgactatgggtagcttattttcaagagctctttgccttttcaatcctgttccagatcacttatccaaaatctttccaaatcaattatattttgctgcttttctttaattccctaaaagccatagcttctagattttctatcagcacacattctcaccagaagttgaaccaatacaggtagaaaaagaaagcccccttaatgtttttaactgatgatatttttttaagcttaccaatataagtatttttaaaggttctatttttcaaagtcataacaatgattgttcttgttttctctcatagaatagactgccatcggataaagagtggtccctagcttctatttttccaagcaaataagtagaacatgttcttgggattataccattaaatgttaattttcttgaaaaagaaagattgttgtctgccaagattttatgttagcgctcggattgaggcagaaaacggaagcaccaggtttaacactgggatgacttgggttgtgttcctggaggtttgaagtgggccttcccgccttttgagggggaaaactgactgttttgaacacatatcctggattagttgggttgttttgtattgaggatccctaaaagacaaaagagtcttggaaaggactgctggcttcgtcttgaacgttcgccccatcaccagtgtgagtccgtggggaagtcttcctcaagtggggttcagtctgtaattttcctgtctgttcttagtttgttctgagttattttggattttgttctttagccaaataaaggcaatgtggttttacctg

SEQ ID NO: 11919 - DNA, 2732 bp, Homo sapiens
  CDS (478)..(2631)
gaagctctcctgtttgacgaaagtatgtctcaggaaggtgcggtcccagctagcgcggttcccctggaagaattaagtagctggccagaggagctatgccgccgggaactgccgtccgtcctgccccgactcctctcattgtctcaacattctgaaagttggattgagcatattcactgtgaaattattcgatgacatgatgtatgaattaaccagtcaagccagaggactgtcaagccaaaatttggaaatccagaccactctaaggaatattttacaaacaatggtgcagctcttaggagctctcacaggatgtgttcagcatatctgtgccacacaggaatccatcattttggaaaatattcagagtctcccctcctcagtccttcatataattaaaagcacatttgtgcattgtaagtttcagaccttctccaggctcttttcaaggaggcctattctcttcaaaagcagttaatggaactgctggacatggtttgcatggaccctttagtagatgacaatgatgatattttgaatatggtaatagttattcattctttattggatatctgctctgttatttccagtatggaccatgcatttcatgccaatacttggaagtttataattaagcagagccttaagcaccagtccataataaaaagccagttgaaacacaaagatataattactagcttgtgtgaagacattcttttctccttccattcttgtttacagttagctgagcagatgacacagtcagatgcacaggataatgctgactacagattatttcagaaaacactcaaattgtgtcgtttttttgccaactcccttttgcactacgctaaggaatttcttcctttcctctctgattcttgctgtactttgcaccaactgtatcttcagatacacagcaagtttcctccaagcctttatgctaccaggatttctaaagcacaccaagaggaaatagcaggtgctttcctagtgacactggatccacttatcagtcagctgctcacatttcagcctttcatgcaggtggttttggacagtaaattagacctgccatgtgaactgcagtttccacaatgtcttcttctggttgttgtcatggataagctgccatctcagcctaaggaagtgcaaaccctgtggtgcacagacagccaggtctcagaaacgacaaccaggatatctctactcaaagccgttttctacagttttgagcagtgttctggtgaactctctctacctgttcatttacagggattaaagagtaaggggaaagctgaggtggctgtcaccttgtatcagcatgtttgtgttcatctgtgtacatttattacttcctttcatccctcactgtttgctgaactggatgctgctctgctgaatgctgtacttagtgctaatatgatcacctctttgttagctatggatgcatggtgcttccttgctcgatatgggactgctgaactgtgtgcacaccatgtcaccatagtggctcatctgataaagtcatgccctggagaatgttatcaactcatcaacctatcaatactgttgaagcgtctctttttcttcatggcaccaccccatcagctggagtttatccagaaattttccccaaaagaagcagaaaatctgcctctgtggcaacatatttccttccaggcgttacctcctgagcttagggaacaaactgtccatgaggtcaccacagtaggcactgcagaatgcaggaaatggctgagcaggagtcgtactttgggagaactagaatctctgaacacagtactgtctgctttgcttgcagtatgtaattctgctggtgaagctttggatacaggaaaacaaactgcaattatcgaagttgtgagtcagctttgggcttttttaaacattaaacaggtagcagatcaaccttatgttcaacagacattcagccttttacttccactgttgggatttttcattcaaactctagatcctaaactgatacttcaggcagtaactttgcagaccttgctacttaaattagagcttcctgactatgttcgtttggcaatgttggattttgtatcttctttaggaaaactttttatacctgaagctatccaggacagaattctgcccaacctgtcctgtatgtttgccttactgctagctgacaggagttggctgctagaacaacataccttggaggcgtttactcagttcgctgagggaacaaatcatgaagagatagttccacagtgtctcagttctgaagaaactaagaacaaagttgtatcctttctggagaagactgggtttgtagatgaaactgaagctgccaaagtggaacgtgtgaaacaggaaaaaggtattttctgggaaccctttgctaatgtgactgtagaagaagcaaagaggtcatctttacagccttatgcaaaaagagctcgtcaggagttcccctgggaagaagagtacaggtcagcgctgcatacaatagcaggggctttggaagcaactgagtcactactccaaaagggtcctgctccagcctggctttcaatggaaatggaggcgctccaagaaaggatggataagctaaaacgttacatacatactctagggtgaaacttatcactaggcagaactgggtttgatgctttgtcaactgaaaatacttatgtctgtacattttctaacagatataaaacaaattttgtaaagtt

SEQ ID NO: 11920 - protein, 718 aa, Homo sapiens
MELLDMVCMDPLVDDNDDILNMVIVIHSLLDICSVISSMDHAFHANTWKFIIKQSLKHQSIIKSQLKHKDIITSLCEDILFSFHSCLQLAEQMTQSDAQDNADYRLFQKTLKLCRFFANSLLHYAKEFLPFLSDSCCTLHQLYLQIHSKFPPSLYATRISKAHQEEIAGAFLVTLDPLISQLLTFQPFMQVVLDSKLDLPCELQFPQCLLLVVVMDKLPSQPKEVQTLWCTDSQVSETTTRISLLKAVFYSFEQCSGELSLPVHLQGLKSKGKAEVAVTLYQHVCVHLCTFITSFHPSLFAELDAALLNAVLSANMITSLLAMDAWCFLARYGTAELCAHHVTIVAHLIKSCPGECYQLINLSILLKRLFFFMAPPHQLEFIQKFSPKEAENLPLWQHISFQALPPELREQTVHEVTTVGTAECRKWLSRSRTLGELESLNTVLSALLAVCNSAGEALDTGKQTAIIEVVSQLWAFLNIKQVADQPYVQQTFSLLLPLLGFFIQTLDPKLILQAVTLQTLLLKLELPDYVRLAMLDFVSSLGKLFIPEAIQDRILPNLSCMFALLLADRSWLLEQHTLEAFTQFAEGTNHEEIVPQCLSSEETKNKVVSFLEKTGFVDETEAAKVERVKQEKGIFWEPFANVTVEEAKRSSLQPYAKRARQEFPWEEEYRSALHTIAGALEATESLLQKGPAPAWLSMEMEALQERMDKLKRYIHTLG

SEQ ID NO: 11921 - DNA, 3334 bp, Homo sapiens
  CDS (192)..(2963)
atgaggcttcagaggagaataatgaccagcaatcacaagaagttccagaaaaagtaactgtatccagtgatcatgaggaagtagacaatccagaagaaaaaccagaagaagagaaagaagaggttatagatgaccaggagaacctagctcatagcaggaggaccagggaagatagaaaggtagaagccatcatgcatgcttttgaaaacttagagaaaagaaagaagcggcgggatcagcccttggaacagagcaactctgatgtagagattactacaaccacctcagagactcctgttggtgaagagacaaaaactgaagcccctgaatctgaagttagcaactctgtttcaaatgttaccatcccaagcaccccacagagtgttggtgtgaatacccggaggtcttcccaagcaggggatattgctgcagaaaaactagtccccaagccacctccagcaaagccttctaggccccggccgaagagtcgaatttctcggtacaggaccagttcagcccaaagactaaagcgtcagaagcaggccaatgcacagcaggcagaattgtcacaagctgccttggaagagggaggaagtaacagtttagtaactcctactgaagctggaagtctagacagttcaggagaaaacaggccattaacagggtctgacccaactgtggtgtcaattactggatcccatgtcaaccgtgctgcatctaaataccccaaaaccaaaaagtatctagttacagaatggttgaatgacaaagcagagaagcaagagtgccctgttgagtgccctttacgtatcacaacggatccaactgtactggcaacgaccctaaacatgttaccaggtcttatccattccccgttaatttgcaccacccccaaacactacattcgctttggctcaccctttatccctgagagacgtcgaaggccccttctgcctgatggcacattcagcccctgtaagaagcgctggataaaacaagccttagaagaagggatgactcaaacatcatctgtaccccaagagactagaactcagcacctataccaaagcaatgagaatagtagctcttctagtatctgcaaagacaatgcagacttgttgagcccattaaagaaatggaagtctcgctatctgatggagcagaatgtcaccaagttacttcggcctctgtctccagtcacaccaccccctcccaattcaggctcaaagagtccccagctggccacacctggctcatctcacccaggagaagaggagtgtcgaaatggatacagcctcatgttttcaccagtcacatctcttactactgctagtcgctgcaacactcctctacagtttgagctttgtcaccgaaaagacctggatttggcaaaagtaggataccttgactccaacactaacagctgtgctgatagaccttccctactcaactcaggtcattctgacctggctcctcatccctccctcggacccacttctgagactggtttcccaagcagaagtggagatggacatcagaccctcgtgagaaactcagaccaggcatttcggacagagttcaacttgatgtatgcctactcccctttgaatgctatgcctcgagcagatggactgtatcgaggatctcctctagtgggggataggaagcctttacatttggatgggggatattgttcccctgcagaaggattttccagcagatatgaacatggcttaatgaaagacctctctcgtggatccttgtcacctggtggtgaaagggcctgtgaaggagtcccatctgccccccagaacccaccacagaggaaaaaagtatccctgctggagtaccgaaaacggaaacaagaagctaaggaaaattctgctggtgggggaggtgactctgcacagagcaaaagcaagtctgcaggagctgggcaaggcagcagtaactccgtttccgacaccggtgcccatggtgtgcagggatcctcagcccgaactccatcttcccctcacaaaaaattctccccatctcattcctctatgtcccatttggaggcggtaagcccatcagattccagaggcacttcttcatctcactgcagacctcaagagaatatcagcagtaggtggatggttcccacatcagtagaacgactccgagaaggagggagcatccccaaggtcctccgaagcagcgtgagggtggcccaaaagggagagccctctcccacatgggagagtaacatcacagagaaagactcagaccctgcagatggagaaggcccagagacattaagctcagcactctctaaaggagcaacagtttacagcccttccagatacagctaccagctcctgcagtgtgatagtcctcggacagaatcacaaagcctccttcagcagagttcctcccccttcagaggacatcctacacagtctccaggatacagttatcgaactactgcactgagacctggaaaccccccctctcacggttcttcagaatcatccctctcttccacgtcctattccagccccgcccaccctgtgtccacagactcgttggccccatttacggggacaccagggtattttagcagccagccacattctggaaacagcactggcagcaatcttccaaggaggagctgcccttctagtgctgctagccctaccctgcagggaccctcagactcgccaacctcagattcagtttctcagtccagcacaggaactctgagttccacctcctttcctcagaactctaggtcgtcattgccatcagacttacggactatcagtctgcccagtgctgggcagtcagctgtctaccaggcctccagggtatctgcggtttccaattcacagcactacccacaccgtgggagtgggggtgtgcaccagtaccgactccagccactgcaagggtcaggagtcaagactcagacgggactttcctagggcttctggatttgggcaaacagaactgaatgagcccatagctgcttccttccagctgcctctggaacctaggccgagcatattgctgaggaacggggggtacaaggtgccagaggattgggtctggtggacaagaaacaagacttgtggtcacaattggcctctggccttggagaaagctgtaaatcttgtctgaagcagagactataaagaagtttctccctgctgtcaagggtacattgttgacaagcaaatggtgtttcggttagtaacggttctaagtgcaatgagttgtgttgaagcctccgtctcccatccttgcctgtagcccgtagtcacttgtgcagtgaggacatctttttaaattt

SEQ ID NO: 11922 - protein, 924 aa, Homo sapiens
MHAFENLEKRKKRRDQPLEQSNSDVEITTTTSETPVGEETKTEAPESEVSNSVSNVTIPSTPQSVGVNTRRSSQAGDIAAEKLVPKPPPAKPSRPRPKSRISRYRTSSAQRLKRQKQANAQQAELSQAALEEGGSNSLVTPTEAGSLDSSGENRPLTGSDPTVVSITGSHVNRAASKYPKTKKYLVTEWLNDKAEKQECPVECPLRITTDPTVLATTLNMLPGLIHSPLICTTPKHYIRFGSPFIPERRRRPLLPDGTFSPCKKRWIKQALEEGMTQTSSVPQETRTQHLYQSNENSSSSSICKDNADLLSPLKKWKSRYLMEQNVTKLLRPLSPVTPPPPNSGSKSPQLATPGSSHPGEEECRNGYSLMFSPVTSLTTASRCNTPLQFELCHRKDLDLAKVGYLDSNTNSCADRPSLLNSGHSDLAPHPSLGPTSETGFPSRSGDGHQTLVRNSDQAFRTEFNLMYAYSPLNAMPRADGLYRGSPLVGDRKPLHLDGGYCSPAEGFSSRYEHGLMKDLSRGSLSPGGERACEGVPSAPQNPPQRKKVSLLEYRKRKQEAKENSAGGGGDSAQSKSKSAGAGQGSSNSVSDTGAHGVQGSSARTPSSPHKKFSPSHSSMSHLEAVSPSDSRGTSSSHCRPQENISSRWMVPTSVERLREGGSIPKVLRSSVRVAQKGEPSPTWESNITEKDSDPADGEGPETLSSALSKGATVYSPSRYSYQLLQCDSPRTESQSLLQQSSSPFRGHPTQSPGYSYRTTALRPGNPPSHGSSESSLSSTSYSSPAHPVSTDSLAPFTGTPGYFSSQPHSGNSTGSNLPRRSCPSSAASPTLQGPSDSPTSDSVSQSSTGTLSSTSFPQNSRSSLPSDLRTISLPSAGQSAVYQASRVSAVSNSQHYPHRGSGGVHQYRLQPLQGSGVKTQTGLS

SEQ ID NO: 11923 - DNA, 2594 bp, Homo sapiens
  CDS (34)..(1992)
gaaagtaagaaacttttaaaactaaaatctgaaatggaggaaaaagtatacaacttgacaagagaaagagatgagttgataggcaaattgaaaagtgaagaagaaaaatcctctgaattaagctgcagtgttgacttactaaagaagagacttgatggtatagaggaagtggaaagagaaataacaagaggaaggtcacgaaaagggtctgagctcacctgcccggaagataataagattaaggaactaacacttgaaattgagagactgaagaaacgtctccaacaattggaagtggtcgaaggggatttgatgaagacagaagatgagtatgatcagctggaacagaaatttagaactgagcaggataaggctaacttcctctctcaacaactagaggagatcaagcaccaaattgccaagaataaagcaatagagaagggtgaggttgtgagccaggaagctgaactgagacacagatttcggttggaagaagctaaaagtcgagacttaaaagccgaagtacaagctcttaaagagaagattcacgaattaatgaacaaagaagatcagctttctcagctccaggtagattattctgtacttcaacaaagatttatggaagaagaaaataagaacaaaaacatggggcaggaggttctcaatctgaccaaagagttggagctttccaagcgctacagcagagctcttaggcccagtgtgaatggaagaagaatggtggatgttcctgtgacgtcaactggagtccaaactgatgcagtcagcggtgaagcagcagaggaagaaacgccagctgtattcatacggaaatccttccaggaagaaaatcatattatgagtaatcttcggcaggtgggattgaagaaacccgtggaaagatcttctgttctagacaggtatcctccagcagcaaatgagctcactatgagaaagtcttggattccatggatgagaaagagggaaaacggcccctccatcactcaggagaaagggccccgaacaaattccagtccagggcacccaggagaggtagtcctttcaccaaagcagggccagcccctgcatattcgagtgacaccagaccacgagaacagcactgcgactttggagataacaagcccgacatctgaagaatttttttctagtaccactgtcattcctaccttagggaatcagaaaccaagaataaccattattccatcaccaaacgttatgcctcaaaaacaaaaaagtggagatactactcttggcccagaacgagccatgtccccagtcacaattactacattttccagagagaagactccagaaagtggaagaggcgcatttgcagacaggcccacatcccctattcagataatgacggtgtctacatcagcagcaccagctgagattgcagtttctcccgaatcccaggaaatgcccatgggacggacaatcctcaaagtcaccccagaaaaacagactgttccaactccagtacggaaatacaactccaatgccaatatcataaccacagaggacaataaaattcacattcacttagggtctcagtttaaacggtcccctgggacttcaggtgaaggagtcagtccagttattactgtccgaccagtaaacgtgacagccgaaaaggaggtttccaccggcactgtccttcgctctcccaggaatcacctctcctcacggcctggtgcaagcaaagtgacgagcactatcaccataacaccggtcacaacgtcatctgctcgaggaacccagtcagtgtcaggacaagacgggtcatcccagcggcctacacccacccgcattcctatgtcaaaaggtatgaaagcaggaaagccagtagtggcagccccaggagcaggaaatctgaccaaattcgagcctcgagctgagactcagtctatgaaaatagagctgaagaaatctgcagccagcagcaccacctctctcggaggggggaagggctgagggcagtggctaagggggtatgttgtgcagatgctactgctgccgtgaaagtgaaccttcatctgtttgtgccagttctttacatgtactaatttaagttttaaatattgtgtttataaaataaccaactaataaccatttgtctttcccattttgtgcatttgttttgatgctggggaacaaaattagcaaaactattgcttgctgcctagaagccagggcgtggtttctagttccagttttgcttctagcaagtggacccatcaatagacccatctgagcctgtttcctcatcagttagatgtggggactcaatcacacgctcttcaagtccggctcccatatttcctaattgcaagccaaatttaatgtaccttgttccacaataattttttattaaaaaaatcctattacaaaataagacatactttaactattgtcatttgcctctttcacatcatgaatttgctttatgtgctggaaaaaacatcacatagctatcacagggcctggacctctaaaattttgcaaaaacaaaaggttctaagatgatttcaggaaataatgtgaacatgtaataaaatggaaatgaaatatgg

SEQ ID NO: 11924 - protein, 653 aa, Homo sapiens
MEEKVYNLTRERDELIGKLKSEEEKSSELSCSVDLLKKRLDGIEEVEREITRGRSRKGSELTCPEDNKIKELTLEIERLKKRLQQLEVVEGDLMKTEDEYDQLEQKFRTEQDKANFLSQQLEEIKHQIAKNKAIEKGEVVSQEAELRHRFRLEEAKSRDLKAEVQALKEKIHELMNKEDQLSQLQVDYSVLQQRFMEEENKNKNMGQEVLNLTKELELSKRYSRALRPSVNGRRMVDVPVTSTGVQTDAVSGEAAEEETPAVFIRKSFQEENHIMSNLRQVGLKKPVERSSVLDRYPPAANELTMRKSWIPWMRKRENGPSITQEKGPRTNSSPGHPGEVVLSPKQGQPLHIRVTPDHENSTATLEITSPTSEEFFSSTTVIPTLGNQKPRITIIPSPNVMPQKQKSGDTTLGPERAMSPVTITTFSREKTPESGRGAFADRPTSPIQIMTVSTSAAPAEIAVSPESQEMPMGRTILKVTPEKQTVPTPVRKYNSNANIITTEDNKIHIHLGSQFKRSPGTSGEGVSPVITVRPVNVTAEKEVSTGTVLRSPRNHLSSRPGASKVTSTITITPVTTSSARGTQSVSGQDGSSQRPTPTRIPMSKGMKAGKPVVAAPGAGNLTKFEPRAETQSMKIELKKSAASSTTSLGGGKG

SEQ ID NO: 11925 - DNA, 2485 bp, Homo sapiens
  CDS (110)..(1867)
aaaaaaaaaaaaaaaaccggctcgcggcgcgtggaggctgctcccagccgcgcgcgagtcagactcgggtgggggtcccggcggcggtagcggcggcggcggtgcgagcatgtcgtggctcttcggcattaacaagggccccaagggtgaaggcgcggggccgccgccgcctttgccgcccgcgcagcccggggccgagggcggcggggaccgcggcttgggagaccggccggcgcccaaggacaaatggagcaacttcgaccccaccggcctggagcgcgccgccaaggcggcgcgcgagctggagcactcgcgttatgccaaggacgccctgaatctggcacagatgcaggagcagacgctgcagttggagcaacagtccaagctcaaagagtatgaggccgccgtggagcagctcaagagcgagcagatccgggcgcaggctgaggagaggaggaagaccctgagcgaggagacccggcagcaccaggccagggcccagtatcaagacaagctggcccggcagcgctacgaggaccaactgaagcagcagcaacttctcaatgaggagaatttacggaagcaggaggagtccgtgcagaagcaggaagccatgcggcgagccaccgtggagcgggagatggagctgcggcacaagaatgagatgctgcgagtggaggccgaggcccgggcgcgcgccaaggccgagcgggagaatgcagacatcatccgcgagcagatccgcctgaaggcggccgagcaccgtcagaccgtcttggagtccatcaggacggctggcaccttgtttggggaaggattccgtgcctttgtgacagactgggacaaagtgacagccacggtggctgggctgacgctgctggctgttggggtctactcagccaagaatgccacgcttgtcgccggccgcttcatcgaggctcggctggggaagccgtccctagtgagggagacgtcccgcatcacggtgcttgaggcgctgcggcaccccatccaggtcagccggcggctcctcagtcgaccccaggacgcgctggagggtgttgtgctcagtcccagcctggaagcacgggtgcgcgacatcgccatagcaacaaggaacaccaagaagaaccgcagcctgtacaggaacatcctgatgtacgggccaccaggcaccgggaagacgctgtttgccaagaaactcgccctgcactcaggcatggactacgccatcatgacaggcggggacgtggcccccatggggcgggaaggcgtgaccgccatgcacaagctctttgactgggccaataccagccggcgcggcctcctgctctttgtggatgaagcggacgccttccttcggaagcgagccaccgagaagataagcgaggacctcagggccacactgaacgccttcctgtaccgcacgggccagcacagcaacaagttcatgctggtcctggccagcaaccaaccagagcagttcgactgggccatcaatgaccgcatcaatgagatggtccacttcgacctgccagggcaggaggaacgggagcgcctggtgagaatgtattttgacaagtatgttcttaagccggccacagaaggaaagcagcgcctgaagctggcccagtttgactacgggaggaagtgctcggaggtcgctcggctgacggagggcatgtcgggccgggagatcgctcagctggccgtgtcctggcaggccacggcgtatgcctccgaggacggggtcctgaccgaggccatgatggacacccgcgtgcaagatgctgtccagcagcaccagcagaagatgtgctggctgaaggcggaagggcctgggcgtggggacgagccttccccatcctgagtccacagggagatccacagctcacggagcctggccgcggacccctcccacccctgccttgccggcccctgcacatttaggatatgctcctgggtggggactgggctgtgcccagggcctctgtcccccaggatgtcttgtggtgcgggtcggccgttctgccccccagggcaccccctgttgtaggcactggctagggaggggcaggcctccttcctgcccctcgagacactcttgggagatgcattttccgtctggctcacagggggagggtgaggctttgcaccccagcccctgcccaggccactgtgagggtgggtgctggctgaccccccggggcagcaggagccaggcaggtgatgtctttgttctcggctcccacagcagagccaggtgagggggcgcctgccagggccagacccaggtggggcagcctgaaccctgcttccccctgtggccggcatgccccgatctttcacacactggtgaccctgagagaggagggaggagggaacctggcgggggtgtctgaggccgcactgtcagctggccggtccaagcctgtggctggagctggggtctgtttacctaataaagtcccacaggtgcctcatt

SEQ ID NO: 11926 - protein, 586 aa, Homo sapiens
MSWLFGINKGPKGEGAGPPPPLPPAQPGAEGGGDRGLGDRPAPKDKWSNFDPTGLERAAKAARELEHSRYAKDALNLAQMQEQTLQLEQQSKLKEYEAAVEQLKSEQIRAQAEERRKTLSEETRQHQARAQYQDKLARQRYEDQLKQQQLLNEENLRKQEESVQKQEAMRRATVEREMELRHKNEMLRVEAEARARAKAERENADIIREQIRLKAAEHRQTVLESIRTAGTLFGEGFRAFVTDWDKVTATVAGLTLLAVGVYSAKNATLVAGRFIEARLGKPSLVRETSRITVLEALRHPIQVSRRLLSRPQDALEGVVLSPSLEARVRDIAIATRNTKKNRSLYRNILMYGPPGTGKTLFAKKLALHSGMDYAIMTGGDVAPMGREGVTAMHKLFDWANTSRRGLLLFVDEADAFLRKRATEKISEDLRATLNAFLYRTGQHSNKFMLVLASNQPEQFDWAINDRINEMVHFDLPGQEERERLVRMYFDKYVLKPATEGKQRLKLAQFDYGRKCSEVARLTEGMSGREIAQLAVSWQATAYASEDGVLTEAMMDTRVQDAVQQHQQKMCWLKAEGPGRGDEPSPS

SEQ ID NO: 11927 - DNA, 3221 bp, Homo sapiens
gttaaaagagcccgcctctccctcggccggtcactctttcgccacgggcggggttgcaccatccggcagggcggggcccggccatggcgaccgcggagcccagcgggcgcgcgttgcggttgtctaccccgggaccccggcccagcggggctcgggaccgcgcgccgggagctgcggggccaccctccgggcagatcggtaatagagccctccgtctgggggagcgcacccccgcggccgtggaaaagcgggggccatacatggtgacgcgcgcaccctccattcaagccaagctgcgtcagtgaagtttaacaagggctatactgctcttagccagagtccagatgaaaacctggtgtccctcgactctgacagtgatggggagctgggatccagatactcctccgggtattcatctgcagaggtgaaccaggatgtgagccggcagctgcttcaggatgggtatcacctggatgagattccagatgacgaggacttggacctcatcccccctaagcccatggcctcttcaacatgctcctgctgctggtgctgtcttggggactcttcttcctgtaccctccagtagacattaccctccaaggtgggccctgctcaccatgaggcctacagagccctgttggccactcatagctcacacagtgcagtgagcactgaagtcactgacccctagaaagtgacctgcaggtagcccttacctgttgcttctcaggccagaggcccccatctgggctgtgggctgataggtagaattctgtagttttcctctgctgttggagcagagtttggagaagtcactttaataagggcaagacagaaaattctggttcttatggtgggtgacaaaggtggctaaggaaaacacttgcagacagcttgattggtatttgtcatagtgcttcagggaggcaaaaagggagctcctgtgcccaggctgtgctagatagtgttgaatggaggcagaaaatagcactttatggtttattatagctggcaatccaaaaaagaaactgtttgagaccagttcgagaaattccgtttgctctattcttcctagctctaagatggtttgcaggcttgaccttcaagacagcataaagtgagtccttttgtccctcttcaggttgcacctgtctaactatgacagggatcatagcaggttgcttaatgatacagcaggatcctggcttccagaatccctggacctggggcatccccaactggtccaaccgtccgggtgagtttagtgattctggtttgcccttccctagttagagaaaaactgctctgacatgttcatatttatttatttgtatttccttggtctgggtgagtttcttcacccagtctttgagctaaagattaggtcgaaggtactggggctggccccagaagcctgcagtttttattattaccagcagagggagctacagggagcagtccggtgccttcctattgtttactttttaaacttttgagaagtagcaatggactcgtgagagtgggtatacagctgtgtgggctttgtcctagactgaggcttacagacaggaagggtaagagagacctaagccagctcctagacccttgcctgaggaaatcagtccaccagtgtagagggcctcccttcactccagcatggaccattctattgccagattcttctggtcacagcatgggccttactggatactcaggattgggctttaagcagacctctgggtgtgacacagcctctttcagcccccagcccaaacagcagaaataggcataatctctgctgtgacaccccctacccacaaattggagagtatatcttgctatactctataccaagcctctttctagaatttttccaacaggttttgttttgttttttggcttaactcagaaccatggtgagcgttctgctttgttttgttggaggcagggtctctgtcacccaggctggagtgcagtggtgtaatcacagctcactgcagcctcaacctcccaggcccaagcagtcctcccacatggtgagctttgaatgggcatagacagggttcccagcccaatagtcgggattggggtataggttctacatgggaaagtatccagtctcttgctttactcagtgtcctgtgaccaccagaggcatgagagggacaacacactcttttcgctctaccacaaggggtgactagaagatgagcaagtctaataaaaagatacggccttatttgttatttgtctgacaaccatccttacgatggtaatcctgtgagtgcctgatggacatctatctttgtgtttttctcaaaccatggaaggttgagaggaatatacagtatctgggggctgacttactctactagctaggagcatcacagcagagagataggacagagaccagagtcatgccagcttggggtcttgggaagagaggcagatggttactctgttctggaatgggactctgcagctctatgcagtggccaacattctgagcactttgtgcaaatgcttgtagagctcaagaacatctccatccagaaccccttccccatctgcagagaccatgtccaggcctttcttgtgtctgcagaggtgaagtgcacatgtggaaagggatcaaatgtagcacagtgtaaagaaagacagcaacacaggtagagggacccagtgtgtgctgggaggtggctgtggaaggtaagtatagacctacatctctgttggggaggtggtcagggcagaatggcctgggtgtttagcagcttctaggggtgagggtggcaggaccccaaaaccaaggccctctgcatcgttgttgtaataatcagctctggcatattcagctgcaactgtccctgaagaagaggtttctgagctggctgaccccatgtaggagggtgttaccttgtagaaaaagctggagggacctggtgggacagtgcagtgaggcagggtagaaatggtcagttgtttagggccagtggccacataccaaaataccaccaatgtgcccagggccaaactgccttaattctgagtgctgtgtgttctgcaggtgacagtttcctgaggagaggggtgtatccaggcttacctcccagcaggagtggtaccatatggtgtttatgtactactctatagaactcttggcttgcacttctacagctctgtacatttataagaataaatgcaatcacactaaaaac

SEQ ID NO: 11928 - DNA, 3420 bp, Homo sapiens
  CDS (86)..(2935)
aagtgctggtgccctctgccgctgctcccgtctctttggttacgctcgtcagccggtcggccgccgcctccagccgtgtgccgctatgggagtcccggcgttcttccgctggctcagccgcaagtacccgtccatcatagtcaactgcgtggaagagaagccaaaagaatgcaatggtgtaaagattccagttgatgccagtaaacctaatccaaatgatgtggagtttgataatctgtatttggatatgaatggaatcatccatccctgtactcatcctgaagacaaaccagcaccaaaaaatgaagatgaaatgatggttgcaatttttgagtacattgacagacttttcagtattgtaagaccaagaagacttctctacatggcaatagatggagtggcaccacgtgctaaaatgaaccagcagcgttcaaggaggttcagggcatcaaaagaaggaatggaagcagcagtcgagaagcagcgagtcagggaagaaatattggcaaaaggtggctttcttcctccagaagaaataaaagaaagatttgacagcaactgtattacaccaggaactgaattcatggacaatcttgctaaatgccttcgctattacatagctgatcgtttaaataatgaccctgggtggaaaaatttgacagttattttatctgatgctagtgctcctggtgaaggagaacataaaatcatggattacattagaaggcaaagagcccagcctaaccatgacccaaatactcatcattgtttatgtggagcagatgctgatctcattatgcttggccttgccacacatgaaccgaactttaccattattagagaagaattcaaaccaaacaagcccaaaccatgtggtctttgtaatcagtttggacatgaggtcaaagattgtgaaggtttgccaagagaaaagaagggaaagcatgatgaacttgccgatagtcttccttgtgcagaaggagagtttatcttccttcggcttaatgttcttcgtgagtatttggaaagagaactcacaatggccagcctaccattcacatttgatgttgagaggagcattgatgactgggttttcatgtgcttctttgtgggaaatgacttcctccctcatttgccatcgttagagattagggaaaatgcaattgaccgtttggttaacatatacaaaaatgtggtacacaaaactgggggttaccttacagaaagtggttatgtcaatctgcaaagagtacagatgatcatgttagcagttggtgaagttgaggatagcatttttaaaaagagaaaggatgatgaggacagttttagaagacgacagaaagaaaaaagaaagagaatgaagagagatcaaccagctttcactcctagtggaatattaactcctcatgccttgggttcaagaaattcaccaggttctcaagtagccagtaatccgagacaagcagcctatgaaatgaggatgcagaataactctagtccttcgatatctcctaatacgagtttcacatctgatggctccccgtctccattaggaggaattaagcgaaaagcagaagacagtgacagtgaacctgagccagaggataatgtcaggttatgggaagctggctggaagcagcggtactacaagaacaaatttgatgtggatgcagctgatgagaaattccgtcggaaagttgtgcagtcgtacgttgaaggactttgctgggttcttagatattattaccagggctgtgcttcctggaagtggtattatccatttcattatgcaccatttgcttcagactttgaaggcattgcagacatgccatctgattttgagaagggtacgaaaccgtttaaaccactagaacaacttatgggggtatttccagctgcaagtggtaattttctacctccatcatggcggaagctcatgagtgatcctgattctagtataattgacttctatcctgaagattttgctattgatttgaatgggaagaaatatgcatggcaaggtgttgctctcttgccattcgtggatgagcgaaggctacgagctgccctagaagaggtatacccagacctcactccagaagagaccagaagaaacagccttggaggtgatgtcttatttgtggggaaacatcacccactccatgacttcattttagagctgtaccagacaggttccacagagccagtggaggtaccccctgaactatgtcatgggattcaaggaaagttttctttggatgaagaagccattcttccagatcaaatagtatgttctcctgttcctatgttaagggatctgacacagaacactgtagtcagtattaattttaaagacccacagtttgctgaagattacatttttaaagctgtaatgcttccaggagcaagaaagccagcagcagtactgaaacctagtgactgggaaaaatccagcaatggacggcagtggaagcctcagcttggctttaaccgtgaccggaggcctgtgcacctggatcaggcagccttcaggactttgggccatgtgatgccaagaggctcaggaactggcatttacagcaatgctacaccaccacctgtgacttaccagggaaacttatacaggccgcttttgagaggacaagcccagattccaaaacttatgtcaaatatgaggccccaggattcctggcgaggtcctcctccccttttccagcagcaaaggtttgacagaggcgttggggctgaacctctgctcccatggaaccggatgctgcaaacccagaatgcagccttccagccaaaccagtaccagatgctagctgggcctggtgggtatccacccagacgagatgatcgtggagggagacagggatatcccagagaaggaaggaaataccctttgccaccaccctcaggaagatacaattggaattaagcttttgtaaagctttcccaaatcctttcatcattctacagttttatgctatttgtggaaagatttctttctcaagtagtagtttttaataaaactacagtactttgtgtatttcttttaactgtgtatatttctactgatctgatctcactgtttatgttgctttccaaagatgtatgttgcataatacagtggatctgaatttattattgcttataaaacacatttgatggaataggagtactggtttttcataatggttaaaaatgaaaccagctgtggatttcaaaacacagtgtattctagatcatctaagatccatgctgatttttattgcacaagaattaggtttgaactcttgagctggaacctcagcaaactagagtatatattgttcagtatttctttggaaacatttcattaatgtacttgtcttacagaaatttctgaactttagtaaaaaaaaataaagttaaactttt

SEQ ID NO: 11929 - protein, 950 aa, Homo sapiens [sequence omitted]

SEQ ID NO: 11930 - DNA, 3240 bp, Homo sapiens
  CDS (887)..(1660)
aatcgagcgccgagagagcgagtcggtgctactggcgtcgggtcggtccgggtaggcgcagcgggactggacctgggtgccgagcggagccgctgccatgggcctgggcgtcagcgctgagcagcccgcaggcggcgccgagggcttccacctccacggggtgcaggagaactccccagcccagcaggcgggcctggagccctactttgacttcatcatcaccattgggcactcgaggctgaacaaggagaatgacaccctgaaggcactactgaaagccaatgtggagaagcccgtgaagctggaggtgttcaatatgaagaccatgagggtgcgcgaggtggaggtggtgcccagcaacatgtggggcggccagggcctactgggtgccagtgtgcgcttctgcagcttccgcagggccagtgagcaggtgtggcatgtgctggatgtggaaccatcttcacctgctgcccttgccggcctgcgcccctacacagactatgtggttggttcggaccagattctccaggagtccgaggacttctttacgctcatcgagtctcatgaggggaagcccttgaagctgatggtgtataactccaagtcagactcctgccgggaggtgactgtaactcccaacgcagcctggggtggagagggcaggtacttcgtggggttggagggctgcagggccaggtgggtggggcctgaccattgggcatggacctcagagttctatggtggagatggaggagggttgggccctgggcccagggatcctgaggctgaccggtatttcagaagtacccttttcagcccccttattgctggtagtaggtggggatagcaaaggtagggagggccgtgggacaagcccctggattgaatgtttctggccttcggcagtctgggatgtggcattggctatgggtatctacaccggatcccaactcagccccccagctaccacaagaagccacctggcaccccaccaccttctgctttaccacttggtgccccaccacctgatactctaccacctggacccacccccgaggactctccttccctggagacaggttccaggcagagtgactacatggaggccctgctgcaggcacctggctcctccatggaggatccccttcctgggcctgggagtcccagccacagtgctccagaccctgatggacttccccatttcatggagactcctcttcagcccccacctccagtgcagcgagttatggacccaggcttcctggacgtgtcgggaatttctctcttggacaacagcaatgccagtgtgtggcccagcctgccctcttccacagaactgaccaccacagctgtctcaacctcagggccagaggacatctgctccagcagcagttctcatgagcggggtggtgaggctacatggtctgggtcagagtttgaggtctccttcctggacagcccaggtgcccaagcccaggcggaccacctgcctcagctgactcttcctgacagtctcacctctgcagcctcaccagaagatgggctgtccgccgagctgcttgaagctcaggctgaggaggaaccagcaagcacagagggcctagatactgggacggaggctgaggggctggacagccaggcccagatctctaccacagaataacaccctgggctgtgacaaggcccatgatgacatttcatgaggcccagatgtgggcaggcagcccgggctgcactatgcggtcaggattccttgctgctttggtgggacatgaggcctcagtgggtggtgagagggggccatgggccttgtgggaggatatcttttggccgtgtaccctcaggtccagtgcttggtcctgctctggtcactggggcttcccaggaggcagcagggtctggtcataatccagtgtgaagatgaggtgaggaaggaaggggttgctgtccagtgttggcctggtcgctttgattcttcctgcacagctcagcccaccccatctgtactggaagggaccctggagccctgggaccaccccctttcaagtcccaaacactgagtcctctgtcatgtgtccttgtccctaggctacaatgctacacttggctcaggctgatcaccatgctagtcacaggagggagagagaggcagtgtacttgcccccatctcctggagggaggtgcgttggaaattctaggcccttcagcagagacccatttgtgcccagaccacaatatttcttcttcctcagggactacatgccacagacctgtatccccagtggcaactcctgttagctcccaaacttaaacagtgatctcttctaaatatacaaggcatctacccagccccaatagtgaataaaagtcacaaatttaagttcaacaccctaagcaatttctcaaagccagtctacctgactaggtctatccacgcacggttcccaaccccaagggggaattaggggattagattaagagtaggtaaagacccttttgttctttcctgttgtaggggaggaagctgttctccccaccccaggtgcctttggaggttaaggctaggttaggccctgcactccacctggggacggcccctcatcacctgaagtcctctgctgtgttgactggaccctcagttcccacactgctaattactatgaaagctgctctggcctcgtcttctagcttgtgcctagttgaaagtctcacctttacaggatcatttgtaatgctggtgtacatgcagggaactcacaagctgtgtcaggtatgcaggacaaggaatgtctgctctggggggcacaggccaactatatggagggagggtcccaaattagcaaacccttcatttaaagcaaacccttgtcaagcctaccagagcagctgatacgtgtgcataacagtgaggcattgtgtcctggatcgtctgggagcccagtgtcaagtctgctggaatgcaggaagtagaacagaatcgccacaggactgttctggggccagcttcccttaactctgtagcctggcagtctgacccaaagttgccctcacccaaaggttctggctcttccctccctcacttttactttcccttcccccataagttggaggataaaatgggtatcaatgctaatatttccagggagaacatgaaaccagaggtttctttctttctctgtaatctgctatgaaagaaaataacaaatgaaaataaatgtgtactacactttgaaatatttt

SEQ ID NO: 11931 - protein, 258 aa, Homo sapiens
MFLAFGSLGCGIGYGYLHRIPTQPPSYHKKPPGTPPPSALPLGAPPPDTLPPGPTPEDSPSLETGSRQSDYMEALLQAPGSSMEDPLPGPGSPSHSAPDPDGLPHFMETPLQPPPPVQRVMDPGFLDVSGISLLDNSNASVWPSLPSSTELTTTAVSTSGPEDICSSSSSHERGGEATWSGSEFEVSFLDSPGAQAQADHLPQLTLPDSLTSAASPEDGLSAELLEAQAEEEPASTEGLDTGTEAEGLDSQAQISTTE

SEQ ID NO: 11932 - DNA, 2727 bp, Homo sapiens
  CDS (28)..(909)
aaaaaaaaaaaaaaaacttctacaagtatggagaaggcaaaaggcaaggagtggacctccacagagaagtcgagggaagaggatcagcaggcttctaatcaaccaaattcaattgctttgccaggaacatcagcaaagagaaccaaagaaaaaatgtctgtcaaaggcagtaaagtgctctgccctaagaaaaaggcagagcacactgacaaccccagacctcagaagaagataccaatccctccattaccttctaaactgccacctgttaatctgattcaccgggacattctgcgggcctggtgccaacaattgaagctgagctccaaaggccagaaattggatgcatataagcgcctgtgtgcctttgcctacccaaatcaaaaggattttcctagcacagcaaaagaggccaaaatccggaaatcattgcaaaaaaaattaaaggtggaaaagggggaaacgtccctgcaaagttctgagacacatcctcctgaagtggctcttcctcctgtgggggagccgcctgccctggaaaattccactgctctccttgagggagttaatacagttgtggtgacaacttctgccccagaggctttgctggcctcctgggcgagaatttcagccagggcgaggacaccagaggcagtggaatctccacaagaggcctctggtgtcaggtggtgtgtggtccatgggaaaagtctccctgcagacacagatggttgggttcacctgcagtttcatgctggtcaagcctgggttccagaaaagcaagaagggagagtgagtgcactcttcttgcttcctgcctccaattttccacccccgcaccttgaagacaatatgttgtgccccaaatgtgttcacaggaacaaggtcttaataaaaagcctccaatgggaatagaatatcaggaaaaaggccacatctatggtaattaatggcaaaaaagctggagagttggattctgcggtgctgctgacaggtgaactctggtcctctgcacctgtttatgggccatgcagactggtggggtggcagatgttagcctaagacccctagcagtgcctgttgctttgtgagtggagatagagactcttacatttaaaaatggaaaaacatttcacaaattaccataaattgtagttaatatgtagaaaaactcattcatactacttttctaaaatagacatgacttcagcagcagctttttttgttgtattttgagacagtgtctcactgttgcccaggctggagtgcagtggtgcaatctcagttcagtgcaatctccgcctcctgggttcaaatgattctcctgcctcagcctcttgagtagctaggtacaggcacctgccaccacacccagctaattttttgtatttttagtagagatggggtttcaccatgttggccaggttggtctcaaactcctggactcaagtgatcaccctcctcagcctcccaaaatgctgggactatgggcatgagcccctgcgcctgaccttcaacagctcttttaagtgagttcttcagctaagcattgtgatggacttgagtaaaatggtagttggctcttgtgctcaattttctcttcctctgaacactgactactttaggagctgcttcattccaattgcaatttcataaaacgtaaagtattttaaggcaaagaaaggctgttaattccctccctcccccaaacacatgatttttaatattctaaacaatatttttcaaagttctcttaataacctgagatttctatggtttgactccaggatcaaaacacaagggactttgtattatttcacttataattgttttgtatatttctggggtttaaaatgtttaaggttgcttcccgctcataaatacataatatattgaatttaaaatgtgtttattaaccgattctccataaataaaaataagatgtgtatgtaaaataattcatctgttgtatttagagaaccatattcattgcatgcaaatcttattgttagtgttcttaactcaagtaggagtaaaccaaaaagtgtgatttttcttttgtatgactcgtttgttctttattagttggtggtatgggttggatcatttgtttttaaaactacttaggtatgattcacatacaaaaagctgcacatatttaatgtatcctattgtgtaattaatttttaattttttttgtgtacttcctaaacttatagtcctgcgagtctgggaacagatctgtttttcacttatcctgatttaatgacagtttccaacattgttttgttattacaagtaggggatctttttttttgcccgtttaatgaagatactaaaaataatgcactggaaggagtggaagagttggaaaatttgtaaccatcataatacaggtgtaataggtttgggaaagaatcctcaaaaatgttaaagcaagggaggaaagtttgttgagaagcaagatgttcttctctcctgcccgcccccgccgttggttgttggtggtcagaattattgtgtaataaataatagacattttttcttatactatgtgtattgttccttttgtttcctttttaaacttctcccctgctttatttggatgggtcaagtttctgttctgtttccttcctttctattaatttggaaatgtccttggctttacgattctgcttgtagatacttcccctgtttctaacacatttcaataaacttaaatctctctat

SEQ ID NO: 11933 - protein, 294 aa, Homo sapiens
MEKAKGKEWTSTEKSREEDQQASNQPNSIALPGTSAKRTKEKMSVKGSKVLCPKKKAEHTDNPRPQKKIPIPPLPSKLPPVNLIHRDILRAWCQQLKLSSKGQKLDAYKRLCAFAYPNQKDFPSTAKEAKIRKSLQKKLKVEKGETSLQSSETHPPEVALPPVGEPPALENSTALLEGVNTVVVTTSAPEALLASWARISARARTPEAVESPQEASGVRWCVVHGKSLPADTDGWVHLQFHAGQAWVPEKQEGRVSALFLLPASNFPPPHLEDNMLCPKCVHRNKVLIKSLQWE

SEQ ID NO: 11934 - DNA, 3173 bp, Homo sapiens
  CDS (152)..(769)
tagcaaaaaactctccaagaagcgcgctgcgaccaccgtcttacaggagcttaaaaaacttccacctcttcctgtggtggaaaagccaaaactattttttaaaaaacgccctaaaacaatagtaaaggccggaccagaatatggccaagggatgaaccctattagccgcctggcgcaaattcaacaggccaaaaaggaaaaggagccggattatgttttgctttcagaaagaggaatgcctcgacgtcgagaatttgtgatgcaggtgaaggtaggcaatgaagttgctacaggaacaggacctaataaaaagatagccaaaaaaaatgctgcagaagcaatgctgttacaacttggttataaagcatccactaatcttcaggatcaacttgagaagacaggggaaaacaaaggatggagtggtccaaagcctgggtttcctgaaccaacaaataatactccaaaaggaattcttcatttgtctcctgatgtttatcaagagatggaagccagccgccacaaagtaatctctggcactactctaggctatttgtcacccaaagatatgaaccaaccttcaagctctttcttcagtatatctcccacatcgaatagttcagctacaattgccagggaactccttatgaatggaacatcttctacagctgaagccataggtttaaaaggaagttctcctactcccccttgttctccagtacaaccttcaaaacaactggaatatttagcaaggattcaaggctttcaggtgtgaattaaaagcaaaaacaaaaaacaaaacaattcattagcctcagattcttcatctgtatacatcacaaggctcattcttgcctgctagtatggcctacatgccacttacgttttaagttatttaggaacacaaaggacagacaaaaaagccatatgcacatgcctcattttctcttatttttgatctatctagtaattcttttgctgcctgtctcttctccattttccttcttcttttttaagcatttttcatattcttcactgtcttctatttggtcttgattaggtgcatctatctcttcgctctgtcttccacaaacaaaaattctgccttcagacatttggtgttagtatttcacactcagttctccctttttttacataaggattgagtttctttttatgatgattttacctttatagcaattttgaattttgcattctgttgctagtattgattcaggtacaccattaagatacaacattctagaagtctattaccttaggagttaattaaacatgatatttgaagaataatgaaatgctttatagttgtttgaggcataacaatgtgtatttgttttactggatcatgttttgaactgactagggagggtagcacctgcctcagatagtaccaacaattctgtttcactgggtagtctaaaactagcttatagtttaacttaacttgttgtgtatgtgaatttagggatggaaactttttttcccctatttattctttgtttccttctgggaaaaaaccccacaaaaatcagcactcctttatggatacattggagcttttgaaagaattgtaaactctaggaagggaaatatctgtgtcttgatttcttagttgccttgaaaatcatgtactgaactgtaaccgctaacttgactggatgaactagtttgcttgtgtgtagagagtgtattgcttcctcagatttcactgttttcatctccttttccatcttagtctttattccttaagaccaaaaactgtaatatcctttagaaatgctctagaagatctgtattgtgtagaatgatcatgtatttataaatattttacaagtttagattataaaatgaaaaagaaggtcatgtgttttggggggtattttgcatgttcggatttttttttcccttcaccgaacccttctgattctttcaaactattgccaggtagttgttagtgtttctaattggactcttaatatgaacttcaagaagctgttaccagttatcggctctgtcatctgaaattttaaccacttaatttaaagttacaattttagaatttgtttttgttgttttaccttaagaaacacaataaatcactgtttaaaaaagatctcaatttatataaagtactggaaaaaagctaagtaatttttagttctatctataatctccgtaggatgaattagaaataaattgtgatgaaaagaaattaactgcttatttatgaatctaatcatttagaaatgtctgagagtaacactgcattcttatagaaacaaagcacaaattgcattcaagctctgaattgattttttgcttggagctgttgttacagtagctgtaattttgctaccagaatgtcttaattttttaaatttgtttttatttctaagctcttggcaatgacaataattataattttaacatatcttcactgtagtcaacatgtagagtctgcttccctcattattgcattgctaaggcctttttaaaaagcttatgcttacataatatactcttttttatggacacgttatatgtttccaaatctgtgtattgtgatttttacatactaatgaatataaacaggtgattttaaaatattactgtgcttctttggttgaatgagctggtattgatgtaaaatactctgtcattgatggaccactacctgcagctaagcagtgagcagaatctccgggaaatgacttagtctggccacatgcatagcccatcttcataatgtcgcagcagaaggttctttgtggttaaaagttttaaagcctatttctttataggtaaccctctcaggtatatttacctggtagaaaaacatgtagattgtttctattacttaaatgttttaattggactgtagtttagaaattacaggaccagcttgttacagattatacactattctgttacttttatttctgaaacttaaaaacaataaattctttttctgtgtttctaggttagaacttttttattttattgcacactgaacagatactgttgcttattgaatattgtgtaaacccttctttggctttccttgcccattgcaatttgatttaagcctactagagccattgtatgtgacagctatattgtattacaaagtaaaaatatatgagtgtattgaaaac

SEQ ID NO: 11935 - protein, 206 aa, Homo sapiens
MNPISRLAQIQQAKKEKEPDYVLLSERGMPRRREFVMQVKVGNEVATGTGPNKKIAKKNAAEAMLLQLGYKASTNLQDQLEKTGENKGWSGPKPGFPEPTNNTPKGILHLSPDVYQEMEASRHKVISGTTLGYLSPKDMNQPSSSFFSISPTSNSSATIARELLMNGTSSTAEAIGLKGSSPTPPCSPVQPSKQLEYLARIQGFQV

SEQ ID NO: 11936 - DNA, 2580 bp, Homo sapiens
  CDS (149)..(2164)
caaaaaaaaaaaggacctaggcgcggtagctggggctggcttttgaggggcgcgggcagccttctgactgggtcggaggcctgcgggcccgaagcctctgtccctcctgttcttgtccggcgctgcttagcccctccgcgtagtcatcatggatctgattttaaaccgaatggattatctgcaggtgggagtaacatctcagaagactatgaagctaattcctgcctcaagacacagagctacacaaaaggtggttattggagatcatgatggggtagttatgtgctttggcatgaagaaaggagaagcagcagcagtgttcaagactttacccgggccgaagattgcaaggctggaactgggaggggttatcaacacacctcaggagaaaatttttattgctgcagcatctgagattagaggcttcacaaaaagaggaaaacagttcctctcctttgaaacaaacctcactgaaagcattaaagctatgcacatatctggctcagacctctttctcagtgcaagttacatctataaccattattgtgactgcaaagaccaacattattacctttctggggataaaatcaatgatgtgatctgccttccagtggaaagattatctcgtatcacacctgtattggcctgccaggacagagtgctcagagttttacagggatctgatgtgatgtatgcagttgaagttcctggaccccctactgtcttagcactacacaatggaaatggcggtgactctggagaagaccttttgtttgggacatcagacggaaaacttgcgcttatacagattactacatccaaaccagtacgcaagtgggaaattcaaaatgagaaaaagagaggaggtattttgtgtattgacagctttgacattgtgggtgatggggttaaagatttacttgttgggagagatgacggaatggtggaagtgtatagttttgataatgcaaatgaacctgttctacgatttgatcagatgttgtctgaaagcgtcacatctatccagggtggttgtgtaggaaaagacagctatgatgaaatcgtggtgtccacatattcaggctgggttacaggtctgacaacagagcccattcataaggaaagtggaccaggagaagaactaaaaattaatcaggagatgcagaataaaatttcttccttacggaatgagttggaacatttgcagtataaggtattgcaggaaagagagaattatcaacagtcttctcaatcaagcaaagcaaaatcagcagtaccttcctttggtataaatgataaatttacactaaataaagatgatgccagttacagccttatcttagaggtacagactgcaatagataatgtcttaatacagagtgatgttccaatagatttacttgatgtggataaaaattctgctgttgttagctttagcagctgtgattctgagtcaaacgacaacttccttcttgccacttatcggtgccaggcagatactacaaggctggaactcaagattcgctcaattgaaggccagtatggcacactactagcatatgtgactccaagaattcaacccaaaacctgtcaggtccgccagtaccacatcaaacctctttcactccatcaaagaactcactttattgatcatgacagacccatgaatacactgaccctaacaggccagttcagttttgctgaagttcactcctgggtggttttttgtctgcctgaagttccagaaaaacctccagcaggagaatgtgtgacattttactttcagaacacctttctagatacacaacttgaaagtacctacagaaaaggagagggagtttttaaatctgacaacatttctactatctccatcctaaaagatgtgctttctaaagaagctacaaaaaggaaaattaacctcaacatatcatacgagataaatgaagtatcagtcaaacacactttaaagctaatccacccaaagctggagtaccagttgcttttggctaagaaagtgcagttaattgatgctttaaaagaattacagattcatgagggaaatacgaactttctgataccagaatatcactgtattctagaagaggcagatcacctacaggaagaatacaaaaagcaacctgcacatcttgaaagactctatggttagtggaccattctagaataccttgccatatttcttttcaactggctatttcccaaggatcatgtaagagaagctgggcagaaagataaaaagattacatcagtcatgattcatgaaccagtcatgaatcagttgacaacaaatttattgcacagaatatttctgtattttgtcaagctacttttaatatttaattcttttacttgataaaatgcaagtatattaagaaataagtatactgtgatgaattaatctatatatatgaacaaacctggtataaaatgaatgtaatctatgaacctttagagcttagactgtatttcacacaaataattgtcatgttttgttgctattgtgaattataaaaatgcagcatttaaaatttttaaggcaaaatttaataaaggatatacagt

SEQ ID NO: 11937 - protein, 672 aa, Homo sapiens [sequence omitted]

SEQ ID NO: 11938 - DNA, 2902 bp, Homo sapiens
  CDS (62)..(730)
aattgcagcctgtcactctgcccacacgtctgcagccaagacgcagggtgggcacgtgtacatgtggggccagtgccggggtcagtccgtgatcctcccgcacctcacccacttctcctgcaccgacgacgtgtttgcctgctttgccactcccgccgtctcgtggcgcctcctgtctgtggagcatgaagactttttaacagttgcagagtcactgaagaaagaatttgatagtccagaaactgctgatctgaagtttcgaattgatggaaaatatattcatgtccataaagctgttttgaaaatcaggtgtgagcattttcgatccatgttccagtcgtattggaatgaagacatgaaggaagtgatagaaatcgatcagttttcttacccagtgtatcgtgcctttctccagtacctctacacagacacagtcgacctgccgccagaagatgctataggtcttctggatttggcgacatcttactgtgaaaacagactgaaaaaactttgtcagcacattatcaagagaggaattactgtggagaatgccttttcgctattctctgctgcagtcagatatgatgcagaggatttagaagaattctgctttaagttttgcatcaatcatttgacagaagttacacagactgcagcattttggcaaatggatggccctctgctaaaggaattcattgctaaagccagtaaatgtggagcctttaagaactgaagcgcaaggctgctgggttctgtgtgagtgctctggggcactgttgaggatgtgtccagtttgtgctctacgggtgatgtgattctgcaggtaaaagaccatcaggttgtttttttccacatctgggacacagttgtttgtgtaggaacataacaagggtgtacggcttttcttgagcccattttaaacaacccttgtttccagataagtgtattttaaatgtgacctttcgtaaatttgggctggaacatgtaaaagggtgaaagttagtcgttcttggtcttcttttcatttttgattagaggaacttctgaacttggaaaggggaagttggcagcaactctcctgggccacgtatcaacaatcttctgacagcaggagcagtgatagttggggaattgtgagatgaatggagaggccccatcgtgaattaaagatgctgacctggggattgttaagtgctgccttagttgctagtttagtagccttactgtgaaggaataattaagattgtttcagacttttgtttgtgtgcttgcgttgatgactttttttaacttcaagataaatcaaagtaataagtttaacgtatattaaacctgttgaaatgataattatgtaaagataaatattctaggttagtcaagatttctcttaagatttaagtgcataaagaatagtaatttagaagtatccgtgaaaagttgataatgaaagaaatttgatgaaggtgaatattttataaattagaatctccactacttatccaatggtgttttatttcattaaggtagaacttgagaactcaagtttaaattgtcccccaccaccttcttctataaatgcaaacttaagaggaaaataatgacatgtatagtatactcttgccttcctaaattatgactgctgaatcatcatatctactatatatgactggaagaagtggttcttcaagtcaaccctcttacaagacttagtggaatttgctttatctactttaggccaaatccatcacacattggcttatgtgaaactttatcatctttcacttttggttttcctctgtttttaaacatcttaggtataacagcacaatttcaccttgaaaaagcaccaaaattatggtgttcctgaaaagatcctattaaaagacagtagtttatttgaactggttatggaaggtgactttgggatgtaagagtgttcaactgtgagtttcatcatgtgtgtccgttgagcttgcttttaagagcaatgttttgctttgctctctggtccatgaactcatttccatttgagtgagttcccttagtgaattttgtctcctgcttggaaagtctctcttctgaacctggagcctgaatacattttcagagccaaattacaagtgggtgaagacatgctacaactactatttttagcaatgtttttaaatttgtgtctattggggtgggaaggggagtgaggccctaaagataggaattcactgatagctgaaatagatacaagcctaggagccccagcccccttttcttgaccatatcacaagtgattgaagcccagtgaattagtcggttagaattcgttctacaacatgatagaacttttcttactagcttcagaaatgcacattgatttgtgctatgatgggtggtgtttgtaacaatcactgttctataggcttatgatctgagcaaaatgtgaacttcagtatgtttactattgctcttacttgaaaactttttttcaaaaaaagcacaaattaaagtagtaaattcatatccatagatagttcattcattcaacaaatatttaccaagttcctaatataagtgaaggaccacttctcatattagattactaagtcatttgtatgaatatgtgtggcagtgaagagaacaggtctttcaaaaagcatttgattattttttttaaatacactctcttatttttctacttgtttttttgttaatcatagcaggatatgacaactcttatttgaattgattttttcatctaatgtaataatggaagccaaagtattcatatttcttaagatagccctaaatgtactcttgaacttcttactggaacaatgtttgatactctagtatgtaagctgtatttatgtaatatttagaacgacatgttaataaacaaagtaacatt

SEQ ID NO: 11939 - protein, 223 aa, Homo sapiens
MWGQCRGQSVILPHLTHFSCTDDVFACFATPAVSWRLLSVEHEDFLTVAESLKKEFDSPETADLKFRIDGKYIHVHKAVLKIRCEHFRSMFQSYWNEDMKEVIEIDQFSYPVYRAFLQYLYTDTVDLPPEDAIGLLDLATSYCENRLKKLCQHIIKRGITVENAFSLFSAAVRYDAEDLEEFCFKFCINHLTEVTQTAAFWQMDGPLLKEFIAKASKCGAFKN

SEQ ID NO: 11940 - DNA, 3179 bp, Homo sapiens
  CDS (1150)..(2634)
ttttctctgcttttcgctaccccggtcactctcatttctctcccctattccttgtctcttcccccatccccctttctcctgtcctccccctgcctctacagtggttctccccgctgagctgccaccagctgctgggccccgggctgctgcggctgggccgcctatggctgcggtccccctcccatacagccccggcccctggtctctggctgtcagggtttggcctccttcgtggtgaccacctcttcctgtgctcagcgccgggcccaggccccccagcccctgaggacatggtgcatctgcggcggctacaggagatcagtgtggtttctgcagctgacaccccagataagaaagagcatttggtcctggtggagacaggaaggaccctgtatctgcaaggagagggccggctggacttcacggcatggaacgcagccattgggggcgcggctggtgggggcggcacagggctgcaggagcagcagatgagccggggtgacatccccatcatcgtggatgcctgcatcagttttgttacccagcatgggctccggctggaaggtgtataccggaaagggggcgctcgtgcccgcagcctgagactcctggctgagttccgtcgggatgcccggtcggtgaagctccgaccaggggagcactttgtggaggatgtcactgacacactcaaacgcttctttcgtgagctcgatgaccctgtgacctctgcacggttgctgcctcgctggagggaggctgctggtattcctaagatccctgagagccaaggcccaaccaggatctctgccttcccccaccagaatccatggtttggcagccctccgccccatcacttcccaccctgggggatcatccagagacttggctcagggggaggtgggaagggggcagagacacatccatcctgcatttgtgcctaaaaatccctccctctgtaccagctgccactctttcttcccgggtcctccccaaccctcctccattccatccccagagctgccccagaagaatcagcgcctggagaaatataaagatgtgattggctgcctgccgcgggtcaaccgccgcacactggccaccctcattgggcatctctatcgggtgcagaaatgtgcggctctaaaccagatgtgcacgcggaacttggctctgctgtttgcacccagcgtgttccagacggatgggcgaggggagcacgaggtgcgagtgctgcaagagctcattgatggctacatctctgtctttgatatcgattctgaccaggtagctcagattgacttggaggtcagtcttatcaccacctggaaggacgtgcagctgtctcaggctggagacctcatcatggaagtttatatagagcagcagctcccagacaactgtgtcaccctgaaggtgtccccaaccctgactgctgaggagctgactaaccaggtactggagatgcgggggacagcagctgggatggacttgtgggtgacttttgagattcgcgagcatggggagctggagcggccactgcatcccaaggaaaaggtcttagagcaggctttacaatggtgccagctcccagagccctgctcagcttccctgctcttgaaaaaagtccccctggcccaagctggctgcctcttcacaggtatccgacgtgagagcccacgggtggggctgttgcggtgtcgtgaggagccacctcgcttgctgggaagccgcttccaggagaggttctttctgctgcgtggccgctgcctgctgctgctcaaggagaagaaaagctctaaaccagaacgggagtggcctttggaaggtgccaaggtctacctgggaatccgcaagaagttaaagcccccaacaccgtggggcttcacattgatactagagaagatgcacctctacttgtcctgcactgacgaggatgaaatgtgggattggaccaccagcatccttaaagcccagcacgatgaccagcagccagtggtcttacgacgccattcctcctctgaccttgcccgtcagaagtttggcactatgcctttgctgcctatccgtggggatgacagtggagccaccctcctctctgccaatcagaccctgcggcgactacacaaccggaggaccctgtccatgttctttccaatgaagtcatcccaggggtctgtggaggagcaagaggagctggaggagcctgtgtacgaggagccagtgtatgaggaagtaggggccttccctgagttgatccaggacacttctacctccttctccaccacacgggagtggacagtgaagccagagaaccccctcaccagccagaagtcattggatcaaccctttctctccaagtcaagcacccttggccaggaggagaggccacctgagccccctccaggccccccttcaaagagcagtccccaggcacgggggtccctagaggaacagctgctccaggagctcagcagcctcatcctgaggaaaggagagaccactgcaggcctgggaagtccttcccagccatccagcccccaatcccccagccccactggccttccaacacagacacctggcttccccacccaacccccatgcacttccagtccaccctccagccagcccctcacatgaccctaggaccagcagtctgagagggtaggtaccagaagacccagaaactcttatcgtggcactgttgcagcttcctctgccctggctggaaagactccagaatccagtgtggtgctgtggaaggagcactggactaaaggcttcagtggctgcgtgtcccaggacaggtcatggcccctctctgggcccagcccatttatctataccatgaggtaactgaagtaaggagagcagtgaatgtcaaactgtgtttcttagagccataagccccacatattatccctgaacaagggcagctcctgctttatatatttgatacgtaggggttccatgagagattttgggttttaaaggaatggttttactgcattaaagaaaaaaaatgctttggaaaccagaggcctgggtgatgttaaagtctatcctgtcccacttcctacattctgggactaccgtgaagcctggagtagggagagcgagtttgggagctgggactcggggagtcaaaaatagatgagtaattgtcaataaacctgggaacc

SEQ ID NO: 11941 - protein, 495 aa, Homo sapiens
MCTRNLALLFAPSVFQTDGRGEHEVRVLQELIDGYISVFDIDSDQVAQIDLEVSLITTWKDVQLSQAGDLIMEVYIEQQLPDNCVTLKVSPTLTAEELTNQVLEMRGTAAGMDLWVTFEIREHGELERPLHPKEKVLEQALQWCQLPEPCSASLLLKKVPLAQAGCLFTGIRRESPRVGLLRCREEPPRLLGSRFQERFFLLRGRCLLLLKEKKSSKPEREWPLEGAKVYLGIRKKLKPPTPWGFTLILEKMHLYLSCTDEDEMWDWTTSILKAQHDDQQPVVLRRHSSSDLARQKFGTMPLLPIRGDDSGATLLSANQTLRRLHNRRTLSMFFPMKSSQGSVEEQEELEEPVYEEPVYEEVGAFPELIQDTSTSFSTTREWTVKPENPLTSQKSLDQPFLSKSSTLGQEERPPEPPPGPPSKSSPQARGSLEEQLLQELSSLILRKGETTAGLGSPSQPSSPQSPSPTGLPTQTPGFPTQPPCTSSPPSSQPLT

SEQ ID NO: 11942 - DNA, 2789 bp, Homo sapiens
  CDS (133)..(1713)
agcgaggatgtgcgcagcgacttccagcgcagagtgccctacaactacctgcagcgggcctacatcaagcttaaccagctcgaaaaagcagtggaagcagctcacacatttttcgtggctaaccctgagcacatggaaatgcagcagaacattgagaattacagggcgacagctggtgttgaagcattgcagttggtagacagagaagccaagccacacatggagagttacaatgcaggagttaaacattatgaggctgatgactttgagatggctatcaggcatttcgaacaagccttaagagaatatttcgttgaagatacagaatgccggaccctatgtgaggggcctcagagatttgaagaatatgagtatttagggtataaggctggtctgtatgaagctattgcagatcactacatgcaggtgcttgtttgtcagcatgaatgtgtgagggaacttgccacccgccctggccgcctctctcccatcgagaattttcttcctctgcactatgattacctacagtttgcctactatcgagttggtgagtatgtgaaagccctggagtgtgccaaagcctatcttctatgccatccagatgatgaggatgtcctagacaatgtggattactatgagagtctgctggatgatagcattgacccggcatccattgaggccagagaggatttaacaatgttcgtgaaacgtcataagctggagtctgagctgataaaatcagctgcagaaggtctggggttttcatacactgaaccgaattattggatcagatatggaggacgacaggatgagaatcgggtcccttcaggagtgaacgtagagggagcagaagttcatggattctcaatgggaaaaaagctatcacccaagatagatcgagacctaagagaaggtggtcctctactctatgagaacatcacattcgtctacaactcggagcagctgaacgggactcagcgggttctcctggataacgtcctgtcggaagaacagtgccgggagctccacagcgtggccagtggaatcatgcttgttggtgatggatacagaggaaaaacttcaccccatacacccaatgaaaagtttgaaggtgcaactgtcctgaaagcactcaaatctggttatgaaggtcgagtcccactgaagagcgctcgtctgttttatgacatcagcgaaaaggctcgaaggattgtagaatcttattttatgctgaactcaactctgtatttttcctatacacacatggtctgccgaacagccctgtctggtcagcaggatagaagaaatgacctcagtcatcccatccatgctgacaactgtttgttggatccagaggccaacgaatgctggaaggagcctcctgcttacacatttcgagactatagtgctctcctatatatgaatgatgactttgaaggaggagaattcatattcacagagatggatgctaagactgtgactgcctctataaaaccaaaatgtgggcgcatgatcagcttctcatctggaggagagaaccctcatggggtgaaggcagtcaccaagggaaagaggtgtgctgtggctctgtggttcaccttggacccactttatagagaattggagcgaatacaggctgatgaagtgattgcaattctggatcaagaacagcaagggaagcatgaactgaatatcaaccctaaagatgagctataaaaatgagaaagaatgttctatcaaatatttatttaaattgttaatcttatgagaacctttttatttttgtacagagccatggtataaattaacaggttaatgtcagtcatcagatcttccttctcttcctaaggatgcttgtgttgcctcaatctatcaatctatctttcttgttttgggttgttttctctctctctctctctctctctcttcttagagacatggtctaaccatgttgtctaggatatagggcagtggctattcacagatgtgatgatagcacactggagcctcaaactcttaggctcaggcgatccttcaagcctcccggggagctgggaccacaggcacgtgccaccacacccagctctctttcttggtttttcatcatttcatgtatctatcaaagcccagttcacctcctcccccaaacacacacacacacacacacacacacacacacaattaagttgctgcaaattcaaaagcttagagagaataagcttcttggtggtgaaactacaactctcacgtgtgctccagttctaaaattaacctgtgcctggtctctgaagccctttcttgctctgtgcctttcagccacatccttaggtgctaacggccatgagctccgactctccaaagtgagctccactttgggtctgaggagcccctggcagagtccacgctgcctcaggtatcatgggcgtaatgatcacccaggctccgggagatctcatggatgattactgtatgagacagaggggacttcagtctttccagggccttggtggaatttttggctctggtgttttcgccagacaataaacttacactggaagctttgattcaccctccacagtactccagaaaggactgtcctataagttgtacactttaaaaggtcatgtagaggttgtagtagaatggcttttcaccctggtgactttggaagaaactcttgaatactgcctgcatccgggcaccatggccaggttgcctaggagtggggtccactgatgaaaagaggtgttttgtacttacataagaaaaataaatttctgattgatttt

SEQ ID NO: 11943 - protein, 527 aa, Homo sapiens
MEMQQNIENYRATAGVEALQLVDREAKPHMESYNAGVKHYEADDFEMAIRHFEQALREYFVEDTECRTLCEGPQRFEEYEYLGYKAGLYEAIADHYMQVLVCQHECVRELATRPGRLSPIENFLPLHYDYLQFAYYRVGEYVKALECAKAYLLCHPDDEDVLDNVDYYESLLDDSIDPASIEAREDLTMFVKRHKLESELIKSAAEGLGFSYTEPNYWIRYGGRQDENRVPSGVNVEGAEVHGFSMGKKLSPKIDRDLREGGPLLYENITFVYNSEQLNGTQRVLLDNVLSEEQCRELHSVASGIMLVGDGYRGKTSPHTPNEKFEGATVLKALKSGYEGRVPLKSARLFYDISEKARRIVESYFMLNSTLYFSYTHMVCRTALSGQQDRRNDLSHPIHADNCLLDPEANECWKEPPAYTFRDYSALLYMNDDFEGGEFIFTEMDAKTVTASIKPKCGRMISFSSGGENPHGVKAVTKGKRCAVALWFTLDPLYRELERIQADEVIAILDQEQQGKHELNINPKDEL

SEQ ID NO: 11944 - DNA, 3558 bp, Homo sapiens
  CDS (202)..(1728)
cataacaagccaaacgccagaccgagagtgcctccgtgcgcgagtgcccggtgtgtgcgcgccggcgagagcaggggcccgcccggctccccgcccgccgcggcccgaactcatgcagctccgagcgagcgagcggcgcccagcccagcgcctcggccgaacccctccgcagcaggctgcctgctgtttcccggggagatcatgaaacgaggtcgccttcccagcagcagtgaggattctgacgacaatggcagcctgtcaactacttggtcccagaattcccgatcccagcataggagaagctcctgctccagacatgaagatcgaaagccttcagaggtgtttaggacagacctgatcactgccatgaagttgcatgactcctaccagctgaatccggatgagtactatgtgttggcagatccctggagacaggaatgggagaaaggggtccaggtgcctgtgagcccggggaccatccctcagcctgtggccagggttgtgtctgaagagaaatccctcatgttcatcaggcccaagaagtacatcgtgtcatcaggctctgagcctcccgagttgggctatgtggacatccggacgctggctgacagcgtgtgtcgctatgacctcaatgacatggatgctgcatggctggaactgaccaatgaagaatttaaggagatgggaatgcctgaactagatgaatacaccatggagagggtcctagaggaatttgagcagcgatgctacgacaatatgaatcatgccatagagactgaggaaggcctggggatcgaatatgatgaagatgttgtctgtgatgtctgccagtctcctgatggtgaggacggcaatgagatggtgttctgtgacaaatgcaacatctgtgtgcaccaggcctgttatggaatcctcaaggtaccagagggcagctggctgtgccggacatgtgccctgggggttcagccaaaatgtctgctgtgtccgaagaagggtggagctatgaagcccacccgtagcggaaccaagtgggtccacgttagctgtgctctgtggatccctgaggtgagcattggcagcccagagaagatggagcccatcaccaaggtgtcacacattcccagcagccggtgggcgctagtgtgcagcctctgcaatgagaagtttggggcctctatacagtgctctgtgaagaactgccgcacagccttccatgtgacctgtgcttttgaccggggcctggagatgaagaccatcttagcagagaatgatgaagtcaagttcaagtcctattgcccaaagcacagctcacataggaaacccgaggagagtcttggcaagggggctgcacaggagaatggggcccctgagtgttccccccggaatccgctggagccctttgccagccttgagcagaaccgggaggaggcccaccgggtgagtgtccgtaagcagaagctgcagcagttggaggatgagttctacaccttcgtcaacctgctggatgttgccagggctctgcggctgcctgaggaagtagtggatttcctgtaccagtactggaagttgaagaggaaggtcaacttcaacaagcccctgatcaccccaaagaaagatgaagaggacaatctagccaagcgggagcaggatgtcttatttaggaggctgcagctgttcacgcacctgcggcaggacctggagagggtaatgattgacactgacaccttatagtgacttagagaagaagatgcaaagaggcgaacgctcgcccagagcaagaaatgatagccagtcatatactctcagacccttgtacacaccacagcatgaggttgtgttggttaaaaatatttatgggctggtaaactcattgtacatatgtgcaaaactgctactgagtggggagcttctttgtggttttttttttttaaaaacactttcccattaatctttactgttttgtaagatcaaatggggtgtgtcttccccacccccattccttcattctagagctagagtgaatgagccccaagaaaatgacccaaggagttgactcaggatggtttacagactgatttagaaaaccagaacggatttcatttctaatggagggggccagagatgggaaaatttcttgttcagtccggggaaacacacctaggtgctggtgatgggcttatgaaggaagctaagcacggctgctcactggcccccactttgtttcttgggtaattcacaggggaattcccagtactgtcatggagcagagcaggcagtgggtgctgatgtgtgtgcatgagctgtatgtacacatgcatatatctgttacagaagatactcctggcagtgaggtgctaagtcatcactgaggctgtgtgtgtgtgtgtgtgtgcgcgtgcccgtgtccatccatgtctctgttgtgtgtctgtgtgcgggtatgggtgggattcctggtggacaggggtgtcagatctgtctgaggagccccagtcatgctcagcacgctacagatgtgttgtttgtcacactgagattgctgaatgtcgtggctgttggctgccgagcctcagctgctggcatttccttctgctgtttgctgcttttgtgcctcccccactttccatcacctctggagtcccgtctggacgtcccttcctgctacaggaataatgaggcgtgggctgcctcccgctagggcctcctgctccctgtaggtagtttctggctgaggcttgctaattggggatgcttcttagagcatcttccacatcaactcccctggctgctggctaccgattaaattcattagtgtgaaagaggtgggagtgaggttttctggcctgaagcagtctgcactgaaaggtacccaagtggcctgaaacagtgtagggaaagacctgggaaacactggaccaaaaaagcctgatctcatggagacctgcatggccctgttagagatggcgtagaagtgaaagtcttaaagggagcattagagatccttttaatacacgactgagtgccagcttatttgtgatgccccttcccagaccaggttaggattcctgggaaggccgcggattccggccctggaagaggcaggatcctggagcagttttgtgaggcttttgtgctcccatacgccccctggtggtgagtgtaaagaagactttgcctctcacaactacatgtatgtgtggcatttttgttagagatgagaaaaggattgagaaggataaactggaatcctggtaagaagcctttatgccagcccgacacctgctgtaattggggtgcatgagctatggagtcagatagttgttgggagggggaggacaagaagtctattgtttggactgtgtttgtctcacaatcaccacaaaataaaagtgtagaaaatgcttgtggtgtactaactcttttctgtacttaagttactcagattaacatgcacttctaattctaaacattttttttggagtcatcactgtcgctgtttaagtagaacaatgccaacgatgtatgagaaacagggaataaatcaggatttgtgtgtgt

SEQ ID NO: 11945 - protein, 509 aa, Homo sapiens
MKRGRLPSSSEDSDDNGSLSTTWSQNSRSQHRRSSCSRHEDRKPSEVFRTDLITAMKLHDSYQLNPDEYYVLADPWRQEWEKGVQVPVSPGTIPQPVARVVSEEKSLMFIRPKKYIVSSGSEPPELGYVDIRTLADSVCRYDLNDMDAAWLELTNEEFKEMGMPELDEYTMERVLEEFEQRCYDNMNHAIETEEGLGIEYDEDVVCDVCQSPDGEDGNEMVFCDKCNICVHQACYGILKVPEGSWLCRTCALGVQPKCLLCPKKGGAMKPTRSGTKWVHVSCALWIPEVSIGSPEKMEPITKVSHIPSSRWALVCSLCNEKFGASIQCSVKNCRTAFHVTCAFDRGLEMKTILAENDEVKFKSYCPKHSSHRKPEESLGKGAAQENGAPECSPRNPLEPFASLEQNREEAHRVSVRKQKLQQLEDEFYTFVNLLDVARALRLPEEVVDFLYQYWKLKRKVNFNKPLITPKKDEEDNLAKREQDVLFRRLQLFTHLRQDLERVMIDTDTL

SEQ ID NO: 11946 - DNA, 3268 bp, Homo sapiens
  CDS (17)..(3268)
aatccaactcacctccatgttcaaggatgtccctctgactgcagaagaggtggaatttgtggtggaaaaagcattgagcatgttctccaagatgaatcttcaagaaataccacctttggtctatcagcttctggttctctcctccaagggaagcagaaagagtgttttggaaggaatcatagccttcttcagtgcactagataagcagcacaatgaggaacagagtggtgacgagctattggatgttgtcactgtgccatcaggtgaacttcgtcatgtggaaggcaccattattctacacattgtgtttgccatcaaattggactatgaactaggcagagaactcgtgaaacacttaaaggtaggacagcaaggagattccaataataacttaagtcccttcagcattgctcttcttctgtctgtaacaagaatacaaagatttcaggaccaggtgcttgatcttttaaagacttcggttgtaaagagctttaaggatcttcaactcctccaaggctcaaaatttcttcagaatctagttcctcatagatcttatgtttcaaccatgatcttggaagtagtgaagaatagcgttcatagctgggaccatgttactcagggcctcgtagaacttggtttcattttgatggattcatatgggccaaagaaggttcttgatggaaaaactattgaaaccagcccaagtctttctagaatgccaaaccagcatgcatgtaagctcggagctaatatcctgttggaaacttttaagatccatgagatgatcagacaagaaattttggagcaggtcctcaacagggttgttaccagagcatcttctcccatcagtcatttcttagacctgctttcaaatatcgtcatgtatgcacccttagttcttcaaagttgttcttctaaagtcacagaagcttttgactatttgtcctttctgccccttcagactgtacaaaggctgcttaaggcagtgcagccccttctcaaagtcagcatgtcaatgagagactgcttgatacttgtccttcggaaagctatgtttgccaaccagcttgatgcccgaaaatctgcagttgctgggtttttgctgctcctgaagaactttaaagttttaggcagcctgtcatcctctcagtgcagtcagtctctcagtgtcagtcaggttcatgtggatgttcacagccattacaattctgtcgccaatgaaactttttgccttgagatcatggatagtttgaggagatgcttaagccagcaagctgatgttcgactcacgctttatgaggggttttatgatgttcttcgaaggaactctcagctggctaattcagtcatgcaaactctgctctcacagttaaaacagttctatgagccaaaacctgatctgctgcctcctctgaaattagaagcttgtattctgacccaaggagataagatctctctacaagaaccactggattatctgctgtgttgtattcagcattgtttggcctggtataagaatacagtcatacccttacagcagggagaggaggaagaggaggaggaagaggcattctacgaagacctagatgatatattggagtccattactaatagaatgattaagagtgagctggaagactttgaactggataaatcagcagatttttctcagagcaccagtattggcataaaaaataatatctctgcttttcttgtgatgggagtttgtgaggttttaatagaatacaatttctccataagtagtttcagtaagaataggtttgaggacattctgagcttatttatgtgttacaaaaaactctctgacattcttaatgaaaaagcgggtaaagccaaaactaaaatggccaacaagacaagtgatagtcttttgtccatgaaatttgtgtccagtcttctcactgctcttttcagagtcttgctatggagatacacttcaattcctacttcagtggaagagtcgggaaagaaagagaaaggaaagagcatctcactgctgtgcttggagggtttacagaaaatattcagtgctgtgcaacagttctatcagcccaagattcagcagtttctcagagctctggatgtcacagataaggaaggagaagagagagaagatgcagatgtcagtgtcactcagagaacagcattccagatccggcaatttcagaggtccttgttgaatttacttagcagtcaagaggaagattttaatagcaaagaagccctcctgctagtcacggttcttaccagtttgtccaagttactggagccctcctctcctcagtttgtgcagatgttatcctggacatcaaagatttgcaaggaaaacagccgggaggatgccttgttttgcaagagcttgatgaacttgctcttcagcctgcatgtttcgtataagagtcctgtcattctgctgcgtgacttgtcccaggatatccacgggcatctgggagatatagaccaggatgtagaggtggagaaaacaaaccactttgcaatagtgaatttgagaacggctgcccccactgtctgtttacttgttctgagtcaggccgagaaggttctagaagaagtggactggctaatcaccaagcttaagggacaagtgagccaagaaaccttatcagaggcctcttctcaggcaaccctaccaaatcagcctgttgagaaagctatcatcatgcaactgggaactctgcttacatttttccacgagctggtgcagacagctctgccatcaggcagctgtgtggacaccttgttaaaggacttgtgcaaaatgtacaccacacttacagcccttgtcagatattatctccaggtgtgtcagagctccggaggaattccaaaaaatatggaaaagctggtgaagctgtctggttctcatctgacccccctgtgttattctttcatttcttacgtacagaataagagtaagagcctgaactatacgggagagaaaaaggagaaacctgctgccgttgccacagccatggccagagttcttcgggaaaccaagccaatccctaacctcatctttgccatagaacagtatgaaaaatttctcatccacctttctaagaagtccaaggtgaacctgatgcagcacatgaagctcagcacctcacgagacttcaagatcaaaggaaacatcctagacatggttcttcgagaggatggcgaagatgaaaatgaagagggcactgcatcagagcatgggggacagaacaaagaaccagccaagaag

SEQ ID NO: 11947 - protein, 1084 aa, Homo sapiens
MFKDVPLTAEEVEFVVEKALSMFSKMNLQEIPPLVYQLLVLSSKGSRKSVLEGIIAFFSALDKQHNEEQSGDELLDVVTVPSGELRHVEGTIILHIVFAIKLDYELGRELVKHLKVGQQGDSNNNLSPFSIALLLSVTRIQRFQDQVLDLLKTSVVKSFKDLQLLQGSKFLQNLVPHRSYVSTMILEVVKNSVHSWDHVTQGLVELGFILMDSYGPKKVLDGKTIETSPSLSRMPNQHACKLGANILLETFKIHEMIRQEILEQVLNRVVTRASSPISHFLDLLSNIVMYAPLVLQSCSSKVTEAFDYLSFLPLQTVQRLLKAVQPLLKVSMSMRDCLILVLRKAMFANQLDARKSAVAGFLLLLKNFKVLGSLSSSQCSQSLSVSQVHVDVHSHYNSVANETFCLEIMDSLRRCLSQQADVRLTLYEGFYDVLRRNSQLANSVMQTLLSQLKQFYEPKPDLLPPLKLEACILTQGDKISLQEPLDYLLCCIQHCLAWYKNTVIPLQQGEEEEEEEEAFYEDLDDILESITNRMIKSELEDFELDKSADFSQSTSIGIKNNISAFLVMGVCEVLIEYNFSISSFSKNRFEDILSLFMCYKKLSDILNEKAGKAKTKMANKTSDSLLSMKFVSSLLTALFRVLLWRYTSIPTSVEESGKKEKGKSISLLCLEGLQKIFSAVQQFYQPKIQQFLRALDVTDKEGEEREDADVSVTQRTAFQIRQFQRSLLNLLSSQEEDFNSKEALLLVTVLTSLSKLLEPSSPQFVQMLSWTSKICKENSREDALFCKSLMNLLFSLHVSYKSPVILLRDLSQDIHGHLGDIDQDVEVEKTNHFAIVNLRTAAPTVCLLVLSQAEKVLEEVDWLITKLKGQVSQETLSEASSQATLPNQPVEKAIIMQLGTLLTFFHELVQTALPSGSCVDTLLKDLCKMYTTLTALVRYYLQVCQSSGGIPKNMEKLVKLSGSHLTPLCYSFISYVQNKSKSLNYTGEKKEKPAAVATAMARVLRETKPIPNLIFAIEQYEKFLIHLSKKSKVNLMQHMKLSTSRDFKIKGNILDMVLREDGEDENEEGTASEHGGQNKEPAKK

SEQ ID NO: 11948 - DNA, 3591 bp, Homo sapiens
gctagaatgcactgtctttgaagcattgagcaggccctcaccagacaccaaatctgctggttcctggatcttggacttcccagcctcataactaggcatcacaaatctccgagaggaacgcatccacttcctggcctggtagagcggagagcagaggtgggcccaggagtccaagaacttcccctaaggctgctagtcgcacccatctcttgagcagagacccaagagggcaggacaggaagaatggaagtgagatttggccccggtcatgttttccaaagtgctgacatcaggaaaataatagaagttaacgcagatatggggctgccactgaggagagagaagactgaaagaagcatatagataaaagtttcagttacctgaggtcaaccttggtctgaaattagattatctgagtaggctgaaccatcggtgaaaaggaggccaagcatctcaaaaataggacacgtgagagtatggagccaatgtgacactcaggtgagttagccttatgatccctaagcatgcagtccttggaccagatgcatcaggatcttctggtaagtgtgctaaaatataggctactgagacccaccctatgtctgtcaaatcagaatattctaaggaagcaggtcccagggaatatatattttaaagctccctaaatacacttcatgggctgccagatttgggaatcgcaggattaggtagctacctaaatgaagacacttaaatgtgccaaaagcttctctttcacccatccatttatccatctattcacccatccatcaaccaaacatgtgccagtatctggtatttgcttcatgacctgctactgctgtggtgggtgcaaagataaatgatcaatgttctcaaagagtcaatagtctaagagaatggatgaatgaagtataaataataaaagatgtgctatgaagtacgatgggggtccagaaaagtatatacttattccagattgtggcagaagactctggagaggtttcgttttatataatggcatgaattccccttcagatccatctctaaatcaagcttcacctacttctgactgtttgtgttagataccaatcctatggatttctatagttttctggaattactttttacacactacagtagagttatgtggctgcttccatgttttacttagaagctgagagcttgataaaagtgaaggctgcatcttaatcatcaccttttcccccacctcctagctagggtctggctctgcctaagcagctgccattggtgctcaataaacattgaagaagttgggttgttgcactggttatgcaaagaaagggacacagtgggtgtaagcgtggggtggggagcaaagctgggaccaatcatggaacacctagaatttgaatcaaatttgggctttagtttttaggcaatgagcctaagacaattttggaagcatcctttgttcacaaaaaagttagaaatggtgagaactagggcagtctatcacaaagtgtgggagaggtaattttatatgtaaactattataaatcacatttgagttatgaagtgagacaattattccctttgcagtttcatttcattctgtctaattatttcagggagacattctgaattgggtgctagtattttaacacttctctaacactttctctttttaaattttgtttatttttaattgacaaataataattgtgtatatttatggggtacattgggcatggagggtgggttattctgtgatgtcttgacctgtgtgtacattgtaacacttctctaatactttctaatccagccatccccaacctttttggcaccaggaaccagttttgtggaagacgatttttccacagatggttgggggatgattttgggatggaactattccacctcagatcatcaggcattagattctcataagaagcatgcaacgtagatccctcacatatacagttcacaatagggttcatggttctatgagaatctaatgctgccactgatctaacaggaggcagagctcagctgataatgctttttcacctgctactgacttcctgctgtgttgcccagttcctaacgggccatagactggtaccagtccatagcctggggcttgaggacccctgctctatgatgtctatacaacaataaaattgcctaatgatacatttctcagaatgtatacccatcattaagtgacacatggctgcttgtgtatttttatatatagctaaatgtggctagattagatgtgatatctctttggatgcagggataggtgggcaagtttctaaaacacgaaactaactgtgtcttttctctgcttaagaaccttccatgactccctgttgttcataaccggataaattctaagctgcctaactcagaattctagcttagagatgtctacgcctggctgctcccaacagttagtctcatgtcctgtctcaaacatggggcttcagtaagaatgaaatttccaaggagaattttatattctgcatgcctttaaaggctcaagcctggagaccccccttcttgcctctcttacccttttcaccagggcaccctctattcatccttccagagccttctctgggaagtcctttcccaaagcccacttcccagcctaagcttagtgctatttctgtagatacccagaaacacatcaactatatgtacagtttaccctagtatgtcaaagttatagttactgccttaggagggattttgagcttttcatctttattactcgggcttctgctactgtgtcaagcaggtagttgacactcaacaaatgtttgtttagcctaactcagcagaacacatggagtgtgttcacatggagtaacctgattttgcttagtctgcaacatttcttgcatgcatcccctgcttgcagtctcaattacagtcatcctgtttcagttttcttaacttgtcactcccttcctctgataacttttgccatacctctgtataacatggcctactttttgaaaaagatttttttacattcacctacatttgtctcaaatttttttttaaaagaaactttgtattactaccgtcattgaaaaccttcatcacttggcacaaaagaaagtttaaaaaatacaacaaaagacattctactaaattctggctagacaaccttgcctgctctagtagatgcactgagaccattaatgaatctttcatcccaccttgtgtcatattctttgccacatgactttgggtctccctcactactaggcaagttcctgtctccatctcttgattctgaattcagccataatacttgctctccccaatgttgttttagcagatttgacacatacagaagcgtgaaaaactcttgtgtgactgggatagctcctctgcaatgagaacatgcctgggataatgtactgaaaagatgtgagaaatacatgaagcagagtccagtcatcccagccaagaaccagctgtgaatgtaaccgcatgactttgaggcaagtccagaccaagaacaaagaaccactggtcttaaagacagacctgcagattcctgagctaaataaaagtttattgttgaaaggc

SEQ ID NO: 11949 - DNA, 3017 bp, Homo sapiens
  CDS (220)..(2058)
ggaaatctagttcgggaaaagtgtgaggggctcttcacgtggggaaggaacagcaggcgcggaggagggggcaagcgtgtgtgagattcagtggtccatgcgtgcgtttgtcgtgtgctggtgattgggtgtggcaactcagaactgagtgagcaactgtatgatgtgggctatcgggatatagtgaacatcgacatcagtgaggttgtcatcaagcaaatgaaggaatgtaatgccacccgacggccccagatgagcttcttgaagatggacatgacgcagatggagtttcctgatgcctcgttccaggtggtgttggacaagggcaccctggatgctgtcctgacagatgaggaagagaagaccttacaacaggtggacaggatgctggctgaggttggccgtgtcctgcaggtgggcggtcgctatctctgcatctccctggctcaggctcacatcctgaagaaagcagtgggccacttctcccgggaggggtggatggtgagggtgcaccaagtggccaacagccaggaccaggtgttggaagcagagcctcagttctccttgcctgtctttgccttcatcatgaccaagttcaggccagtccctggctctgcccttcagatctttgagctgtgtgctcaggagcagcgcaagcctgtgcggctggagagtgccgagcggctggccgaggcggtgcaggagcgacagcagtatgcctggctgtgcagccagctgcgccgcaaggccaggctggggagtgtgtctctggacttgtgcgatggggacacgggggagccacgctacaccctccacgtggtggacagccccactgtgaaaccatcgcgggacaatcattttgcgattttcatcatccctcagggccgggagaccgagtggctctttggcatggatgagggccggaaacagctggcggccagtgctggcttcaggaggttgattacagtggcccttcaccgaggtcagcagtatgaaagcatggaccacatccaagctgagctgtcggctagagtcatggagctggccccagctgggatgcccacccagcagcaggtcccctttctgtctgtgggtggggacattggggtccggaccgttcagcaccaagactgcagccccttgagcggtgactatgtcattgaggatgtgcaaggggatgacaagcgatacttccgtcgactgatcttcctcagcaacaggaatgtggtgcagtccgaagccaggttgctgaaggatgtgtctcacaaagcccagaagaagcggaaaaaggacaggaagaagcagcggcctgctgatgcggaggacctccctgcagccccggggcagtccattgataagagttacctgtgttgtgaacaccacaaagccatgatcgctggccttgccctgctgagaaacccagagctactcctagagatcccactggcattgttggtggtaggcctgggcgggggcagcctccccctctttgtccacgatcaatttccaaagtcctgcattgatgctgtggagatcgatccctccatgttggaagtggccacccagtggtttggcttctcccagagtgaccgaatgaaggtccacattgcagatggcctggactatatcgccagcttggcaggaggaggagaagcacggccttgctacgatgtcataatgtttgatgttgacagtaaggacccaacactgggaatgagttgtccgcccccagcatttgtggagcaatcttttctacagaaggttaaaagcatcttgactcctgaaggtgtttttattctcaaccttgtgtgccgagacttggggctaaaagactcagtgctggctgggctcaaggcagtgttccccctcctatatgtccggcgaattgagggtgaagtgaatgagatcctgttctgtcagctgcaccctgagcaaaaacttgccacaccagagctcctagaaacagcccaggctttggagcggaccctgaggaagcctgggaggggttgggatgacacgtatgtcttgtcagatatgctcaagacggtgaaaattgtgtgactgcttaggccaagcagccctcctgcctagactgaccttggactcccagcctgccagagaatgaagaaatacaacgcacagtacttttgaagcttcgtatttttcttggtttcacactcagctacatgtgacctccagcttggtgaggttgcctgaagattagggaaaataaaaatgtccttcccatcttgtcctcttcagtaccacttgggttggtttgtctttgcttcctacaccacgtccttgagtggagttccctgctgaagcccctagcacacactgcatgccttaacaagtgtgtgcaagcccctcagaactcaagacatccaaattttattgcgtctctacttatactggtttgcttttgatttattcctctattagttctataggagtgatctcaagtgagatagcagagcaagatgccaaaagaccataaatagagtaaggtttctatagatgtgagacagatttgagagagcatttactctgtctccctgtggatgaaactgctgctgaaatggttccaatttttaggaatctgcttacccacttcattatttgacagctttccttggtgacccaaaccttgtagcctaagccatttgtctttttctcagtggagggagtgtatggacctggccccatggctttgcatgttagagacctggcagactaaagtctctagtgtttgtttgctcacatttgctgagtgacagctatgtgccagactgcataaagggtggtggcagaagtgaaaatgtttaagaatgaccaaaaacattagtaatgaaagttaatgtgttccaggcattcttctaagtggtttacatgcactgtctcatttaatctgagataaaggatacttaagcccaaactatatctaaacccaaatctcacttggctggaaacatcaatcttaaccatttattcagaaccattaaaccaatgattcc

SEQ ID NO: 11950 - protein, 613 aa, Homo sapiens [sequence omitted]

SEQ ID NO: 11951 - DNA, 2783 bp, Homo sapiens
  CDS (17)..(676)
atctttaacatttgggatgctgccccacgccgcctgccactcctgctcagaagacagtggctctgacgtctccagcatctcccaccccacttcgccgggcagcagcagccccgacatctcctttctgcagcctctctcccctcccaagacccatcgtcaccgcggggcctgggtcccagccggcagcagagagctggtcgcccaccaccccaagctactgctgccgcctggctatttcccggcggggcggtacgtggtggtggctgagagccccctgccgcctggcgagtgggagctgcgccgcgcagccccgggccctgcttacgaggaggagggcactcccctgcgctaccagcgtctggtgccctcccgcagccgcatcgtgcggacgccctccctgaaggacagcccggcaggccgggggctcagcaaggccgccgtgtccgaggagctcaagtggtggcacgagcgtgcacgcctccggagcacccgcccccactcactggaccgccaaggagctttccgggtcaggagcctgccccttgggagagagggcttcggacgagccctgggaccccgggcacaggtgcccacagtttgtgtgctgcggagatcgcctgatggggcccctgtgcaagtctttgtacctgaaaaaggagagatcatcagccaggtgtaactctgcgccccacgctggaaaaaactgtttcatagaggggctgggctgagacccccccacccctgagtgcctctttcagctcccccatccccatcgcaggccgatgacctggagctgagaccttttattattttttttttacacgacttttttcagaagccctgacctaaggatttatatatgtggattgtcctcaatacccctgtgatatgattatgttttatcccccagagtttggcctactggacttaaggccttgcctgtctgactgacagcctctatctccttatataagacaagtggcaggggacgagtgaagcagagtgagccaccttgggagttctccaacgctctgtgctctggttctaagaaattccctggggaactgcccctggccctcctgtcccactattgctggaggctggacatggtacatactcatgcacatgactctcccccatttcccaggtctctgggtaccccagcctgggctgggggagaatctcttcccccttttctaatgtgctctgtgatgcacacaccaagtggtaggtcaaaggtcagtatatcccggtggtgtattgtcttgctagaccctgctattttcctgaccccctaaatcctctttagggacccagtcactataccctgtctatgccctgtgggctcccagacccctgagctttgagtcagtggcatcacagtttgtagcctcagggggtctggctgggggctggtccatgcttgtggttagtggacagcagccaccctttgacagctacctctgggcatctcaagggcttgcagccccactgctccttctaacattttgtttgtttttgagatggagtctcgctctgtcgcccaggctggaatgctgtagcaagatttcggctcactgcaacccccgtctcccgggttcaagcgaatctcctgcctcagccttccgagtagctgggattacaggcaagcaccaccatgcctgctaattttttatttttagtagagatggggtttcatcatgttggccaggctggtctcgaactcctgacctcaagtgatccacctgccttggcctttcaaagtgctgggattacaggcatgagccaccgcacctggcccttctaacgttttttcatcatagtcccaaaaaccaatactttacaagtggttttggaaaggcaccacttttgtggcatgttctggttgggagagggagtcacagttcctactccccccaccagctatgcttctgctctgagaaggtggttatttatacaaacatggacatactcactcccaagggctgatgagatgctgaattttctttgggggcattcattaattgtcccagctgcagcgactggagcaagtctggaagctgcctgtgctaagaccacccagctgtccctgggttctcatcctagggccttctttgcttccaggtcaggggacctgcttcaatgagaaagcaactgaattgaggctaggagaggtagggagagctgagttctgacttcacctgtgcagaactctctgcccccatgttacctggactggaacagactgtgaatatagcagaaggttccaagaactctggtgtctgacctagaagaggcacagttctctctactggaaagaaaacgatgtagccgattgcacaagggtgccaagggaagacccaggatggcccatcaaaggaacctgggggaggatgcaggaggctgaagggatgcacctggcatttctctcactgtgctcttaccgcatcagcaacccccaacttttgggcctactctgccccccatgcgtgaataccctgcttggatgctgtgcttttccggtttgtctctaagcccctttctccagggcatgttggtttccctggcctctcagtgtcctaactggagcccagagtgccttgttctgagccaggagacggctgagcactggccctccacacctaagcgtcctttacattaacttattggtcttgtataacacctggtgccattgccaagtggctgtgtcctcagctacagagctggaattgtgtggggtttagtgctaaatacttcaataaagtctgttttttgtgattggc

SEQ ID NO: 11952 - protein, 220 aa, Homo sapiens [sequence omitted]

SEQ ID NO: 11953 - DNA, 2802 bp, Homo sapiens
  CDS (230)..(1258)
tttctatgacccagagggtgggtccatcactcaagtagccagagttgtcatcgagagaatcgcacggaagggtgaacaatgcaatattgtacctgacaatgtcgatgatattgtagctgacctggctccagaagagaaagatgaagatgacacccctgaaacctgcatctactccaactggtccccatggtccgcctgcagctcctccacctgtgacaaaggcaagaggatgcgacagcgcatgctgaaagcacagctggacctcagcgtcccctgccctgacacccaggacttccagccctgcatgggccctggctgcagtgacgaagacggctccacctgcaccatgtccgagtggatcacctggtcgccctgcagcatctcctgcggcatgggcatgaggtcccgggagaggtatgtgaagcagttcccggaggacggctccgtgtgcacgctgcccactgaggaaacggagaagtgcacggtcaacgaggagtgctctcccagcagctgcctgatgaccgagtggggcgagtgggacgagtgcagcgccacctgcggcatgggcatgaagaagcggcaccgcatgatcaagatgaaccccgcagatggctccatgtgcaaagccgagacatcacaggcagagaagtgcatgatgccagagtgccacaccatcccatgcttgctgtccccatggtccgagtggagtgactgcagcgtgacctgcgggaagggcatgcgaacccgacagcggatgctcaagtctctggcagaacttggagactgcaatgaggatctggagcaggtggagaagtgcatgctccctgaatgccccattgactgtgagctcaccgagtggtcccagtggtcggaatgtaacaagtcatgtgggaaaggccacgtgattcgaacccggatgatccaaatggagcctcagtttggaggtgcaccctgcccagagactgtgcagcgaaaaaagtgccgcatccgaaaatgccttcgaaatccatccatccaaaagctacgctggagggatgcccgagagagccggcggagtgagcagctgaaggaagagtctgaaggggagcagttcccaggttgtaggatgcgcccatggacggcctggtcagaatgcaccaaactgtgcggaggtggaattcaggaacgttacatgactgtaaagaagagattcaaaagctcccagtttaccagctgcaaagacaagaaggagatcagagcatgcaatgttcatccttgttagcaagggtacgagttccccagggctgcactctagattccagagtcaccaatggctggattatttgcttgtttaagacaatttaaattgtgtacgctagttttcatttttgcagtgtggttcgcccagtagtcttgtggatgccagagacatcctttctgaatacttcttgatgggtacaggctgagtggggcgccctcacctccagccagcctcttcctgcagaggagtagtgtcagccaccttgtactaagctgaaacatgtccctctggagcttccacctggccagggaggacggagactttgacctactccacatggagaggcaaccatgtctggaagtgactatgcctgagtcccagggtgcggcaggtaggaaacattcacagatgaagacagcagattccccacattctcatctttggcctgttcaatgaaaccattgtttgcccatctcttcttagtggaactttaggtctcttttcaagtctcctcagtcatcaatagttcctggggaaaaacagagctggtagacttgaagaggagcattgatgttgggtggcttttgttctttcactgagaaattcggaatacatttgtctcacccctgatattggttcctgatgcccccccaacaaaaataaataaataaattatggctgctttatttaaatataaggtagctagtttttacacctgagataaataataagcttagagtgtatttttcccttgcttttgggggttcagaggagtatgtacaattcttctgggaagccagccttctgaactttttggtactaaatccttattggaaccaagacaaaggaagcaaaattggtctctttagagaccaatttgcctaaattttaaaatcttcctacacacatctagacgttcaagtttgcaaatcagtttttagcaagaaaacatttttgctatacaaacattttgctaagtctgcccaaagcccccccaatgcattccttcaacaaaatacaatctctgtactttaaagttattttagtcatgaaattttatatgcagagagaaaaagttaccgagacagaaaacaaatctaagggaaaggaatattatgggattaagctgagcaagcaattctggtggaaagtcaaacctgtcagtgctccacaccagggctgtggtcctcccagacatgcataggaatggccacaggtttacactgccttcccagcaattataagcacaccagattcagggagactgaccaccaagggatagtgtaaaaggacattttctcagttgggtccatcagcagtttttcttcctgcatttattgttgaaaactattgtttcatttcttcttttataggccttattactgcttaatccaaatgtgtaccattggtgagacacatacaatgctctgaatacactacgaatttgtattaaacacatcagaatatttccaaatacaacatagtatagtcctgaatatgtacttttaacacaagagagactattcaataaaaactcactgggtttttcatgtctttaagct

SEQ ID NO: 11954 - protein, 343 aa, Homo sapiens [sequence omitted]

SEQ ID NO: 11955 - DNA, 2733 bp, Homo sapiens
  CDS (7)..(2400)
gatgatatgagtaatgctggtgattttctaaatgacaatgcagttgagatcccttctttttcaaaagggattataaatgatgatgaggatgatgaagacctcatgatggcttcaggtcgtcctagacagcgaagtcacatcctagaagatgatgaaaactcagttgatatctcaatgctaaaaactggttctagtcttctcaaagaggaggaggaagatggtcaagaaggcagcattcacaatctaccacttgtaacatcccaaaggccattttatgatggacccatgccaactccccggcaaaagccatttcagtcaggttctacaccgttgcatctcactcacagattcatggtgtggaactctattggaattattcgctgctataatgatgagcaagacaatgccatagatgtggagttccatgatacctccatacaccatgcaacacacttatcaaacactttgaattatacaatagcagatctttcccacgaagctattttgttggcatgtgaaagcactgatgaactagcaagcaagcttcactgcctgcactttagttcttgggattcaagcaaagagtggataatagacttgcctcagaatgaggatattgaagccatatgtctcggtcaaggatgggctgctgccgctactagtgccctgcttcttcgattgtttactattggaggggttcaaaaagaggtattcagccttgctggacctgtggtgtcaatggcaggacatggagaacagcttttcattgtttatcacagaggtacgggatttgatggggatcagtgccttggagttcaactgctagagctggggaaaaagaaaaaacaaattttgcatggtgaccctcttcctcttacaaggaaatcctaccttgcatggattgggttttcagctgaaggtaccccttgttacgtggattcagaaggaattgttcgaatgcttaacagaggacttggtaatacgtggactcctatatgtaatacaagagagcactgcaaaggaaaatctgatcactactgggtggttggtatccatgaaaatccccagcaactaaggtgcattccttgtaaaggttctcggtttcccccaacccttccacgccctgctgttgctatattatcctttaagcttccttactgtcagattgcaacagagaaaggacaaatggaggagcaattttggcgttcagttatatttcacaaccaccttgattatttagctaaaaatggttatgaatatgaagagagcactaaaaatcaagcaacaaaagagcaacaggaacttttaatgaaaatgcttgcgctttcttgtaaactggagcgagaattccgttgtgtggaacttgctgatctaatgactcaaaatgctgtgaatttagccattaaatatgcttctcgctctcggaaattaatactggctcaaaaactaagtgaactggctgtagagaaggcagccgaattgacagcaacccaggtggaagaggaagaagaagaagaagatttcagaaaaaagctgaatgctggttacagcaatactgctacagagtggagccaaccaaggttcagaaatcaagttgaagaagatgctgaggacagtggagaagctgatgatgaagaaaaaccagaaatacataagcctggacagaactcgttttccaaaagtacaaattcctctgatgtttcagctaagtcaggtgcagttacctttagcagccaaggacgagtaaatccctttaaggtatcagccagttccaaagaaccagccatgtcaatgaattcagcacgttcaactaatattttagacaatatgggcaaatcatccaagaaatccactgcacttagtcgaactacaaataatgaaaagtctcccattataaagcctctgattccaaagccgaagcctaagcaggcatctgcagcatcctatttccagaaaagaaattctcaaactaataaaactgaggaagtgaaagaagaaaatcttaaaaatgtattatctgaaaccccagctatatgtcctcctcaaaacactgaaaaccaaaggccaaagaccgggttccagatgtggttagaagaaaatagaagtaatattttgtctgacaatcctgacttttcagatgaagcagacataataaaagaaggaatgattcgatttagagtattgtcaactgaagaaagaaaggtgtgggctaacaaagccaaaggagaaacggcaagtgaaggaactgaagcaaagaagcgaaaacgtgtggttgatgaaagtgatgaaacagaaaaccaggaagaaaaagcaaaaaagaacctgaatttgtctaaaaagcagaaacctttagatttttctacaaatcagaaactatcagcttttgcatttaagcaggagtaaaggaagaaagtgaccctagggaagtaatggatttttttttactcatctttgaatatagactcgagtctttgggaaactcattatatatatattttttaaagagtttgaagcaactgtttgtctttataagataatgtagtaattatattggtgtaggtaacaggacatatgtaaaaactatcatctttgcagattactctgcctccaaatgcagggcctttcagagatgcattgtgattgtaattactgagttgaagctccaaccaatttgaatttgtttcttaaccttgaaaaatcattaaagccaaggtattaaaacctttgtgcatc

SEQ ID NO: 11956 - protein, 798 aa, Homo sapiens [sequence omitted]

SEQ ID NO: 11957 - DNA, 3598 bp, Homo sapiens
  CDS (197)..(1675)
aaaagggcagctccgggggaaagagggtggcgtcccggggaagcccgcagccgccgccgatgtcgctgggactcggaagtgccgaaagaggggtgttgggaactcgcggcgcgcgtgaacgttgccgtcgccgccgcccgggacagcccggagaaactctcagcgtaggcatcgggaaccttcgtgccaaggagccatgccgccccgatgggaactggcactttacctacttgcctcactaggcttccacttctattccttctatgaagtttacaaagtctccagagaacacgaagaggagctggaccaggaatttgagctggagactgacactttatttggaggattaaagaaggatgcgaccgactttgagtggagcttctggatggaatgggggaagcagtggctggtgtggcttctccttggccacatggtagtgtctcaaatggccacactgctggcaagaaagcacagaccctggattctcatgctctatgggatgtgggcctgctggtgtgtgctggggacccctggtgtggctatggttttgctccataccaccatctctttctgcgtggcccagttccggtctcagctcctgacgtggctctgttctctcctcctcctctccacactgaggctgcagggtgtggaagaagttaagagaaggtggtacaagacagaaaacgagtactacctgctgcagttcacgctgaccgttcgctgcctctactacaccagcttcagcctggagctctgctggcagcagctgcctgctgcatcgacctcctactcctttccctggatgctggcctatgtcttttattatccagtcttacacaatgggcccatcctcagcttctcggagttcatcaaacagatgcagcagcaggagcatgactccctgaaggccagcctgtgtgtcctggccctggggctgggccgccttctttgctggtggtggctggccgagctgatggctcacctgatgtacatgcatgccatctacagcagcatccccctcctggagactgtctcttgttggaccttaggaggactggcgttagcccaggtgctctttttctacgtgaagtacttggtgctctttggcgtgcctgctctgctcatgcgcctggatggactcactccacccgccctcccccgctgcgtgagcaccatgttcagtttcaccgggatgtggaggtattttgatgttggactgcataatttcttaatcaggtatgtgtacattccagtgggcgggtcccagcatggcctgctggggacactgttttccacggcgatgacatttgcatttgtgagctactggcatggcggctacgactacctctggtgctgggcagcgctcaactggctgggagtcactgtggagaatggagtccggaggctggtggagactccctgcatccaggacagtctggcccgatacttctccccacaagctcgccgtcgattccacgctgcccttgcttcttgttccacctcgatgctgatcctgtccaacctggtatttcttgggggcgatgaggttgggaaaacctactggaataggatcttcatacaaggctggccttgggtgaccctctctgtcctgggattcctgtactgctactcccacgtgggcattgcctgggcccagacctacgccacggactaatgctgttgggcccaggccagtcattgttgctggcctccaaggcaaatagtgcttcaccctgacctctcactccaggacagcctctaagggatttgatctgctcatcttcagttgaatgccctcactccaagactggatgctggatctcatagaaaattcacagccagacaatcttctaatctggagtctttgagatcttctaccccaactcatcattttcctattgaggaaacgggtccagggcagtcgtgtgtcttacccagctacacagggtgacattttggtctagaacctagtctcatgagccctttgcattctttccccttaagcaagaatagaatgtagtggaaatttattgattgagacacagaaatcctgattagtgataggcctgtcttctgggcaatatttctaaaatatttgagtgacattgatgtttaagtgacctccttcatcacatcctgcagtatctccagaagcagcactagggtttgagtttcatgcttcagcccctctgtaggaatgagaccaagccacagctgtcttttgaattacgtagtcgaagaagacggtagcagccctgtagcattctaaggcatctatacccaaggagtcctgtgatttgagcttcagcagggtgatctacatttgggtgcttgtttctgagatttgcagagaagtataacatggtagttcctctaccttacagttaatcgtttcttaataaagaagcagaatttagaaaccacaggatagtgtacccacagatgggtgttatcaaggccagtcatgaggatggtgtcctggagtcttgtccaccctctccatacaagtctcaaaagtcatcctcctactcagtgattcacgtttagtggtttatattattaaggtttgattcaaacagagccttttctgtcctgtagataatctacatgtttgtagaattattttgaatatgtttgaggaaaatgtttaaaatctaaatatactcacataacttgattattcactcctctgaaaagatgctggataggctaccaaagttcccaagtggtagataattcagaagacttgtttgaatttggatttttttttttttttttggagtggggaagggtataaaggaggcttaaaatttgaatccataatatatctaattacaggagaatttacaacatctcaagtacgtaaattaagttgtcattgagtgaaaggttcacttggacctagtgctgcctcctgtttattacatagcatggcccttatgtcttgagttgaggttatcatctcaatgaggcttaagctcctagagtacaggaccattttgttgattgtctttcttcatagcttctctgcttggcaaagagatgggagggggccagatactgactacctggggtaggcacattgtgtgttaaagcaagacagaggccagagaggggcaggtagacctgcatagcagcagcctcagcagctgtcttggtaaaggagagagagagacatggggccagtaattccggggtgctcagaagttttaggagggaatgagcctcagggaggagtgagcacctaaatgaacgcagtaaaccttcatggaccaacagtgattgaggatttgtgggcagccagagggagtctgactgaagtttacttggaaagaaagggcttgctaagaaaaaagggagtaaaaatgatgatagggaagtgtctaatgtatgtgcacatataagtaatacaaaagttttgagctcttccaagtataccatttatatacaaacaaataggtttattcattcattaaactactttggaagcgtcagtggatatatttgaaagtggtaatcctgaatctcttttaaactattatatgattcataatggttctcaggaattaataaatgattactgtgtttagctctg

SEQ ID NO: 11958 - protein, 493 aa, Homo sapiens
MPPRWELALYLLASLGFHFYSFYEVYKVSREHEEELDQEFELETDTLFGGLKKDATDFEWSFWMEWGKQWLVWLLLGHMVVSQMATLLARKHRPWILMLYGMWACWCVLGTPGVAMVLLHTTISFCVAQFRSQLLTWLCSLLLLSTLRLQGVEEVKRRWYKTENEYYLLQFTLTVRCLYYTSFSLELCWQQLPAASTSYSFPWMLAYVFYYPVLHNGPILSFSEFIKQMQQQEHDSLKASLCVLALGLGRLLCWWWLAELMAHLMYMHAIYSSIPLLETVSCWTLGGLALAQVLFFYVKYLVLFGVPALLMRLDGLTPPALPRCVSTMFSFTGMWRYFDVGLHNFLIRYVYIPVGGSQHGLLGTLFSTAMTFAFVSYWHGGYDYLWCWAALNWLGVTVENGVRRLVETPCIQDSLARYFSPQARRRFHAALASCSTSMLILSNLVFLGGDEVGKTYWNRIFIQGWPWVTLSVLGFLYCYSHVGIAWAQTYATD

SEQ ID NO: 11959 - DNA, 3522 bp, Homo sapiens
  CDS (140)..(2029)
tccaaagaactctgctttaaaacaagatgtgaagcgaacatttggatcaacctcacaatcaagtagtttttcaaaaattcataagcggccacacagaatacagaaagctcggaaaagcattgcccaatcaggtgtaaacatgtgcaatcaaaacagctctcctcataagaatgttacaattaaaagcagcgttgaccaaaaacctaagtatttccatcaagcagcaaaagaaaagtctaatgccaaggcaaatagccactatttgtatagacacaaatatgaaaactataggatgatcaaaaaatcaggtgaatcatatcctgtgcatttcaaaaaagaagaagctagttcattaaattctttacacctgttttcatcatcaagtaattctcacaacaattttatttcagaccctcataagcctgacgccaaaaggcctgaaagcttcaaagatcacagacgtgtagctgtaaagagagtaattaaggaatctaagaaggaaagttctgttggaggggaagacttggatagctatccagattttttgcataaaatgactgttgtcgttttgcaaaaacttaattctgctgaaaagaaagatagttatgaaacagaagatgaaagttcctgggataatgttgagttaggagactacactacacaggccatagaagatgaaacctatagtgatattaatcaagagcatgtaaatttattccctttatttaagagcaaagtggaaggtcaggagcctggagaaaatgctactcttagttatgaccaaaacgatggcttttattttgaatactatgaagatactggaagtaacaactttttgcatgagatacatgatcctcagcatttagaaactgcagatgcttcattgtcaaagcatagttctgtttttcattggactgatttgtctcttgagaagaaatcgtgtccttactgcccagcaacatttgaaacaggtgttgggttatcaaatcatgtcagggggcatcttcacagagcaggattaagctatgaagcccgtcatgttgtatcaccagaacaaatagccacaagtgacaaaatgcagcatttcaaaagaactggcacaggaacacctgttaaacgagttagaaaagctatagagaagtctgaaaccacttctgaacacacttgtcagctctgtggtggttggtttgatactaaaattggattatcaaatcatgttagaggccacttgaaaagacttggaaagacgaaatgggatgctcacaaatctccaatctgtgttctgaatgagatgatgcaaaatgaagaaaaatatgaaaaaatcttaaaggcattgaacagtcgtcgtattattcccagaccatttgtagctcaaaaacttgcatcaagtgatgactttatatctcaaaatgttatacctcttgaagcataccgtaatggcctaaagactgaagctctgtcagtgtctgcatcagaagaagaagggctgaatttcttaaatgaatatgatgaaacaaaaccagaactgcccagtgggaaaaagaatcagtctcttacactcatagaacttcttaaaaataaaaggatgggagaagaaaggaattctgctatttctcctcaaaagatccataatcagacagcaagaaagagattcgttcagaaatgcgttcttccattaaatgaggatagtccgttgatgtatcagccacaaaaaatggacttgactatgcactcagccttagattgtaagcaaaagaaatcaaggtcaagatctggaagcaagaagaaaatgctaacattacctcatggtgctgacgaggtttacattctccgatgcaggttttgtggcctagtctttcgaggacccttgtctgttcaggaagactggattaagcacttacaacgacatattgtaaacgctaatcttccacggactggagctggcatggtggaagtcacgtcactacttaaaaagcctgcctccattacagaaacttcattttctctactaatggccgaagcagcttcatagaaccaggaaaccttttaaatagccagtttgaattggatgtaaatttgaaattctttttttttaagccacattaaattatctgtttataaatactaaagcaggaaaatggggggaaagtgaattacagtgacatcagagcaaattgaatacttaaaacagtaagtagtctatatattttatatagggtggaagatgtgtttttaaggtttatgaagttttgttggttaactgtgttcactcagtaaaagagcagtacatgtaagcagccattaataaactgttgcacatggatacttatagacagacttattggacaattatgttttttgcagtgttaccagaatcaaggctctgtttattccccacaagacttgcatagaaaaataagatattatattttgtttgtatgtatttagtgttttgtataataccaagaaccgctgactaaatttactcaaattagggcattaaatatcatgtacttcatagtttgagactgttcactcaaatagggcagagtactattctatctagatgtgtaagtgttttttttaaaatcacatggaacggttttttttatactaaaaagtggagggagatttgtttaaacaagtatttctaaaagaaatatgtacatagttctggaaattatttgtggtaaggaaatattctttattccagttgcatttctcagacaataaagtggtgcatccatgctacctcctactttgtcaacaaagatgctatttaccctttacatttttgtatcataatagattttaaaaatctaatgttctttattgcaagacattcttttgttaacaggtttgtttctttttaatgttttacctaaaatttgacatgcttacaggacaggtttgcctcttactttatttaacattgtagaaatgtaattaataaacaatgctcactacacagtttagaatagacgttctcatttatattatcttccaaatttgatcagttagcaaaacttaatacaccaattaaaatatttctacatatgagaatgtttacaatttaaattttagagcttgttttggatgtgattatatgtacgaaaatcgtgtaacactatgctcatgctaagaaccgacataacaggattactgaaataaatgtgctgtgaggaatggaaaatatggtgcaggtgtcttggtcatgataaattgtgattctttttaaaaattttttccaaaaacaattaggtattttaatctgaaatcagattcctttacaaacaacaagtttttgtatgcaagcaccattttatttcatgtagtatggctaatactatagttgaaccaaggatatgcattgattctttgcttcgtatgtaaataaagttaaaaacagttaaaataaggagtattttggtagagtatatacatacctcactgccagtgaaattgctttcctatggtatatctccttaccagaaaaatctctaaataaaaaaaggtttaaag

SEQ ID NO: 11960 - protein, 630 aa, Homo sapiens
MCNQNSSPHKNVTIKSSVDQKPKYFHQAAKEKSNAKANSHYLYRHKYENYRMIKKSGESYPVHFKKEEASSLNSLHLFSSSSNSHNNFISDPHKPDAKRPESFKDHRRVAVKRVIKESKKESSVGGEDLDSYPDFLHKMTVVVLQKLNSAEKKDSYETEDESSWDNVELGDYTTQAIEDETYSDINQEHVNLFPLFKSKVEGQEPGENATLSYDQNDGFYFEYYEDTGSNNFLHEIHDPQHLETADASLSKHSSVFHWTDLSLEKKSCPYCPATFETGVGLSNHVRGHLHRAGLSYEARHVVSPEQIATSDKMQHFKRTGTGTPVKRVRKAIEKSETTSEHTCQLCGGWFDTKIGLSNHVRGHLKRLGKTKWDAHKSPICVLNEMMQNEEKYEKILKALNSRRIIPRPFVAQKLASSDDFISQNVIPLEAYRNGLKTEALSVSASEEEGLNFLNEYDETKPELPSGKKNQSLTLIELLKNKRMGEERNSAISPQKIHNQTARKRFVQKCVLPLNEDSPLMYQPQKMDLTMHSALDCKQKKSRSRSGSKKKMLTLPHGADEVYILRCRFCGLVFRGPLSVQEDWIKHLQRHIVNANLPRTGAGMVEVTSLLKKPASITETSFSLLMAEAAS

SEQ ID NO: 11961 - DNA, 2800 bp, Homo sapiens
  CDS (176)..(619)
cttaaggctaaatcctggaataaaaagttctatgattatgaagcaaacatgccagacagatggggtcacagtggttataaagagttataccctgaagaatttgaaacagacagtagtgatcagcaagatattaccaacgggaagaaaacatctccccaggtaaagtcatctacccatgaatcccgcaaacacaagaagtcaaagaaatcccacaaaaaaaaagcagaaaaaaaggtcacacaaaaaacagaagaaaagcaaaaaggaagccacagatataacagcagattcctcgagtgagttctcagaagaaactggggcttctggtacaaggaaagggaaacaaccacataaacgcaagaaaaaatccaggaaaaagtctctcaaaaaacctgctttattcttagaggcagaaagtaacacttcacattcagatgattcagcatccagcagttctgaggaaagtgaggaaagagacactaagaaaaccaaaaggaaaaagagagagaaaaaagcccatacctctgtaaccaacaatgaaatacaggagaggacaaacaaacgcacaaattggaaagtagctacagatgaaaggtctgctgagagctcagaggatgactaaatgggaaacacttttgttttccacatgactgtggatatttacagttcttactccttgtggttttgccagtgactcttgttcagcacggggcctgaggtcagagctgtcttgtgccatctgtatgttctgacagacgtcttgtcttctattttggcgttaagcttgatccccttttcttgttaaaagggaatctggtattttgttatgaaggtttcttgaagagattatttttttttgcaattaattacgtttagtgtagagtgcatatacagcaaattaaaggacccagaaagctggatccaatagtgacctgggtacaccaatcggaaattgagtttggggaagtcaagggctgggatcaagaggtggattggaactaatgccatgtaggatggtatgacaaggcaacactgtattgctctctgtttatatagcaggtgtcacaactaacttgtctttagccttggtgctttgatccttctatattttgaccccacaggtgtggtccggtttacttaatcaggacatgggcctaagaacaaaccttttcccttcatgataacatccatagacaacttattagaagggactagagtttttgcaaatttccctgctggatggggcctatagctatacttagtatatgcctaaacatggtaattggatagtaaatggttttctagttccattgctgtatatttgcctaaatggacttgtgttcaaattatttcttcaattgtcatagataatcctgtaccaaatggggaagaattaggaaataatcatgttgtctaatggtactctggattcagggcagcaactgccatttaaatgttgtcttgttcatttctaaatctgttcatgaagtttaggttttccctgaaaccaagttgaattatttccaaaatgaaacaggcttctcagggacatatccacttcttcccagtctgcctttggattaaagcaccaagcagagaccacattaattccctttgctatactgtgatccttagtatgttaattcttaagaaaccaacatatcactgaaagaaggctggcagaacgcaagtgcattttttcactgtgggaagaaagatcaagtgacgtattattttttcctggttgtcacttaatgggctgagtaaaaagcttgaaaactcagactttcggtcttggttctgccactcattggttatgaggaggcccagagcaggtaagttcaccttcctggccttactttcctgatgtgtaatacggaattacttcacagtagcatgacagtataagacaccagcagtagatacaactatgatgacattccatgagttggtatttttagttctaactgctaaatttgttctctttacgggacagatttctaataaagtgcttggtcttaaaatacatggttggacagaggtgccctatcccttaactatgagcaggtgctaccttttgggatatttattttaaattttaatactttggtactcaattgtcagtgttccatggtgtgtatttttatttttgggattagtgggggtctaaagggagaagaatagtctctaattactacctcttaacctaaagcaattattttgttcctggagcaagttaaatctttgttggaaggagctttggccatatattttttagcatgcattgtttctgtgccctgaaagtacctgaaaggttttaagcacagactcaggaaaatgtgccagtagaacaggccatctccaggaaattggctctatttgggtcctgaccttcccttcctcccaagttagcaggcttgttcttttgcaaggaatacacatcttgccttttttttttttttttttttgccatgttttccttttcttggtcatgtataagcaataaagctgttttttgttcttcatctttcttaaccccaaattttcttctatgccttaggcttcgatggttcttccaacccccttaatatggcttagggtggtttttcaaaacctacaatcccccatttgcactactggccatggaacatttatttctagtgttcctgccaatcagagatctctatattaaattctaaaatgggattaaaagaagagttggagaattcacacttattgagtaactgatgtcatacaacctggaatttctgaattccaaataaataaatttcactctttg

SEQ ID NO: 11962 - protein, 148 aa, Homo sapiens
MNPANTRSQRNPTKKKQKKRSHKKQKKSKKEATDITADSSSEFSEETGASGTRKGKQPHKRKKKSRKKSLKKPALFLEAESNTSHSDDSASSSSEESEERDTKKTKRKKREKKAHTSVTNNEIQERTNKRTNWKVATDERSAESSEDD

SEQ ID NO: 11963 - DNA, 2836 bp, Homo sapiens
  CDS (147)..(1409)
ccgagcgggctgggggaggggagcgtggggccgacagttttgggggtgaaaaggcaaaaggcgggtgaaaggctgcctcccgagactctccttgcttggaattctgcccactctgcggagttagcagtcacgacctccagcacaggatgtggtaccacagattgtcccacctacacagcaggcttcaggacttgctgaagggaggagtcatatatccggcccttccacagcccaacttcaaaagcttacttcctttagctgtccattggcaccatacagcctccaagtctctgacttgtgcttggcagcaacatgaagatcattttgagctgaaatatgctaataccgtgatgcgctttgattacgtctggcttcgagaccactgccgctcagcatcgtgctacaactctaagactcaccagcgcagcctggatactgccagtgtggatttatgtatcaagccaaagaccattcgtctggatgagaccacactctttttcacttggccagatggtcatgtgactaaatatgatttgaattggctggtgaaaaacagctatgaagggcagaaacaaaaagtcatccagcctagaatactatggaatgctgaaatctaccagcaagcccaagttccatcggtagattgccagagcttcttagaaaccaacgagggactgaagaagtttctgcaaaactttctgctctatggaattgcattcgtagaaaatgtccctcccactcaagagcacacagagaagttggcagaaaggatcagcttaatcagagaaaccatttatgggaggatgtggtatttcacttcagacttctccagaggtgacactgcgtacaccaagctagctctggatcggcacactgacactacctattttcaagagccctgtggcattcaagtgtttcattgtcttaaacatgaaggaactggtggcaggacactgctagtagatggattctatgcagcagaacaggtacttcaaaaggcacctgaggaatttgaactcctcagtaaagtgccattgaagcatgaatatattgaagatgttggagaatgtcacaaccacatgattgggattgggccagtcttaaatatctacccatggaataaagagctgtatttgatcaggtacaacaactatgaccgggctgtcatcaataccgttccttatgatgtcgtccatcgctggtatacagcacaccggactctaacgatagagttgaggagacctgagaatgagttttgggtcaaactaaagcctggcagggtcctatttatagacaactggcgtgtcctacatggcagggaatgcttcactggctaccgccaactgtgtggctgctatttaacaagagatgatgtattaaacactgctcgcctcttggggcttcaggcttaaaattgacagcatctggattatgaatacacctggcaccctggctaccagaatttcatatgggcagaataatattgtgtcaaactctacttcagattgtctccttatcccatcccacaaaacagaatctgtccgtttctctagtaagggagacttgttggagaggcgggactctgagttatctaatgtcagacatctagtggggcagctctcttcctcatgttataacatggatccacttgttttatttaaaccttttaatataattttggtcagtctccttcagaaatataatctccatattgataggaaagcaataattgccatgaggtaacgatttttttcccaagtagatcagttagaaagaaatgcattctagaaataacaaaaatcctgataaagcaacaatttgcaaaatgtttggtcttaggacaccttaacactcttaaaagttattgaaggccccaaggagttcttgggtgtgggttctatctattgatactaattattttaggtattaagactgagaaatatttaaagctcaagaagaacacagaagcacacatccctcagctatgagagagatgacataaccatatgtcatgtagcctctggaaaagtcctctgtatcctcatgagataacgagagggggaaaaaaagctactactgcctttgtaacttccacttagcctactacagggctatgcacatcttagtttccaaaagtctgcttaatttcaaaagaaaaatgcctaattgaatgtaactcatcttggtgttattatacaaaataatttttaatctgcagacccacgaaaagggtctcagggactcctccaggggtcttcagaccatactttgagaacccatgggctagcgactaccttgagacagtcctttacctaggcctgtggattaaagggtttagctgaaaccctagattcttctctgtagtctaatagaactccaaacattgtaagaattgcttggtagcataagctcagggataaggtgggaattgagttcaaatatagtgttttatcttccacacaaatcatctctataggagttaaattaggaagtcacaacagcgcctgttgaacaaactcatcagtgtggtaatcctatgagggataattgcagaaaggttttagagacttgtgaggttccatatgataattctttacacctcccccccccaagagaaagtacacagggctattctgtaatattgttcagggaaatcagcatgatagatgctgtgcctccagagagttctctggagattactacccaaatgtgtattttggcaatttggtggtatttaggatgtaatatgttttcctccatttctgctaattttctctctctctctctcataacatactatacatgctaattgccaagatttgaatgagtcaaattt

SEQ ID NO: 11964 - protein, 421 aa, Homo sapiens
MWYHRLSHLHSRLQDLLKGGVIYPALPQPNFKSLLPLAVHWHHTASKSLTCAWQQHEDHFELKYANTVMRFDYVWLRDHCRSASCYNSKTHQRSLDTASVDLCIKPKTIRLDETTLFFTWPDGHVTKYDLNWLVKNSYEGQKQKVIQPRILWNAEIYQQAQVPSVDCQSFLETNEGLKKFLQNFLLYGIAFVENVPPTQEHTEKLAERISLIRETIYGRMWYFTSDFSRGDTAYTKLALDRHTDTTYFQEPCGIQVFHCLKHEGTGGRTLLVDGFYAAEQVLQKAPEEFELLSKVPLKHEYIEDVGECHNHMIGIGPVLNIYPWNKELYLIRYNNYDRAVINTVPYDVVHRWYTAHRTLTIELRRPENEFWVKLKPGRVLFIDNWRVLHGRECFTGYRQLCGCYLTRDDVLNTARLLGLQA

SEQ ID NO: 11965 - DNA, 4027 bp, Homo sapiens
  CDS (3269)..(3880)
gagtgcgccgtgcggtctccggacgctcgctgctcagcccgatccccgccaactgtgcaggcggctgacccgcagcggtagcggcagcagcgaggactcgagcgctggctgcagcgacaccatggatctctcctttatggccgcgcagctgcccatgatggggggagctttcatggactcgcccaacgaggacttcagcaccgagtactccctgtttaactcctctgccaatgtccacgcggctgccaatggccagggccagccggaagatcctcctcggtcctccaacgacgccgtcttgctatggattgccatcatagctacgctggggaacatcgtggtggtgggcgtggtgtatgccttcaccttctgaggacggcacaccctgcaccaccatggggtgaggcttggcacgtagctctgacttgctgtcggcctttggcttctcctgtgttctagaaccaggagttttgaccaggggcggcggccgtccttctggaatttctccccagcagccctgatttcaaatatcccatgttgtggtcaagctgagtcagaagacatggaagtatgggcctcctgcccctagaggcatgacggggcaaggccttcagagggcagattggggatccttgaaactacattccaggaacatgggaccagatgagacagctagttaagtttaaaacatagacatgatttgatgatcgcttgctggtggtaaataatcactcgtgtgtcttgtttttatgcaaacttatcgaacctagggcgtggggtgctggggcaagagcagccctcagaacttcagtgttcctgacccaattctggtttcacattcagtcccttggccatctagtagggccattggatgttcctagtttgactttgaaatggcacctttgccaccagacacctggtcccttccaagacccaagtgcattgggagacccagggatggggggttactggtaataggtggggtttctgggggtgttgttggtggtttttatctcctggtcggactttctcttctttttaagaagaggagaggatgtctttaagagctagatgtgccaggcagtggactcttcaggccacccacgtgagaatgctgtttcttctctgaggaatcgtggaattttaaagatgaacaagattcacatccactgaattattcaacggatgggtcagaaaggggggtgatttgcctgtggtcaccaggcaggtttgtggaggagtcggaacagaaagatgtgtcctcactctcagctcactgagctctctgccccaactaagcacttccctgaggaggttgctgagaagctgccctcaggagaatgtccaggcatcttgaaggtgggtgcgagattggcaggctgctcagatacccgtcctttacattcagtgtggataccgtgcattctcctgaagctgtgaaagtgcttctgcccaagccacttccttaaattctgaaatatcagcatctggggtcctggcaagcaaggaagcttccaagtaaaaaccagagagaagggcacacttttctttcttcattaggaaatcttattgcacaggaaccacccccacccccaccccccacaccttcccaaggcagcatcccagtgcagatagagtgggaaaggtcccagaagggggctcactcacctctaggcccagagaggctttctcctcactttatatactgcaaaaacagaagaattgtgtcaataacaccctctgtagtggagaaacttaaaagctggttaggaagctctcgtgtatatttagagacaattacaagaaagctggacttgccgctgtggtctcaggagaaatgagtgttcttgatgacaggcaaagggacatcttagttgtccagaagcggcactcttccctggaagccgccatgttaataggattactagcctggctccagacagtgcctgctcatggctgccagttcttaccgatcacatctgtcactgccaccgtatatcatctgccagtgcatcagcttaaggggaggtcacgagtgcaaaagaacctgacccttgacaatgagggagaagggacatggaccacctgtctggaattcctggaatcactggcagggtggaggctgggctggggagttagccgcggtgtgcgtgaatggctctgtctccagcaagtctctctccatcaaaccccaggtctgccccataagcaagatctttaacagatggatgtctccatgagaaaacccaaggcgagaagcccagagccatggcggggttgcttgacgtcctcatggagtcactctgccccacatgctcaaatcttccctctggccccacatccctaggagggcctgacccctgtaaagatacaggaggcagctccctggcctccaaatggcccatggagatggcagtcgggagacagggttctgtgtttgctgcggtgaagggaggagaaggcaggaggaaaaaggatggcttctagccctgaagaggactccagcatcccaggcaccgggtgcttctggctgcagttttccctatggaggcccctcagcctccagccctaacataaatgtcggttaaattcagttttcaagcctctctcccttttcagtgtcagagcagtagatggtccagggcattggaggcctcgaccactctgcattgcagattacagtgacttcctcggggttgccccatcttggtctcctgtggtttcttcatcagctttttttttaccagcatctctcaaataacaatgaagatagatatgcccattagtgtctgattaaggagcaaaggctggatttctggccacagcgagctgcactctccctcctgcctcagccggggtccgtcttagcagtttggaaaggggaaaaagatgccggtcctcactgcttaagttttgtgtccaggtgccactagacttgcatgcacactaactccttacaatcaccacacagcatcatcgccccagtgcacagatgaggaaccagaggctcagaggagtgaagttgccttcctgaggtcacacagcatgaaagtgatgagctaggatttgaatctgggaagttgggctctagagccagactgtactgccttctgccacactgtactgccttctgtgactgggtggcacctccagggcacatttacacaaggccctgaatctgcagaggctgtttctcaagatgcccgtcatggtgtggcctgggccagctctggcttccacaggtccctgactgtcctcagagtggaacatgctcaacctcccgcccactgctctctctctgcccagatttcaggggtgccggtccccaaggcctgcccccttctttaagactgaactcaagtctccttggaaggccccggtgaagctcccagagactggttttcttgggatgcaggcagaaggggaccctccctggccaacacccaggagcccagcagaagcacccacacgtagaaagaggctcactacagccagaagtgcagagtcagagtcctgggaccatcttgttctgcaaggtgaccccaggctccccaggacaggggagagggatcgtcctcattcagactctagctggggcctctgtactggcttctccctgggtggggttgcctgttacatagctgtgcctcagagaaagggtcctgcattttctggaatgttctctgtgcttacccctctgtgtgcccctccattgctcctctacaagcaattaggtgattcaaaagagcaacttaggctgggtgcagtgactcacacccgtaatcccggcactttgggaggccgaggcgggcagggacaggagttcaagaccagcctggccaacatggtgaaaccctgtctctacaaaaaatacaaaaattaaccagacattgtggcatgtgcctgtaatcccagctactcaggaggctgacacaggagaattgcttgaaccaggaggcggaggctgcagtgagctgagattgtgccactgcactccagcctgggcaacagaacgagactctgtctc

SEQ ID NO: 11966 - protein, 204 aa, Homo sapiens [sequence omitted]

SEQ ID NO: 11967 - DNA, 3269 bp, Homo sapiens
  CDS (4)..(2712)
aagatggcggcggtggctggatctggggctgccgcggctccgagctcactgctcctcgtggtgggcagcgagttcgggagcccggggctcctcacctacgtcctggaggagctcgaaagaggcatccggtcttgggatgtcgatcctggcgtctgcaaccttgatgaacagctcaaggtctttgtgtcccgacactctgccaccttctccagcattgtgaaaggccagcggagcctgcaccaccgtggagacaacctggagaccctggtcctcctgaacccatcagacaagtccctgtatgatgagctccggaaccttctgttggaccctgcctctcacaagctactggtgttggctgggctctgcctggaggagacgggggagctgctgctacagacagggggcttctcgcctcaccacttcctccaggtcctgaaggacagagagatccgggacatcctggccaccacgcccccacctgtgcagccgcccatactcaccatcacctgccccaccttcggtgactgggctcagccggcacccgctgtgcctggccttcagggggcgctccggctccagctgcggctgaaccccccggcgcagctgcccaactctgagggcctgtgcgaattcctggagtacgtggctgagtctctggagccaccgtcccccttcgagctgctggagcccccgacctccgggggcttcctcaggctgggccggccctgctgctacatcttccctggaggcctcggggatgccgccttcttcgccgtcaatggcttcactgtgctggtcaacggtggctcaaaccccaagtccagtttctggaagctggtgcggcacctggaccgcgtggatgccgtgctggtgacccaccctggcgccgacagcctccccggcctcaacagcctgctgcggcgcaaactggcggagcgctccgaggtggctgctggtgggggctcctgggacgacaggctgcgcaggctcatctcccccaacctgggggtcgtgttcttcaacgcctgcgaggccgcgtcgcggctggcgcgcggcgaggatgaggcggagctggcgctgagcctcctggcgcagctgggcatcacgcctctgccactcagccgcggccccgtgccagccaaacccaccgtgctcttcgagaagatgggcgtgggccggctggacatgtatgtgctgcacccgccctccgccggcgccgagcgcacgctggcctctgtgtgcgccctgctggtgtggcaccccgccggccccggcgagaaggtggtgcgcgtgctgttccccggttgcaccccgcccgcctgcctcctggacggcctggtccgcctgcagcacttgaggttcctgcgagagcccgtggtgacgccccaggacctggaggggccggggcgagccgagagcaaagagagcgtgggctcccgggacagctcgaagagagagggcctcctggccacccaccctagacctggccaggagcgccctggggtggcccgcaaggagccagcacgggctgaggccccacgcaagactgagaaagaagccaagaccccccgggagttgaggaaagaccccaaaccgagtgtctcccggacccagccgcgggaggtgcgccgggcagcctcttctgtgcccaacctcaagaagacgaatgcccaggcggcacccaagccccgcaaagcgcccagcacgtcccactctggcttcccgccggtggcaaatggaccccgcagcccgcccagcctccgatgtggagaagccagcccccccagtgcagcctgcggctctccggcctcccagctggtggccacgcccagcctggagctggggccgatcccagccggggaggagaaggcactggagctgcctttggccgccagctcaatcccaaggccacgcacaccctcccctgagtcccaccggagccccgcagagggcagcgagcggctgtcgctgagcccactgcggggcggggaggccgggccagacgcctcacccacagtgaccacacccacggtgaccacgccctcactacccgcagaggtgggctccccgcactcgaccgaggtggacgagtccctgtcggtgtcctttgagcaggtgctgccgccatccgcccccaccagtgaggctgggctgagcctcccgctgcgtggcccccgggcgcggcgctcggcttccccacacgatgtggacctgtgcctggtgtcaccctgtgaatttgagcatcgcaaggcggtgccaatggcaccggcacctgcgtcccccggcagctcgaatgacagcagtgcccggtcacaggaacgggcaggtgggctgggggccgaggagacgccacccacatcggtcagcgagtccctgcccaccctgtctgactcggatcccgtgcccctggcccccggtgcggcagactcagacgaagacacagagggctttggagtccctcgccacgaccctttgcctgaccccctcaaggtccccccaccactgcctgacccatccagcatctgcatggtggaccccgagatgctgcccccccaagacagcacggcaaacggagaacgtcagccgcacccggaagcccctggcccgccccaactcacgcgctgccgcccccaaagccactccagtggctgctgccaaaaccaaggggcttgctggtggggaccgtgccagccgaccactcagtgcccggagtgagcccagtgagaagggaggccgggcacccctgtccagaaagtcctcaacccccaagactgccactcgaggcccgtcggggtcagccagcagccggcccggggtgtcagccaccccacccaagtccccggtctacctggacctggcctacctgcccagcgggagcagcgcccacctggtggatgaggagttcttccagcgcgtgcgcgcgctctgctacgtcatcagtggccaggaccagcgcaaggaggaaggcatgcgggccgtcctggacgcgctactggccagcaagcagcattgggaccgtgacctgcaggtgaccctgatccccactttcgactcggtggccatgcatacgtggtacgcagagacgcacgcccggcaccaggcgctgggcatcacggtgttgggcagcaacagcatggtgtccatgcaggatgacgccttcccggcctgcaaggtggagttctagccccatcgccgacacgccccccactcagcccagcccgcctgtccctagattcagccacatcagaaataaactgtgactacacttg

SEQ ID NO: 11968 - protein, 903 aa, Homo sapiens
MAAVAGSGAAAAPSSLLLVVGSEFGSPGLLTYVLEELERGIRSWDVDPGVCNLDEQLKVFVSRHSATFSSIVKGQRSLHHRGDNLETLVLLNPSDKSLYDELRNLLLDPASHKLLVLAGLCLEETGELLLQTGGFSPHHFLQVLKDREIRDILATTPPPVQPPILTITCPTFGDWAQPAPAVPGLQGALRLQLRLNPPAQLPNSEGLCEFLEYVAESLEPPSPFELLEPPTSGGFLRLGRPCCYIFPGGLGDAAFFAVNGFTVLVNGGSNPKSSFWKLVRHLDRVDAVLVTHPGADSLPGLNSLLRRKLAERSEVAAGGGSWDDRLRRLISPNLGVVFFNACEAASRLARGEDEAELALSLLAQLGITPLPLSRGPVPAKPTVLFEKMGVGRLDMYVLHPPSAGAERTLASVCALLVWHPAGPGEKVVRVLFPGCTPPACLLDGLVRLQHLRFLREPVVTPQDLEGPGRAESKESVGSRDSSKREGLLATHPRPGQERPGVARKEPARAEAPRKTEKEAKTPRELRKDPKPSVSRTQPREVRRAASSVPNLKKTNAQAAPKPRKAPSTSHSGFPPVANGPRSPPSLRCGEASPPSAACGSPASQLVATPSLELGPIPAGEEKALELPLAASSIPRPRTPSPESHRSPAEGSERLSLSPLRGGEAGPDASPTVTTPTVTTPSLPAEVGSPHSTEVDESLSVSFEQVLPPSAPTSEAGLSLPLRGPRARRSASPHDVDLCLVSPCEFEHRKAVPMAPAPASPGSSNDSSARSQERAGGLGAEETPPTSVSESLPTLSDSDPVPLAPGAADSDEDTEGFGVPRHDPLPDPLKVPPPLPDPSSICMVDPEMLPPQDSTANGERQPHPEAPGPPQLTRCRPQSHSSGCCQNQGACWWGPCQPTTQCPE

SEQ ID NO: 11969 - DNA, 2497 bp, Homo sapiens
  CDS (7)..(1014)
tacgtgatggttttacagcccgaggagcccaagatcagcctgagtggcgtccaccattttgcccgagcagcttctgaatttgaaagctcagaaggggtgttccttttccctgagcttcgcatcatcagcaccatcacgagagaagtggagcctgaaggggacggggctgaggaccccacagttcaagaatcactgttgtccgaggagatcgtgcacgacctggatacctgtgaggtcacggtggagggagaggagctgaaccacgagcaggagagcctggaggtggacatggcccgcctgcagcagaagggcattgaagtgagcagctctgaactgggcatgaccttcacaggcgtggacaccatggccagctacgaggaggttttgcacctgctgcgctatcggaactggcatgccaggtccttgcttgaccggaagtttaagctcatctgctcagagctgaatggccgctatatcagcaacgaatttaaggtggaggtgaatgtaatccacacggccaaccccatggaacacgccaaccacatggctgcccagccacagttcgtgcacccggaacaccgctcctttgttgacctgtcaggccacaacctggccaacccccacccgttcgcagtcgtccccagcactgcgacagttgtgatcgtggtgtgcgtcagcttcctggtgttcatgattatcctgggggtatttcggatccgggccgcacatcggcggaccatgcgggatcaggacaccgggaaggagaacgagatggactgggacgactctgccctgaccatcaccgtcaaccccatggagacctatgaggaccagcacagcagtgaggaggaggaggaagaggaagaggaagaggaaagcgaggacggcgaagaagaggatgacatcaccagcgccgagtcggagagcagcgaggaggaggagggggagcagggcgacccccagaacgcaacccggcagcagcagctggagtgggatgactccaccctcagctactgacccgtgcccccggccacctcggtttctgctttcgaagactctgctgccatccgttctcccagtcccaagggtccacgatgtacaaagtcatttcggccagtaggtgtgcagacccctccccgccacgatcgtcgctgtgcttggtgtgtaggaccctaggctccccgcccaccctctgcctggtcgcgctcttcagtcccacgaggagctgacacgtcctctctggccgccatccggctcgcacaggggcctcccagcgcctcaggccccgcgtttgtgtctggagtctccccccggggagaggacactggcccctcgcactccagaaaagccatgccagctgggctcgttgacaaagggtaaaacatgctcactcccacccggtaatcatttttttctttttttaaaaaaagtttttattttttccaaactagtgcatgtataaataatggcaggatggggggtactgtgtagatgattaactgactttttaatattttgtaaataaatcggattccttgtgtcctttgtgctagtgtaacccgggactggaatgtaaagtgaagttcggagctctgagcacgggcttttcccgccgggtcctccctccccagaccccagagggagaggcccaccccgcccagccccgccccagcccctgctcaggtctgagtatggctgggagtcgggggccacaggcctctagctgtgctgctcaagagactggatcagggtagctacaagtggccgggccttgcctttgggattctacctgttcctaatttggtgtggggtgcggggtccctggccccttttccacactcctcctccgacagcagctccctgggcagtggcctggtctcaccgtgtgcagccttgtggtttatgcttaaatgtacattttcctgctggtaaaaggagaaactgagaggtgtcctgcagaccggctgaccactccttttggagacggcaggaggcctgagcgatccgtactcagaacgtccaggagagacgcatggcccgaagtcaaagtgctggaattttccaaaacagcctgttctctcctctctcctccccagagcaccccctgccatcaggggggttgaaatccctctcccccaggagccctgctgctttgcttggtggtagggcaggagagcaaacaaacagtcatggtctaaaacccacatagcactttgctcttagttacatgtaaaattttagatttctaaaacaggtgggcaatcattttgaatactgttctgtgaccctgactgctagttctgaggacactggtggctgtgctatgtgtggccatcctccatgtcccgtccctgtagctgctctgtttagacagcggacagacgctcacgcccaggggatgtcctcacgctgtcgccgcgcggtttcccttcgcagatgtgtatactcatgataggtcagaaagtgtatccgctacaataaagttctggttctaact

SEQ ID NO: 11970 - protein, 336 aa, Homo sapiens [sequence omitted]

SEQ ID NO: 11971 - DNA, 2427 bp, Homo sapiens
  CDS (219)..(1859)
gaatgtaaagagatccagggctcttggagagggacaagtgagagccagccaaaaaggaaaaagcaaaggcagaaacggcatcaggagagacagagatgtgaaggagggaaggagcaggagagcaggaaggaaacgcaggaggagggagcagcatctcctgtgaacacagaggagcacctgtttgctgttaaaatcgatctccctcggcaccctgagcaatggatataatatttggcaggaataggaaagaacagctggagcctgtgagggccaaagtgacaggcaagattccagcatggctgcagggaaccctgctccgcaatgggcctgggatgcacacagttggggagtccagatacaaccattggttcgacggccttgccctgctccacagcttcaccatcagagacggtgaagtctattacaggagcaaatacctgagaagcgatacctacaacaccaatattgaggcaaacaggattgtggtgtctgagtttggaacaatggcctatccggacccctgcaaaaacatattttccaaagctttctcctacttgtctcacaccatccccgatttcacagacaactgcctgatcaacatcatgaagtgcggagaagacttctacgcgacctcagagaccaattacatcaggaaaatcaacccacagactctggaaaccctggagaaggttgattatcgtaaatacgtggcggtaaatctggcaacgtcacatccccattatgatgaggctggaaatgttctaaacatgggcacatccattgtggaaaaggggaagacaaagtatgtgatttttaagatccctgccacagtaccagagggcaagaagcaggggaagagcccctggaagcacacagaggtgttctgctccatcccatcccgctccctgctctccccaagctactaccacagctttggagtcaccgagaactatgtcatcttccttgagcagcctttcaggttggatattctcaagatggcaaccgcatacatccggagaatgagctgggcctcctgcctggctttccacagggaggagaagacttatatccacatcatcgaccaaaggaccaggcagcctgtgcagaccaagttttacacaggcgccatggtggtcttccatcacgtcaacgcctacgaagaggacggctgcatcgtgtttgacgtcattgcctacgaggacaacagcctctaccagctcttctacctggccaacctgaaccaggacttcaaggagaactccaggctcacctcggtccccaccctcaggaggtttgccgtgcccctccacgtggacaagaatgcagaagtgggcacaaatttaatcaaagtggcatctacaacagccacggccctgaaggaagaagatggccaagtctactgccagccggaatttctttatgaaggcttagagcttccacgggtcaattatgctcacaatggaaagcaataccgatatgtctttgctacaggagttcagtggagtccaatcccaaccaagataataaaatatgacattctcacaaagtcatccttaaaatggagagaggacgactgctggccagcggaacccctgtttgtgcccgcgccaggtgccaaggatgaggatgacggagtaatcttatcagccattgtctctactgatccccaaaagctgccttttctgctcattctggatgccaaaagctttacggaattggcccgtgcctctgttgatgtcgatatgcacatggatctccatggattattcattacagacatggactgggacacaaaaaagcaggccgcttctgaggaacagcgggacagggcttccgactgccacggggctcctctgacctgatggtgttggggtttgggtaggggaggggagctcggctgtcagaactccatggatatgtttctttggatggaggggagggcctttgttaccttttgcacttattctttctgtgggtgctttgacaagggcatggcaagagagcttgtcagtatcatttctttcattttattttggctgtaaaaattttgtttgaaagtcaaacatttgaacatcaaatatgtattgattagatccagtccttctaagaaacctcctttcctttaacaaaaagaccttgaccatgaatcagagattgtattcaatgacattatcatcatttttagaacgagccactaacctattagagaagaggcagataattatttatcattgtgccttcctctgtctctttctctttcctttgctccctcccatgtttctggtggactaaattgtgtatctgggagttctcactttctagccaggcctgatgagttaagttacatgaccaggaaggttatgccactttgtggtcattccatgcaagtcatggcgtaatataaaataataaaaactttaaagtctg

SEQ ID NO: 11972 - protein, 547 aa, Homo sapiens
MDIIFGRNRKEQLEPVRAKVTGKIPAWLQGTLLRNGPGMHTVGESRYNHWFDGLALLHSFTIRDGEVYYRSKYLRSDTYNTNIEANRIVVSEFGTMAYPDPCKNIFSKAFSYLSHTIPDFTDNCLINIMKCGEDFYATSETNYIRKINPQTLETLEKVDYRKYVAVNLATSHPHYDEAGNVLNMGTSIVEKGKTKYVIFKIPATVPEGKKQGKSPWKHTEVFCSIPSRSLLSPSYYHSFGVTENYVIFLEQPFRLDILKMATAYIRRMSWASCLAFHREEKTYIHIIDQRTRQPVQTKFYTGAMVVFHHVNAYEEDGCIVFDVIAYEDNSLYQLFYLANLNQDFKENSRLTSVPTLRRFAVPLHVDKNAEVGTNLIKVASTTATALKEEDGQVYCQPEFLYEGLELPRVNYAHNGKQYRYVFATGVQWSPIPTKIIKYDILTKSSLKWREDDCWPAEPLFVPAPGAKDEDDGVILSAIVSTDPQKLPFLLILDAKSFTELARASVDVDMHMDLHGLFITDMDWDTKKQAASEEQRDRASDCHGAPLT

SEQ ID NO: 11973 - DNA, 2892 bp, Homo sapiens
  CDS (60)..(404)
gtattttttcagtaagcacccagaggcctccattcaggctgtttttttcagatgcccaaatgcatatttgggcattagaaggtctgtcgcacttagtagcagcatcatttacagaggatagatttggagttgtccagacgacactaccagctatccttaatactttgttgacactgcaagaggcagtcgacaagtactttaagcttcctcatgcttccagtaaaccaccccggatttcaggaagccttgtggacacttcatataaaacattaagatttgcattcagagcatcactgaaaactgccatctatcgaataactactacatttggtgaacatctgaatgctgtgcaagcatctgcagaacatcagaaaagacttcaacagttcttggagttcaaagaatagttaagtaatataaactgtgttcattacactgctgatacaactacagatgggacagtaaatgttcagcattcttggatcagaagaaaacggactaattagatgcttcctttgtcgtggtggttgctttgaaaactatactttaatgggagaaatcatggaaagaaattctcaacagaataactgaaaactgccttttctgtaccgattgctttttgtgtgtgtggtataataaaatctttattcaattttacagaagcattgatggcagtcgaaatgtctctagctcatataacttaatagtaataactaaaaaacttttagaatttacttttgaaaggagggaagccagttctgaaatgagtataggttgatttcatagtcttcttaattaagagtttagctctttgtaaactcaaaatacataaactttttaagtgtagtttcatttactgaaggataaaaatggtaacagtgcagcaatattcacaaaaaatattgtctaacggacatattttgttaatctgttaggttgggtttttgtttccagggacaaattaaatttgtatgattacccaaaaaagggtctcagtttacagatgctaactctatataaaggaatgtggaaaaactcagttcttaagttacaagattaaaaattcacatttggtctttaagaaacaattgactgacatctatgaatttattttgtatcacgctagtaaacacgaagtattaatgtatgggtattttcccagctagttttgctttctttttctggagcaaaacattaagtgattgcagagtttttcaagcaagagaaaaaggtttgcaaaaaaacccaggaaatgttcccttttttccccaccattcatcttcattagatcaaattctgtgaaacttgtctggtctctcaaagggagcagcctctgtagtgttaaatggctaattaaaataggaagatctttatagccagaaacaacttagtcatcaaatagcaagtgaaaccaaaacgtcagagggattactgtacttgggagtatgttgtgtgtcccaaatgtgaacgaagtattgttagaatttattagatcagcttctttggagatcaaagattggaaatcctagtcatagatattcactggactggctttggactgaaatgctcctttgtaattcttttcctattgtcttttccttctagtgtcccaaaatattttctttaaagtcagcacagttctgtatatgaatctttaatgtggtatcatatatgtctacttttgtctgattcatcgatgtattatatctttataattgaatattttagctccgggtcctgttgccccttcaagcagtacatgccaaattataaataggtgctactggccttgagcatatcactgtgggacagttccccaattgtcaagtgtttagatatgtagactattgccatttgtttttttgttttggttttgctttgtgtctgaagctgaattgatttcttttttttgaatgtgaaagttgaatttcaaacgtagtcatttcttacagatggccaagacagaaagttgtggctaggttgattgagaactgttgtcttccatgtattaacacaattaagctttttatattccactctctgtgctgaccctggctgaggcattttgggagacaaggactctgaatcttctgcttccattaaagaagaactgtgatattcaacattggatttctgaggataaagataggatgattcctttgaactttgacttacttgtataaaatgtccagctaggttaggtttttgccatttcctatatactttgggtaaagctacatttgatgagcaatgtgaatgtttctgagaatgttcattcctgttttctcttaagagaatgtgctgtgtactaaatacaggccacatagtgtctgcctgttgaagatctggaaactgcctccccagatctgtattgtatttggtaggtaagggggtcagtttctttttctcattgtgtgttgataatctacacaccatctgttggaaccagggtgttattatggggaactcctcctgtgtactaggaggaggaccttagggagaccaagaggagagaagcatttcctttgatgaagtcacatcctgtctatgagcccactaatgctgtaacattggcctgaaagagagtgttctttaaaagcctttctcggctgttagtataaaaacatgatggtatcagctcttagcatgtttgcttgacccttatggaaggtataaatccacagaacttccttcccagagaactgggaaattgtcctagaaataaaccttgtacagttgagtggacatggataagcaacaatttgttactttgcaggatttgttccttggtaattgtttggtgtgtcatcctgtaaatattcatgatagtctgtttatatccttttgtatatcgttgatactggattgggtagaaaaataaattggcaattt

SEQ ID NO: 11974 - protein, 115 aa, Homo sapiens
MHIWALEGLSHLVAASFTEDRFGVVQTTLPAILNTLLTLQEAVDKYFKLPHASSKPPRISGSLVDTSYKTLRFAFRASLKTAIYRITTTFGEHLNAVQASAEHQKRLQQFLEFKE

SEQ ID NO: 11975 - DNA, 2749 bp, Homo sapiens
  CDS (66)..(1223)
atcgcagcgtcggatgttcagagcagcagaagccggcgtcgtcggatgttgtgttgcccgccaccatgagctacacaggctttgtccagggatctgaaaccactttgcagtcgacatactcggataccagcgctcagcccacctgtgattatggatatggaacttggaactctgggacaaatagaggctacgagggctatggctatggctatggctatggccaggataacaccaccaactatgggtatggtatggccacttcacactcttgggaaatgcctagctctgacacaaatgcaaacactagtgcctcgggtagcgccagtgccgattccgttttatccagaattaaccagcgcttagatatggtgccgcatttggagacagacatgatgcaaggaggcgtgtacggctcaggtggagaaaggtatgactcttatgagtcctgcgactcgagggccgtcctgagtgagcgcgacctgtaccggtcaggctatgactacagcgagcttgaccctgagatggaaatggcctatgagggccaatacgatgcctaccgcgaccagttccgcatgcgtggcaacgacaccttcggtcccagggcacagggctgggcccgggatgcccggagcggccggccaatggcctcaggctatgggcgcatgtgggaagaccccatgggggcccggggccagtgcatgtctggtgcctctcggctgccctccctcttctcccagaacatcatccccgagtacggcatgttccagggcatgcgaggtgggggcgccttcccgggcggctcccgctttggtttcgggtttggcaatggcatgaagcagatgaggcggacctggaagacctggaccacagccgacttccgaaccaagaagaagaagagaaagcagggcggcagtcctgatgagccagatagcaaagccacccgcacggactgctcggacaacagcgactcagacaatgatgagggcaccgagggggaagccacagagggccttgaaggcaccgaggctgtggagaagggctccagagtggacggagaggatgaggagggaaaagaggatgggagagaagaaggcaaagaggatccagagaagggggccctaaccacccaggatgaaaatggccagaccaagcgcaagttgcaggcaggcaagaagagtcaggacaagcagaaaaagcggcagcgagaccgcatggtggaaaggtaaccagcttccctccacccctctgcctctgcctcgctgtggggctgccgccaggagagcagggccatagctctgccagctcgccgccctctggcctcccttgggagccgccacctgctcggccgtgcatggaccctgcttcccgccaggcccagctcccaaggcctgactcatcccctgcccctctgcggccgcctggcgaccgctggcgtctgtgggccgagacctgacaccgctcggcaccgttgctcagaagctctggcgctaggtcactcggcgcacgaaccccaaggtgcactgggggcctgatgcccctgagggagggggccagctcatcagagactcaaggtccaaggcgcctgtgccgccccagctagctgccaagaggccaccgccgtgcccaggagagatggcagcacctgtgggctgtggcagcctcgggcctgccttctgccctgcccgccggccctgtcaggccgggcctgtctgcggctgagcccttcacgccccttggtcgggtctgtctgccctcagggctcccgcactggcgcttgcctcctccgcctcagactcttgctcttgctggaccttcctcagcctcgccggcgcccggcccctgggctctccagacaaagctgaccccgtggcccagataaggacgtccggcagaggatccagtttgtgtgttctctgtgcaaataccggaccttctatgaggacgagatggccagccatcttgacagcaagttccacaaggaacactttaagtacgtaggcaccaagctccctaagcagacggctgactttctgcaggagtacgtcactaacaagaccaagaagacagaggagctccgaaaaaccgtggaggaccttgatggcctcatccagcaaatctacagagaccaggatctgacccaggaaattgccatggagcattttgtgaagaaggtggaggcagcccattgtgcagcctgcgacctcttcattcccatgcagtttgggatcatccagaagcatctgaagaccatggatcacaaccggaaccgcaggctcatgatggagcagtccaagaagtcctccctcatggtggcccgcagtattctcaacaacaagctcatcagcaagaagctggagcgctacctgaagggcgagaaccctttcaccgacagccccgaggaggagaaggagcaggaggaggctgagggcggtgccctggacgagggggcgcagggcgaagcggcagggatctcggagggcgcagagggcgtgccggcgcagcctcccgtgcccccagagccagcccccggggccgtgtcgccgccaccgccgccgcccccagaggaggaggaggagggcgccgtgcccttgctgggaggggcgctgcaacgccagatccgcggcatcccgggcctcgacgtggaggacgacgaggagggcggcgggggcgccccgtgacccgagctcggggcgggcggagcccgcgtggccgaagctggaaaccaaacctaataaagttttcccatccc

SEQ ID NO: 11976 - protein, 386 aa, Homo sapiens
MSYTGFVQGSETTLQSTYSDTSAQPTCDYGYGTWNSGTNRGYEGYGYGYGYGQDNTTNYGYGMATSHSWEMPSSDTNANTSASGSASADSVLSRINQRLDMVPHLETDMMQGGVYGSGGERYDSYESCDSRAVLSERDLYRSGYDYSELDPEMEMAYEGQYDAYRDQFRMRGNDTFGPRAQGWARDARSGRPMASGYGRMWEDPMGARGQCMSGASRLPSLFSQNIIPEYGMFQGMRGGGAFPGGSRFGFGFGNGMKQMRRTWKTWTTADFRTKKKKRKQGGSPDEPDSKATRTDCSDNSDSDNDEGTEGEATEGLEGTEAVEKGSRVDGEDEEGKEDGREEGKEDPEKGALTTQDENGQTKRKLQAGKKSQDKQKKRQRDRMVER

SEQ ID NO: 11977 - DNA, 2859 bp, Homo sapiens
gattatcagctgccaaaatggtatattacttagatccttctagtcagaagcgagctatagagttggcaacaacacttgatgaatctctcactaacagaaacctccagacatgtatggaggtattggaagccttgtatgatggtagcctaggagactgtaaagaagctgctgaaatttatagagcaaattgtcataagcttttcccttatgctttggctttcatgcctcctggatatgaagaggatatgaagatcacagttaatggagatagttctgcagaagctgaagaactggccaatgaaatttgaacatcactaaacaagcaaatggaatgactttggaccatatctagtatataatatttttgtcacgcacctgctgcattgctctaacttacacagaatgagaggagtaaatgttcttgccttcaaatagtgttttacgttttttatcctgctgaaaaagtatatataaaatatctaacattacaggatagaggttcagtttcttaaaaaattaaagctgctaaaattgagtggttaaaaaagataccttatcctattcctccccacccacccatgtttttaaactaatttatataaaatctggaggctgttacagctaacaaagcaggtgtgtggcagaaatattactttaaatttgtcttgtgagattttactatatctcagacagcataaatgctgttttagcactggattctttcactgagcacaaagagttgttggggctttagcatctgactgattttgttacggggttgattctgaccataggaagtatgcaatgtgaatcactatttacagagaaacctacaacagatgcttgatgttgtagaaactgggacatatagataccaagcaaaattataagaaacctataaggtgttcaatacgcttgtgtttccaaaattcactgtacatgatcagtttggtgttcttgtaccacagtttttaactgaaggaaccagttgtaacagtctcaattttaactaaaacttgaagaactaaaacaacaatgcaaacctttcagcattgtttggccaaacttgttaaaactgtaatgcaagaaccaaatgcactgtgatgtggcaccaactaattagcaagcatgaatttttcacccaagagtgaaaaaaggaaaatctaccatggcttgaagttaaagagcagaactcctgactaccattctatgactgatcaaaagactaatagttaaaaacctcagcaggccttgttcacgatatgcagaaaaaaaagtgctgcagtttagatacctctggaatttttccacagtgtcacaggtttgtaatacttgaagccctacatttctaagaatatatttcttgctcagttgtttcaggcaagcccaagactttgtaatttttaaagggcccaagatttttttttttttttttttttcaaataacagaccagcttctttttcttgcagttacagatgtaatttcctttttgttgtcaaacataaggtaccaaatatgatgcaataaattgttttgaaaaacagttgtgtgaatatttcaactaatctgtgttgggcttctgtgaaatacacaggtggaaacagaggtgcaagccagaggcaatgtaatatgctgtaaggctagtgcagatgggagctttttagaaggggctaagtgctggtgtcagggaaattccataatgaagtagaatgctgctcctgcattaagatttcattgagggcaaggctggtggcaggtactatgaatgtaattcataatttaaaaggaaaactaaaaactattttgatttgggaaaatgagccttaatttgttaaacctatacactgagaactagcctcaggcttaatattctcattgcatttgcaagatctgagcaaataagattaagtaaaacaaatcaattgtatatataattgacctttttgtggaacatgtagtttatagaaagtatactctaaagggaatttgccgaagaccttttactgattgaacagttgtgctacaatcaacttttcatagtacatgacctgcattccacatctcagtctaacagtttagtagtgatgtaaagagaagtacaaaccgaactccagtgctttgttatgttttattaactggccctgtctcaggaacatcttaacagatggcaaaaaaaacaaaaactttttttcaactcctatgagtggcaactgaagttcttattgttgggaaagaacactagtcctacctctgccactaatgaggtgtttggaggaggtaccagccatataatagggggtgtatgtgtgaattttgtttaaactctactgtatattgaaatgaaattcatttatttgtcttgacaatgttcaaatgatgtagattgtcttagaatgaatattcataagtactcagaactcttaagatgcagatgccacccgtgaggagctaaattcctaatgtgtattgtattccaacccaattttactggaactattgaataaatcttttattttctttcaggtttacttgatagtggatacattggtgtcagaggaccttgactgggttcattttatgtccagacatcacccctgaaacactgtactgtactatcttgctctgagtagtatcaactggatcgtctcatatttgcctcattcatcctattaatttcaaatgatactgtgggggaaaaacagggttagaaaaacaagtggaaaaaatggagtgatgttgtaatctaaacaagtgccttatgtttattgctaagaactggtgttaccaacccttttgagaagaaagggtctcttgacctgtattaacataggaaagtaaagttctttttgtttttcttt

SEQ ID NO: 11978 - DNA, 2690 bp, Homo sapiens
  CDS (118)..(573)
caggaaagagtaggaaactttttggcagacttttacctggtgaatggacttgttttagaatcaaggaaaagaagagaacatctcagtgaagaggatattcttcgaaataaggccatcatggagagtttgagtaaaggtggaaacataatggaacagaattttgagccgattcgaagacagtctcttacacctcctcctcagaacactattacatgggaagaatatatatctgctgaaaatggaaaagctcctcatctgggtagagaattggtgtgcaaagagagtaagaaaacgtttaaagctacgatagccatgagccaggaatttcccttagggatagagttattattgaatgttttagaagtagtagctcccttcaagcactttaacaagcttagagaatttgttcagatgaagcttcctccaggctttcctgtaaaattagatatacctgtgtttcccacaatcacagccactgtgacttttcaggagtttcgatacgatgaatttgatggctccatctttactatacctgatgactacaaggaagacccaagccgttttcctgatctttaactgacgtggaaaaggatgccgtctaaccaaggaaagaaaatacagagaccctagaagtggatccaaatagaagggacaagtgctttcagtgaagaaaagggaattacacattgaatcgacacatcagtaatacgatacagtgaaatgggcctctaataagaatttcagcgagttttctgatgtgccattttttgtctttttaaaaatatacatattataaatgtaatagtttgacacattaatgaccctaagacctgcgtatgtgaagcagctatgagtgctgtgatttgtttttaaaaatttttacacttcttgttgaaatatatatgcatataaatatatctatatctatatctatatctaaaacactcctggaccattaacgtaaattaaatgtcttaagagatatggagcccttttaaacttgtcatctttatgcaaggtgacatttataaatattccttcgagctttgttttcataaaatgtaaactatgtaacattatgtatagttcagtaatttgaatgtttgttcaatataatgaactagaaggaatgcaattttctgtagatgaatgaaccaaatggtaaccattaaacaattgcatttatatgttgcaatacatttcagaaggagcgttcactctgcagggaataaggtacctcctttagcaccttagtgcaattcattgtggtgctatttgtttttacctgaatgtttgttactaatcttcctttcatagaacctctattttttttttttctaaacttgagtttgagtccttgttatggtcatcataaggtaatggttagcatgtttaaagatatttctcttccaaatctcagcactttaaaaaaaaatccaaatttttaaacttgcttcctaataagtacacatcggtctgattattttgtttgtttttagtagaatatggatgcattggtgtcagttttaaaaaacaatacacatattttggacaaccctacatatttaatcctttcaaaataagataaaaacattttatatgctaacagaatatatttgttacaagttaaagtccagaagtatacacaagattgattactcctattattttttttaaatcacaggaaaatattgatttcattgtctccaaagtgataaaatcatgtattactcatttttgcacttaaaatttttcttatttattccaaggtggtttgaaggtccaagtatgaaaatagattagggggattaatgtataacagttacaaagtatcatgttgtattaaagagcttacttagattgatgtttttaaaatgtatcctgatgaatgtctcaagaatgcatctgtcaagttttttagactgaccagtagcttaaacttttttcaggattttaggtaatttgaaaggagtttagagacccttattgaaaatatgttttaaaaatccaaagcataaaccgtaagaaaaattttaaataaacatctttaaagctgcatcttccatactgatacatgcattgcgtatgttgacattaaatacattttataatgaagaaaaataatcatagtaaaaaattgaaagacctaattactacgttacatggacctattgaattttgggggaacgtgttagtaaacccagactagctttgttgaatagaagttgatcgctgttatttaggaaatgggtagatcaaatgacttagagactgaattatcctatcagtggttacatggggttggagacactgaaaggcagtgatcactgttgcttctaggctcccttactttgtaggaatatggtatactttcaggaatatgctatatatgttttcataagtacagacaccttagggaagaaaaaaagtgggtaattgaagcttatggttgattaatttcctaacagcacagctatgaatattttgctggggtacactggaggtaggaagactactggaaatttttgcacttgaattttgtttttaaagcttttttctttaaagaatggtagaaacagattatccattccaaaatgtcttttctctgatcacaaatagcaaacaaatgtcaatatctcttatgatggtgaaaaaaaggaattaatcgatgcaaataaacttttcacagt

SEQ ID NO: 11979 - protein, 152 aa, Homo sapiens
MESLSKGGNIMEQNFEPIRRQSLTPPPQNTITWEEYISAENGKAPHLGRELVCKESKKTFKATIAMSQEFPLGIELLLNVLEVVAPFKHFNKLREFVQMKLPPGFPVKLDIPVFPTITATVTFQEFRYDEFDGSIFTIPDDYKEDPSRFPDL

SEQ ID NO: 11980 - DNA, 3048 bp, Homo sapiens
  CDS (140)..(2182)
gagtcctccccgcctcgcagagttgggagaaggcagggtggggggtgtggaaaaataaaaggaaaagtccttgcaccatgtagatcagcgtcccccactttggcatcccggccggccggggacctcccagtctgcggccatgaacgcgagcagcgagggcgagagcttcgcgggctcggtgcaaattccaggtggcacaacggtgctggtggagctgactcccgacatccatatctgcggcatctgcaagcagcagtttaacaacctggatgcctttgtagctcacaagcaaagtggctgccagctgacaggcacatccgcagcagcccccagcacggtccagtttgtatcggaggaaacagtgcctgccacccagactcagaccaccaccagaaccatcacctcggagacccagacaatcacagtttcagctccagaatttgtttttgaacatggctatcaaacttacctgcccacggaaagtaatgaaaaccagacagccactgtcatctctctccctgccaagtcacgcaccaaaaagcccacaacaccacctgctcagaaaaggcttaactgttgctatccaggttgccaattcaagactgcttatggcatgaaggacatggagcggcatttaaaaattcacacgggagacaaaccccataagtgtgaagtctgtggcaagtgctttagccggaaagacaagctgaaaactcacatgcggtgccacacgggcgtgaagccctacaagtgtaagacgtgtgactacgccgctgccgacagcagcagcctcaacaagcacctgaggatccactcggacgagcggcccttcaaatgccagatctgcccctacgccagccgcaactccagccagctcactgtccacctgcgatcccacacgggggacgcccccttccagtgctggctctgtagcgccaagttcaaaatcagctcggacttgaaaaggcacatgcgggtgcactcgggggagaagcctttcaagtgcgagttctgcaatgtccgctgcaccatgaaggggaacctcaagtcgcacatccgtatcaagcacagcgggaataacttcaagtgtcctcattgcgacttcctgggtgacagcaaagccaccctccggaagcacagccgcgtgcaccagtcggagcatcctgagaagtgctcggaatgcagctactcctgctccagcaaggccgccctgcgcatccacgagcgtatccactgcaccgaccgccctttcaagtgcaactactgcagcttcgacaccaaacagcccagcaacctgagcaagcacatgaagaagttccacggggacatggttaagactgaggctctagagaggaaggacaccggcaggcagagcagccggcaggtggccaagctggatgccaagaagagtttccactgcgatatatgcgatgcctccttcatgcgggaggactcgctccgcagccacaagagacagcacagtgagtacaatgagagtaagaactcggacgtgaccgttctccagtttcagatcgaccccagcaagcagcccgccacgcccctcactgtgggacacctccaggtgcccctccagcccagccaagtgccccagttcagcgagggaagagtcaaaatcatcgttgggcatcaggtgccccaggcgaacaccatcgtccaggctgccgctgctgcagtgaacatcgtcccgcctgccttggtggcccagaacccagaggaactcccagggaacagccggctgcagatcctgcgccaggtcagtctgatcgccccccctcagtcctcgcggtgtccgagcgaggcgggcgcaatgacccagccggctgtcctgctgaccacccacgagcagacggacggagccactctgcaccagactctcatccccacggcctcaggtggcccccaggaaggctctggcaatcaaactttcattaccagttcgggtattacttgcactgactttgaaggcctaaacgccttgattcaggaggggacagcagaagtgacagtggtgagcgatggaggccagaacatcgcagtggccaccacagcgccaccggtcttctcctcctcttcccagcaagaactacccaagcagacctactccatcattcaaggggcagcccatccagctttgctctgtcccgccgactccattccagattagtgcttaaaaaacaaaaggagtgggggaaaggaattgagaaaaagaaatcttaagtagaattctctaaaaggtttgctcttaatgttttctttgttttgttttgtttttgagacggagtctcgctctgtttcccaggctggagtgcagtggcgctatcttggctcactgcaacgtccgcctcccaggttcaagcgattctcatgcctcggccctccgagtagctgggaccacaggtgtacgacatcatgactggctaatttttgtatatttaatagaggcggggtttcatcatgttgaactcctgacctcaagtgatctgcccacctcagcctcccaaagtgctgggattacaggtgtgagccaccatgcctggccgtggtttgctcttaatgtttttaaggatggttgtgaatccccctggccccataataaattgtaattttatactgcttactataatttttttaacactgtaacaactttgagaccacctctgaatcgtcgcattataactgttgtagaatcttaaatgttaccaagatgattccaatgaggggttggaattaaatgcattaagtagtgaactcatgtgtttgtttccaacttgattttccaactctaataaaggtttctgtccatcttattacatttgtgtagtaaatggtacttcccagcctctcttttgccccattctggaatactccccagagtttgggggtgttcatgttttatacatgtaagtctgttggcatgaaggaccattttctacataatatgacatggatacttgacccaaaaaaaatgtttagtgctaatgagcagaaaatgaatggttccataataaattgatatctgattaaaat

SEQ ID NO: 11981 - protein, 681 aa, Homo sapiens
MNASSEGESFAGSVQIPGGTTVLVELTPDIHICGICKQQFNNLDAFVAHKQSGCQLTGTSAAAPSTVQFVSEETVPATQTQTTTRTITSETQTITVSAPEFVFEHGYQTYLPTESNENQTATVISLPAKSRTKKPTTPPAQKRLNCCYPGCQFKTAYGMKDMERHLKIHTGDKPHKCEVCGKCFSRKDKLKTHMRCHTGVKPYKCKTCDYAAADSSSLNKHLRIHSDERPFKCQICPYASRNSSQLTVHLRSHTGDAPFQCWLCSAKFKISSDLKRHMRVHSGEKPFKCEFCNVRCTMKGNLKSHIRIKHSGNNFKCPHCDFLGDSKATLRKHSRVHQSEHPEKCSECSYSCSSKAALRIHERIHCTDRPFKCNYCSFDTKQPSNLSKHMKKFHGDMVKTEALERKDTGRQSSRQVAKLDAKKSFHCDICDASFMREDSLRSHKRQHSEYNESKNSDVTVLQFQIDPSKQPATPLTVGHLQVPLQPSQVPQFSEGRVKIIVGHQVPQANTIVQAAAAAVNIVPPALVAQNPEELPGNSRLQILRQVSLIAPPQSSRCPSEAGAMTQPAVLLTTHEQTDGATLHQTLIPTASGGPQEGSGNQTFITSSGITCTDFEGLNALIQEGTAEVTVVSDGGQNIAVATTAPPVFSSSSQQELPKQTYSIIQGAAHPALLCPADSIPD

SEQ ID NO: 11982 - DNA, 3935 bp, Homo sapiens
  CDS (47)..(1384)
tctaaacatcattccaacctttgcaaatcttatagactacccatccatgaaaaacgctttgataccaagaattaaaaatgcttgtctacaaacatcttcccttgcggttcgtgtaaattcattagtgtgcttaggaaagattttggaatacttggataagtggtttgtacttgatgatatcctacccttcttacaacaaattccatccaaggaacctgcggtcctcatgggaattttaggtatttacaaatgtacttttactcataagaagttgggaatcaccaaagagcagctggccggaaaagtgttgcctcatcttattcccctgagtattgaaaacaatcttaatcttaatcagttcaattctttcatttccgtcataaaagaaatgcttaatagattggagtctgaacataagactaaactggagcaacttcatataatgcaagaacagcagaaatctttggatataggaaatcaaatgaatgtttctgaggagatgaaagttacaaatattgggaatcagcaaattgacaaagtttttaacaacattggagcagaccttctgactggcagtgagtccgaaaataaagaggacgggttacagaataaacataaaagagcatcacttacacttgaagaaaaacaaaaattagcaaaagaacaagagcaggcacagaagctgaaaagccagcagcctcttaaaccccaagtgcacacacctgttgctactgttaaacagactaaggacttgacagacacactgatggataatatgtcatccttgaccagcctttctgttagtacccctaaatcttctgcttcaagtactttcgcttctgttccttccatgggcattggtatgatgttttctacaccaactgataatacaaagagaaatttgacaaatggcctaaatgccaatatgggctttcagacttcaggattcaacatgcccgttaatacaaaccagaacttctacagtagtccaagcacagttggagtgaccaagatgactctgggaacacctcccactttgccaaacttcaatgctttgagtgttcctcctgctggtgcaaagcagacccaacaaagacccacagatatgtctgcccttaataatctctttggccctcagaaacccaaagttagcatgaaccagttatcacaacagaaaccaaatcagtggcttaatcagtttgtacctcctcaaggttctccaactatgggcagttcagtaatggggacacagatgaacgtgataggacaatctgcttttggtatgcagggtaatcctttctttaacccacagaactttgcacagccaccaactactatgaccaatagcagttcagctagcaatgatttaaaagatctttttgggtgaggtgtcttacttctattttgaaggattatttcagtttcaatcatgggtgagctgatttacatctttatatagttggcttggaggaagtacttctatgggaaagtgaacagttctgtgacaggaaacatctctgtccatgccagcatagtagttgtatggacttctaaccagttgagttttttaaagcattgaggattttttcctcttaccaactcctcttcaggtttttaaagacccagcccttcccaatctcaaagagaaaaaggaaactgagttatcttgaataacataactttttaatcaaatgtttattttggcttgtggatcttggtgttatttaaaaaattgaggtgatggtcattgcaagctcatctattaagtactatatggtacacagtctatgagtcattagtcttcattttaatatgtaaaaaatcttgatgctgtattgatttgtttgcatttaagatgacagtgagaaaatgataagcataaagagaagtatcaggttatttgctttttccaaacttttcagatgaactattgtttagtacagagactgagcaaatactacaaaattcaacttaaccttcatttcattggtttaaatgcgttattaaccatcttaagtgcaaactaatcattgtaaattatattttagcatggtctgcctcaaatagtaatgtatttttctgcattcacttggatatatttagaatcacttttttcctcctgtatcaaggaagaggtatgtgctgatttgtttggatatttgacaaggcactctgatgtgacttccctgactactaccttcatatttcatttcaaattcaaacttctgaggttgcagcatatatgaattgcattttcaaaagaagatttgtaagaattaaactatatttatgagtaaacttttgaggtttctgctgtattgtttcaaatgtaataaactttacttctgtaaaaattgagcagttgtatcttctgaccaccaacagattttcagcttgccatgatagtctgacctcattaattaccgctactgaagttcaatttttttctaggaattttaggaaccttttgtttaaatattttaatttctattagccatttttaggaaggaaagaatcaattctcttaacaggaaacatgctttatttttcaaaacctttctctgatatttttctttaatttgctgattattcaaccacagagccttatgctataaatgtcatttgtattttaaaaaataatattccactcataaaactttaaaaccatctttcaacgaactatatatgtattatagttgctgccatagagttgatggtttttaattatctggaaccagcaatcatttaaaataaaccatattaagtttagtatgctggtattgtttattcattttatatgaatattcattgaaaatatatacacaatatatgtaatacacagcacttgattacaaaatgtaatttaattatattattgctggcagcattcagttaagagggtactttaaaaaatagaagtcagctttcacatctgatttctgtatgggctgtacttggttaacttgattttagaaaaaggactaacagaattgctaaagaaatgcatccaataaatgaaaaacagtaggaagatcaaatgtttttgtcaaatatattcacaacttgaccagattagctgtcctgtttgtaatgcaatattaatatgtcttttgggaaaaagcctacatatggaataaaataagtattgaagaatttttctttgtaacaatttagtagtcactgtttattgagaaattgttttttattttgtaaaataacatgatgttagtgttgaactcttaaacagaaagaaagcttaatataacagcttatagaacttgaactactaaatatgaaaataagtcatttgaaaaaaatacagtatgtaaaatttgttcattcgttgaggtaatggtgctatgtttttacaaaattgttcctacaccttttttctacttcaggtattttatttcaaccatttccatcaattgaactgttaccattgcctttttctgttgagaaattgcctctgaaaaatagtgctatttttcagcttaagtgttcttaagtgaatgaaattttcaaagtactagatcaccttaaaattatttcacgtactgaagacaattaagtccgttatgtttagagtagaaaatgtttaggttaaagagcatctgtcaacagaatctacaaaaaagattcccttgcatttgaattagttctctattctcctattgctaaatgtgtgatatatagagaggatgtataaaaggaaatggaaatagactatgtacttgtctggtttttgtttgtttttattttggaatgcttataagcctcctttacactgaataaggaagtagtttttgttttcttttgacctgtaaaatacctcacatggttgtttttacacatgaaagaaaaaggtatatgcgaacatacctgatatcaagaggagtatgcaccaaataaattttagctttgataaaactttc

SEQ ID NO: 11983 - protein, 446 aa, Homo sapiens
MKNALIPRIKNACLQTSSLAVRVNSLVCLGKILEYLDKWFVLDDILPFLQQIPSKEPAVLMGILGIYKCTFTHKKLGITKEQLAGKVLPHLIPLSIENNLNLNQFNSFISVIKEMLNRLESEHKTKLEQLHIMQEQQKSLDIGNQMNVSEEMKVTNIGNQQIDKVFNNIGADLLTGSESENKEDGLQNKHKRASLTLEEKQKLAKEQEQAQKLKSQQPLKPQVHTPVATVKQTKDLTDTLMDNMSSLTSLSVSTPKSSASSTFASVPSMGIGMMFSTPTDNTKRNLTNGLNANMGFQTSGFNMPVNTNQNFYSSPSTVGVTKMTLGTPPTLPNFNALSVPPAGAKQTQQRPTDMSALNNLFGPQKPKVSMNQLSQQKPNQWLNQFVPPQGSPTMGSSVMGTQMNVIGQSAFGMQGNPFFNPQNFAQPPTTMTNSSSASNDLKDLFG

SEQ ID NO: 11984 - DNA, 3463 bp, Homo sapiens
  CDS (106)..(2991)
agcgcgcggaagaaaaaccagcaagaaggcggcgggggaagatggcggtcctggggtagagtttgcaagctttctgactaggctagtcgagtaactattcgggtcatggcgtcaaactcaactaagtctttcctggcagatgccggctatggcgaacaggaactggatgccaactctgcccttatggaattggacaaaggcctaagatctggcaaacttggtgaacagtgtgaagcagttgttcgctttcccagactttttcagaagtatccattccctattcttatcaattctgcattcctaaagttagctgatgttttcagagttggaaataatttcctgaggctatgtgttcttaaagttacccaacaaagtgagaaacatttggagaagattctaaatgtggatgaatttgtgaagagaattttttctgtgattcatagtaatgatcctgtggcaagagccatcaccctccggatgttgggaagtctggcatcaataattcctgagaggaagaatgctcatcatagtattcgtcagagtttagattcacatgataatgtagaagttgaagctgctgtttttgctgctgcaaacttctctgcacagtcaaaggattttgctgtaggaatctgtaacaaaatcagtgaaatgattcaaggtttagcgacaccagtagacttgaagctaaaattgatacccattctacagcacatgcaccatgatgcaatcttggcttccagtgctcgtcagcttttacaacagctggtcacatcctatccgtccaccaaaatggtgattgtgtctttgcacactttcactctgcttgcagcgtcatctttggttgatacacctaagcagattcagcttctgttgcagtatttgaagaatgatcccaggaaggcagtaaagagacttgctattcaagatctgaaattacttgctaataaaacaccacatacttggagtagggagaatattcaggcactttgtgagtgtgccctccagactccttatgacagcttaaaactagggatgttgtctgtcctttccacactatcagggaccatcgccatcaaacattacttcagtatagttccaggaaatgtgagttcttctcccagatcttctgatttagtcaaattagcccaagagtgctgttaccataataacaggggcattgcagctcatggagttagagtcctaactaatataactgtttcttgtcaagaaaaggatcttttggcactggaacaagatgctgtctttggcctggaatccctactggtactttgtagtcaagatgatagtccaggtgctcaggccactttaaagattgctctaaactgtatggtgaagttggccaagggcaggccccatcttagccagtcagtagttgagaccttgttgactcaattgcacagtgctcaagacgctgcccggattttgatgtgccattgcctggcagccattgccatgcaactgccggtgctgggtgatgggatgcttggtgacctcatggagctgtacaaggtgattggacgatcagccacagacaagcaacaagaacttctggtgagtttggctactgtgatttttgttgcaagtcagaaggcattgtctgtggaaagtaaggcagtaattaagcagcagcttgaaagtgtctccaatggatggactgtataccgtattgccagacaggcttccagaatgggtaatcatgacatggccaaagagctttatcagagtttgctgactcaggttgcctcagaacatttctacttctggctaaatagtttgaaggagttttcacatgcagaacagtgtctcactgggttgcaagaggaaaattatagttcagcactttcttgcattgctgaatctttaaaattctatcacaaagggattgcttccttaacagcagctagtacaccactgaatcctttaagctttcagtgtgaatttgtaaaactcaggattgaccttttacaagccttctctcaacttatctgtacttgtaatagcctgaagacaagcccaccacctgcaattgccacaacaattgccatgaccttaggaaatgacctccagaggtgtggtcgcatctccaatcagatgaaacagtccatggaagaatttcgaagccttgcttctcgatatggagatctttaccaggcatcttttgatgctgactcagcaactttgaggaatgttgaactacagcagcagagctgtttactgatatctcatgcaatagaagccctgattttggatccagaatcagcaagtttccaggaatatggatctactggaacagcccatgctgatagtgaatatgaaagaagaatgatgtctgtatataatcatgtcttggaggaggtagaatcactcaatcggaaatatacccctgtttcttatatgcacacagcatgcctctgcaatgccatcattgctttgctgaaagttcccctttctttccagagatattttttccagaaactacagtctaccagcatcaagcttgctctgtcaccatcgccccggaatcctgcagagcccattgctgtccagaataaccagcagctggcgctaaaggtagagggagtggttcagcacggatctaaaccaggactcttccgcaaaattcagtctgtctgtctgaatgtttcttccacactgcagagtaaatctggacaagactacaagatacccattgacaacatgaccaatgagatggagcaaagggttgaacctcataatgattacttcagtactcaatttctgttgaactttgctatccttggaacacacaacattacagtggaatcttctgtgaaagatgccaatggtatagtatggaagactggtcccagaactaccatatttgtaaaatccctggaagacccttattcccagcaaattcgcttacaacagcagcaagcccagcagccattacagcagcagcagcaacgcaatgcctacacacggttttaaccatggaatgaatgcactgcagactctcaagagatcaatcaaattgccagaaacagtttggtttttcatatggaataagtattaaagttacagtgtagttcatttattcattgatttttgtaatgtaatattctggaaaaaattttgttttcttaaaaattttgtctgacagctgggcgtggttgctcacgcctgtaatcccagcactttgggaggctgaggtgggcggctcacgaggagatcaagaccatcctggctaacacagtgaaaccccgtctccactaaaaaatacaaaaaaattagccaagcatggtggcaggcgcctgtagtcccagctacttgggaggctgaggcaggagaatggtgtgaacctgggaggcggagcttgcagtgagccgagactgtgctccagcctgggcgacagagcgagactccgtctcaaaaaaataaataaatacattttgtctgg

SEQ ID NO: 11985 - protein, 962 aa, Homo sapiens
MASNSTKSFLADAGYGEQELDANSALMELDKGLRSGKLGEQCEAVVRFPRLFQKYPFPILINSAFLKLADVFRVGNNFLRLCVLKVTQQSEKHLEKILNVDEFVKRIFSVIHSNDPVARAITLRMLGSLASIIPERKNAHHSIRQSLDSHDNVEVEAAVFAAANFSAQSKDFAVGICNKISEMIQGLATPVDLKLKLIPILQHMHHDAILASSARQLLQQLVTSYPSTKMVIVSLHTFTLLAASSLVDTPKQIQLLLQYLKNDPRKAVKRLAIQDLKLLANKTPHTWSRENIQALCECALQTPYDSLKLGMLSVLSTLSGTIAIKHYFSIVPGNVSSSPRSSDLVKLAQECCYHNNRGIAAHGVRVLTNITVSCQEKDLLALEQDAVFGLESLLVLCSQDDSPGAQATLKIALNCMVKLAKGRPHLSQSVVETLLTQLHSAQDAARILMCHCLAAIAMQLPVLGDGMLGDLMELYKVIGRSATDKQQELLVSLATVIFVASQKALSVESKAVIKQQLESVSNGWTVYRIARQASRMGNHDMAKELYQSLLTQVASEHFYFWLNSLKEFSHAEQCLTGLQEENYSSALSCIAESLKFYHKGIASLTAASTPLNPLSFQCEFVKLRIDLLQAFSQLICTCNSLKTSPPPAIATTIAMTLGNDLQRCGRISNQMKQSMEEFRSLASRYGDLYQASFDADSATLRNVELQQQSCLLISHAIEALILDPESASFQEYGSTGTAHADSEYERRMMSVYNHVLEEVESLNRKYTPVSYMHTACLCNAIIALLKVPLSFQRYFFQKLQSTSIKLALSPSPRNPAEPIAVQNNQQLALKVEGVVQHGSKPGLFRKIQSVCLNVSSTLQSKSGQDYKIPIDNMTNEMEQRVEPHNDYFSTQFLLNFAILGTHNITVESSVKDANGIVWKTGPRTTIFVKSLEDPYSQQIRLQQQQAQQPLQQQQQRNAYTRF

SEQ ID NO: 11986 - DNA, 3199 bp, Homo sapiens
  CDS (16)..(1692)
gaaaaggttgcgaagatggcgacggccttgagcgaggaggagctggacaatgaagactattactcgttgctgaacgtgcgcagggaggcctcttctgaagagctgaaagctgcctaccggaggctctgtatgctctaccatccagacaagcacagagacccagagctcaagtcacaggcggaacgactgtttaaccttgttcaccaggcttacgaagtgcttagtgacccccaaaccagggccatctatgatatatatgggaagagaggactggaaatggaaggatgggaggttgtggaaaggaggagaacccctgctgaaattcgagaggagtttgagcggctgcagagagagagagaagagaggagattgcagcagcgaaccaatcccaagggaacgatcagcgttggagtagatgccaccgacctttttgatcgctatgatgaggagtatgaagatgtgtccggcagtagctttccgcagattgaaattaataaaatgcacatatcccagtccattgaggcacccttgacagcgacagacacagccatcctctctggaagcctctcaacccagaatggaaatggaggaggttccattaactttgcgctcagacgagtaacttcggcaaagggatggggagagttggaatttggagctggagacctacaggggcctttgttcggtctcaagctgttccgtaatctcacaccaagatgctttgtgacaacaaactgtgctctgcagttttcatcccgtggaatccgacccggcctgaccactgtcctagctcggaacctagacaagaacaccatgggctacctgcagtggcgatggggtatccagtcagccatgaacactagcatcgtccgagacactaaaaccagccacttcactgtggccctgcagctgggaatccctcactcctttgcactgatcatctatcagcacaaattccaagatgacgatcagactcgtgtgaaaggatccctcaaagcaggcttctttgggacggtggtggagtacggagctgagaggaagatctccaggcacagcgttttgggtgcagctgtcagcgttggagttccacagggcgtttctctcaaagtcaagctcaacagggccagtcagacatacttcttccctattcacttgacggaccagcttctgcccagcgccatgttctatgccaccgtggggcctctagtggtctactttgccatgcaccgtctgatcatcaaaccatacctcagggctcagaaagagaaggaattggagaagcagagggaaagcgccgccaccgatgtgctgcagaagaagcaagaggcggagtccgctgtccggctgatgcaggaatctgtccgaaggataattgaggcagaagagtccagaatgggcctcatcatcgtcaatgcctggtacgggaagtttgtcaatgacaagagcaggaagagcgagaaggtgaaggtgattgacgtgactgtgcccctgcagtgcctggtgaaggactcgaagctcatcctcacggaggcctccaaggctgggctgcctggcttttatgacccgtgtgtgggggaagagaagaacctgaaagtgctctatcagttccggggcgtcctgcatcaggtgatggtgctggacagtgaggccctccggataccaaagcagtcccacaggatcgatacagatggataaactgccaagaaccagatttttaaaaggccgcaaaaaatcttttcctgggagtctacaaatttggaaatgaaaaaacccagacatcagatgtttttattttatattattattatagaaggtggtaccattatcaattatgtgaagggacatgcagacaccccagcttttgagggtgctgggggtaggactgaggcagccccactgggaaccagactgcagcctggcccatggctgttttcccaaggatcagttcctggagggaagggctctggccctgactccgctgtgtcccgagcacacgtgctgaccgcagcccgccgccctgtagttcttggctgggtctggaggtgtctgtggagcaccctgccctcaccacaggagcgtgagccacttctgcagtccaagctgaacatgggaaacaacctgaaaagcaggcaggcctcccggtcagggagcctctgctgtgctggcttcccatgaccacctcctcctgctgaaatattactgcttgaatctggagcagattgcgggtttataaaactgctttttatctgagaacaaacgggtttggaaattagtcgtcttttttccccactcccagagctgctcaaatcattccaccggccccctcggcttgggacagggtagtgtaactcccgatcccagggcctagccctgacacaggtggcttcccgtatcccggtgggaaaacgccctgccaccagcgggcttgagctggcctgtgtccctccactgcctgcaccacccacctccagagtgcagtgctgggcaagggcagctcaagaggacaggaccaggcgcttggcaagacatcagacacacccaacccaaaggcgtggaccccaggcccggcccgtggtacccagcaggtggcactgcagctccccgctcctgcaggtccagcgtcctcacaggaacaccagggcctgtgctccggagccttccttcagacccttcctccacgtgcccacttgggatgcagaatgcagcggagctaggaccccctccacggcctggacctcggctgcagtaaagttacgtgaggcctgtctctcggggcctggaagtggcagccatcagttgctcttgctgacccctcggagcaagcgccgcacaggtggtggctgagacagctggcgtggggggccccaagctgcgccggcctccagcccacccacagctgttgctgaagtcaggcctccctccccagcactggtatctgagtaacggctaagaacctccttcctctggttttgaaaagcagttcgggttgtccaattctgtaacattcatctccattttttaaaaaggtttctctgacggccccacggcccgagccgcggtgagcgtcgtgttgcatgagcctgggccccgggcttcccgtgcgcctctgccgcaggtgcttctgggcacccatcctctgcgtttcatttgcagtcgactgtacagaaggcactcaccacaataaacctttcctgaaagc

SEQ ID NO: 11987 - protein, 559 aa, Homo sapiens
MATALSEEELDNEDYYSLLNVRREASSEELKAAYRRLCMLYHPDKHRDPELKSQAERLFNLVHQAYEVLSDPQTRAIYDIYGKRGLEMEGWEVVERRRTPAEIREEFERLQREREERRLQQRTNPKGTISVGVDATDLFDRYDEEYEDVSGSSFPQIEINKMHISQSIEAPLTATDTAILSGSLSTQNGNGGGSINFALRRVTSAKGWGELEFGAGDLQGPLFGLKLFRNLTPRCFVTTNCALQFSSRGIRPGLTTVLARNLDKNTMGYLQWRWGIQSAMNTSIVRDTKTSHFTVALQLGIPHSFALIIYQHKFQDDDQTRVKGSLKAGFFGTVVEYGAERKISRHSVLGAAVSVGVPQGVSLKVKLNRASQTYFFPIHLTDQLLPSAMFYATVGPLVVYFAMHRLIIKPYLRAQKEKELEKQRESAATDVLQKKQEAESAVRLMQESVRRIIEAEESRMGLIIVNAWYGKFVNDKSRKSEKVKVIDVTVPLQCLVKDSKLILTEASKAGLPGFYDPCVGEEKNLKVLYQFRGVLHQVMVLDSEALRIPKQSHRIDTDG

SEQ ID NO: 11988 - DNA, 2833 bp, Homo sapiens
  CDS (86)..(1573)
tgaattagaagattttccagtacttggaattgactgtgagtgggtaaatttggaaggcaaagccagccctctgtcacttctacaaatggcctccccaagtggcctgtgtgtcttggttcgcctgcccaagctaatctgtggaggaaaaacactaccaagaacgttattggatattttggcagatggcaccattttgaaagttggagtgggatgctcagaagatgccagcaagcttctgcaggattatggcctcgttgttagggggtgcctggacctccgatacctagccatgcggcagagaaacaatttgctctgtaatgggcttagcctgaagtccctcgctgagactgttttgaactttccccttgacaagtcccttctacttcgttgcagcaactgggatgctgagactctcacagaggaccaggtaatttatgctgccagggatgcccagatttcagtggctctctttcttcatcttcttggataccctttctctaggaattcacctggagaaaaaaacgatgaccacagtagctggagaaaagtcttggaaaaatgccagggtgtggtcgacatcccatttcgaagcaaaggaatgagcagattgggagaagaggttaatggggaagcaacagaatctcagcagaagccaagaaataagaagtctaagatggatgggatggtgccaggcaaccaccaagggagagaccccagaaaacataaaagaaagcctctgggggtgggctattctgccagaaaatcacctctttatgataactgctttctccatgctcctgatggacagcccctctgcacttgtgatagaagaaaagctcagtggtacctggacaaaggcattggtgagctggtgagtgaagagccctttgtggtgaagctacggtttgaacctgcaggaaggcccgaatctcctggagactattacttgatggttaaagagaacctgtgtgtagtgtgtggcaagagagactcctacattcggaagaacgtgattccacatgagtaccggaagcacttccccatcgagatgaaggaccacaactcccacgatgtgctgctgctctgcacctcctgccatgccatttccaactactatgacaaccatctgaagcagcagctggccaaggagttccaggcccccatcggctctgaggagggcttgcgcctgctggaagatcctgagcgccggcaggtgcgttctggggccagggccctgctcaacgcggagagcctgcctactcagcgaaaggaggagctgctgcaagcactcagagagttttataacacagacgtggtcacagaggagatgcttcaagaggctgccagcctggagaccagaatctccaatgaaaactatgttcctcacgggctgaaggtggtgcagtgtcacagccagggtggcctgcgctccctcatgcagctggagagccgctggcgtcagcacttcctggactccatgcagcccaagcacctgccccagcagtggtcagtggaccacaaccatcagaagctgctccggaaattcggggaagatcttcccatccagctgtcttgatagctgctttcctcccagttaggacaagtgggaagctggagccaaggttgaagagtcacctcttcccattttagtacatcattaattgtcaaagcctgtgtgacacaactcagaatactaacctagactaatcccaggatgcttctgctggagcaaagatattgtttgaaggagagtttatggttttggattttaaacgggcagggtcttttttcctctcatttttgtggacaagagaggccttcgcctttatttttactctccctcttctgctgtccctgtgcagaggaaaaatgaagaattctcccagaagtgacttgtcaagacttaaaaaaaatgtttttaatgcatttcttccttgtctagtgcctcggtttatctctaacaggggctgtccagtatatcggtcctgttaggaggggagaaaaagttcttccaaaggctggagaagtgaacaaggagtcaaatttattttcccaattcaacttcataattatcatttccttggcttcatgctctcccgtaactcatgtggttgggatccatcccatctgggtcacttcagtctacttcacgtacttgaaaaggctttcctttacacttccaggaccaaacagcaacttcctgccacacacttccaccctatcactgggagaaatccttttctggacatgagcctttgacctgggtggggcagaaagaaccacaaactccatctcccaatagaactttgaaattcactcagcttttcctttcatgctgtttgttgcctgcttgttgcactcctcctgccccagaactgcaagatttttagcttcacccctttctgagagtaatgttatcttttatcagaatcagtatcagttcccctgtattctgtgcttcatcgaatttgcaagactgacctcttttaagcatttaattcactcccagagtcatctggtcaggttgcaatatgaggacttctctgtctcctctgaagcctgggacactgagcttacttaatacattagatgttcaaaagaggagcgttgtttcatctttcaaaatgttaggccattactttgagtataaaatcgacttattaatgattagtaatttttctaaagtattgggaaaactttcttattttataagatcttaacaagcttaaaaaagaattttatgaccagaatccaacaagagctctattttggaattgtgcccaagttggtgatgtttactctaaaattaataataaaactacttgtaagcaac

SEQ ID NO: 11989 - protein, 496 aa, Homo sapiens
MASPSGLCVLVRLPKLICGGKTLPRTLLDILADGTILKVGVGCSEDASKLLQDYGLVVRGCLDLRYLAMRQRNNLLCNGLSLKSLAETVLNFPLDKSLLLRCSNWDAETLTEDQVIYAARDAQISVALFLHLLGYPFSRNSPGEKNDDHSSWRKVLEKCQGVVDIPFRSKGMSRLGEEVNGEATESQQKPRNKKSKMDGMVPGNHQGRDPRKHKRKPLGVGYSARKSPLYDNCFLHAPDGQPLCTCDRRKAQWYLDKGIGELVSEEPFVVKLRFEPAGRPESPGDYYLMVKENLCVVCGKRDSYIRKNVIPHEYRKHFPIEMKDHNSHDVLLLCTSCHAISNYYDNHLKQQLAKEFQAPIGSEEGLRLLEDPERRQVRSGARALLNAESLPTQRKEELLQALREFYNTDVVTEEMLQEAASLETRISNENYVPHGLKVVQCHSQGGLRSLMQLESRWRQHFLDSMQPKHLPQQWSVDHNHQKLLRKFGEDLPIQLS

SEQ ID NO: 11990 - DNA, 3044 bp, Homo sapiens
  CDS (318)..(2816)
attcttccacccggcaccggctccgcaatgaacaacttcaggttcactgagctgagcggattccactcgctgtgccctcggagcctgcctgaatctcccgcccagtctcaaaccatgcagctgagtaactgcaagggcgcctttgaggagtagcacgcagagagtgtcaatgaagacctcaaagtctggagaaaaatgacctttcatggaataagaagtatacctccttctacatgtttttgtcttactgacctctgataactggaacacatgactctgggtctgtagaaagtcaactgatcaaactcatcctcaccatgcatcaactgttcagactggttttgggacaaaaagatctttcacgagctggggacctcttctccttagatgactctgagattgaagacagccttacagaagctttggagcaaattaagataattagctcatcttcagattaccaaaccaataacaatgaccaggcagtagttgaaatctgtatcacaagaatcacaacagccatcagagagaccgagtccattgaaaagcatgcaaaggcccttgtggggctctgggactcctgcttggaacataacctgagaccctttgggaaagacgaagacactcctcatgcaaaaatcgcatctgatatcatgagttgcattttacagaattacaaccgacccccagtgatggcattagccatccccattgcagtgaaattcctccacagaggcaacaaggaactgtgcaggaatatgtctaactacctgtctctggctgcaattaccaaggcagatctcctggctgatcacacggaagttatagtaaagagcatactccaaggtaacaccatgttgttgagagtgttacctgctgtgtatgaaaagcagcctcagccaattaatagacacctgacagaactcctggccttgatgtctcagctggaacagccagaacagtaccatctactacggcttttgcatgtagcagcaaagaaaaaacaactcgaggtagttcagaagtgtattcctttcctaattgggcatttgaaggattcaacccataatgacatcatcctaaacatcctcatggagatagcagtctatgagccagtggctttgaacagttttcttccaatgctgaaagagattggtgagagattcccctacctcactggacagatggcaaggatttatggagctgttgggcatgtggatgaagagagagccaggagctgcctgacatacctggtgagccaactggccaacatggagcattcgtttcaccatattctcctgctggagattaaaagcatcaccgacaccttctcctcaatcttgggccctcagagcagagacatcttccgcatgagcaacagcttcaccgccattgctaaactccttacccgacaactggaaaataccaaggctggaagtggcaggagaaaaatcagcactgaaattgaattccctgagaaactggaagaaaccaagctcatagtaactgaaaatgaagaccatgaaaaactccaagttaaaatccaggcttttgaagacaagataaatgcagggagcaatacccctggctctatcagaagatatagtctgggccaagtttctaaagaagaaagaaaaaacattagatttaacaggtcaaaaagtttggctttccacactatgctcacaaagggtgtgggttcagatgacggcgaagatgaaaacaggggagacataccagccagcatctctctttcagaaatagacccacttggccaaggaaatgacaagctgccgtttaagacagacactgagagatcacagctgggggagtcttcagtttcatacccaaatattatacatatagactcagagaatttgtcagaaactgttaaagaaaactcccaggaagaaactccagagacaactgcaagtcctatagaataccaagataagctctacttgcacttaaaaaaaaacctcagcaaagtgaaagcatatgccatggaaattggaaagaagattccagtccctgatcagtgtaccattgaagacactgtgagaagttgtgtagcaaagttgttcttcacctgctccctgaagggtcattactgcctatacagtaagtccagttttattctcatcagccaagaacctcagccatggatccagatcatgtttctatttcagcagagcctgtttcctgaacccctgtccattcagagtcattctgtgcaattcctcagagctctgtgggagaagacccaggcagggggtgctcacagctttgaaactgccatgatggagtccacgtttccacagcagaaggatctggaccaggtacagctccatctggaagaagtgaggttctttgacgtgtttggcttcagtgaaacagcaggagcatggcaatgcttcatgtgcaacaatcctgagaaagcaactgttgtaaatcaagatggccagcctctcatagaaggaaaacttaaagagaagcaagtcagatggaagttcatcaaaaggtggaaaacacgctattttacactggctggaaatcaacttctgtttcaaaaaggaaagtctaaagatgaccctgacgactgcccaatagaactcagcaaagtacagagtgtgaaggctgtggccaagaaacgcagggaccgctctctcccccgggctttcgaaatcttcacagacaataaaacctatgtctttaaggccaaggatgagaagaatgcagcagaatggctccagtgcatcaacgtggcagttgcccaagccaaagaaagggaaagtagagaagtaaccacatatctgtagggatttataagtcagccatgacaattatacaccacaggcattgtattatcattgccaatgtcaagaaaaagagctaaatttaccaagccatgttgttttttactaaataccaatggaattgttgtcctttaagaagaagggcctaaaatggcaggattcttagtaaatgtcatactctaacagctttagtattgacttcagaatatatctgatgcccacaaaaat

SEQ ID NO: 11991 - protein, 833 aa, Homo sapiens
MHQLFRLVLGQKDLSRAGDLFSLDDSEIEDSLTEALEQIKIISSSSDYQTNNNDQAVVEICITRITTAIRETESIEKHAKALVGLWDSCLEHNLRPFGKDEDTPHAKIASDIMSCILQNYNRPPVMALAIPIAVKFLHRGNKELCRNMSNYLSLAAITKADLLADHTEVIVKSILQGNTMLLRVLPAVYEKQPQPINRHLTELLALMSQLEQPEQYHLLRLLHVAAKKKQLEVVQKCIPFLIGHLKDSTHNDIILNILMEIAVYEPVALNSFLPMLKEIGERFPYLTGQMARIYGAVGHVDEERARSCLTYLVSQLANMEHSFHHILLLEIKSITDTFSSILGPQSRDIFRMSNSFTAIAKLLTRQLENTKAGSGRRKISTEIEFPEKLEETKLIVTENEDHEKLQVKIQAFEDKINAGSNTPGSIRRYSLGQVSKEERKNIRFNRSKSLAFHTMLTKGVGSDDGEDENRGDIPASISLSEIDPLGQGNDKLPFKTDTERSQLGESSVSYPNIIHIDSENLSETVKENSQEETPETTASPIEYQDKLYLHLKKNLSKVKAYAMEIGKKIPVPDQCTIEDTVRSCVAKLFFTCSLKGHYCLYSKSSFILISQEPQPWIQIMFLFQQSLFPEPLSIQSHSVQFLRALWEKTQAGGAHSFETAMMESTFPQQKDLDQVQLHLEEVRFFDVFGFSETAGAWQCFMCNNPEKATVVNQDGQPLIEGKLKEKQVRWKFIKRWKTRYFTLAGNQLLFQKGKSKDDPDDCPIELSKVQSVKAVAKKRRDRSLPRAFEIFTDNKTYVFKAKDEKNAAEWLQCINVAVAQAKERESREVTTYL

SEQ ID NO: 11992 - DNA, 3803 bp, Homo sapiens
  CDS (122)..(1162)
agctgtgagacgacgagtgcgtgaagtgaaggcgattgagaggggctgagggaattgtcctctgtggaagggactttcttttggccctaggccccttcctgcccctgtcgtcagcagagagatggaaaacttgatgactagctccaccctaccgcccctttttgcagatgaagacggttccaaggagagtaatgatctggctaccactgggttaaatcacccagaggttccatacagtagtggcgccacatcatccaccaacaatccagaatttgtggaggatctctctcaaggtcagttgcttcagagtgagtcttcaaatgcagcagaaggcaatgaacagaggcatgaagatgagcaacgaagtaaacgaggaggttggtccaaaggaagaaagaggaagaaacctcttcgagacagcaatgcacccaaatccccccttacaggatatgttcggttcatgaatgagcgtcgagaacaacttcgagcaaagagaccagaagtcccatttccagaaatcacaaggatgttaggcaatgaatggagtaaactgcctcctgaggaaaaacagcgctaccttgatgaagcagacagagataaggagcgttacatgaaggaactggaacagtatcagaaaacagaggcctacaaggtcttcagtaggaaaacccaggaccgtcagaaaggcaaatctcataggcaagatgcagcccggcaggccactcatgatcatgagaaagaaacagaggtaaaggaacggtctgtttttgacatccctatatttacagaggaattcttgaaccatagcaaagctcgggaagcagagctccgccagcttcgcaaatccaacatggagtttgaggagaggaatgcagccctgcaaaagcacgtggagagcatgcgcacagcagtggagaagctggaggtggatgtgatccaggagcggagccgcaacacagtcttacagcagcacctggagaccctgcggcaggtgctgaccagcagctttgccagcatgcccttgcctggaagtggagagacacctacagtggacaccattgactcatatatgaacagactgcacagtattattttagctaatccccaagacaatgaaaacttcatagctacagttcgagaagttgtgaacagactcgatcgttagggaatggtcttagaactccaagatgttccataagtgtttttacttgtgaggaatgagaagccatccatggaaatttgaactgagtgggggcagagaaagagtgcagatccctttgcttgtgaaagaattatcagtgagtgaaaggccatcaccccaggaagccaaatgagggagcagcaacatgtatatgagcttcctatggaattgtccttatgtgaagctttgaaggtgtacagccactctcccgggtcttcaggttcctaccatttccatttctgttaaagtggatctgcatatcttcagcttactaggtgacccggatgctgacatctgctgctgcagaaaggaagacttttcattgtaatttcgcttagacccttttatcagtggagctccagttttcttacctagctgtcacttttttaaatgcctctgggggttatttttgctttccttggcccccaccaatttatacatctccattttctgacctctggactaactggttgctcagcaaggttctgaaggagagtttcttgcattggacaggcccagtcttctcccatcattgccctgctgtgactccaaagaaaggagcttcttgctgacagtgccctgtggagcaaggctgtgtttcctaccccacacggtgctcagtgggtgccagccctcagtgtggctttgtgattgctgccctaaaggagaatgctctttccttcctcactggtactgcctgctgttttctaagcattgctcctgcacagacatggagtcccagccccagcaaggctcttctgttcccatctgttgacaatgtcttgtggagcatttttgctgaggaaaaggtcacttgtaaacagaggagaaagggaaagagtacaaagccctaagtttattgtaagtgaaaactgagggaattcctgtcttctttaggagtaatgattcatagatctagataggtggaaatatcattcaaaatagtcacttgagctcacaaaaaaagcaaggaagaattctcatgtcctttgtcttccttctgtagccattaactgctgaatccatgtgaggaagacaggcttcccttccttccccctccttagtgattttttctttaacagcataagtaaagaggactttctggttcatttttgtttgttttgttttgttttgttttgtttacagatgaggtcttcctgtgttgcccaggctggagtgcggtggctattcacagatgctatcatagcacactacagcctacaactcttgggctcaagcatcacgcctagcagtttctggttcctttaacagcaaaaggaaagagaggttctgattcttacctcagggttttttggttgttcattgtttttgtttttgtttttgttttgacactgcagagcacaaggctaaaggttacagctgcgatctttggaaccaaaggcagagcaagcagagcccgttgtctgggccccacaccactgcaggcaggtggatagaagtgcggcccctctcatagtatgcccataagtcagggcatagggcagaactacctgtcatgttgctacaccatcctgtcttctcagcatctccttgcctgttttctttattagtccaaaggaaaacaacagcaacaaaatctgtttttaaaatgtcttatatgaacatatatcaaatatccatgcgctgaaacccacataccatcacttggcaattttttagaataagaccccattattatctattgctataaacctagccagttctcttgctcttctgtattttcctatttccctgccatcatctgctatttctgccacttctcttagactccttgtctgcaaagcccaagctagaactcactgtctatggcagaaggacatccagagcccattctggagttttgttttttccttctgccagatgctttgtgtcctgtcttccttcctcctcatatttctgtttctcatttgtgttcagttttgtgcagcattgctagcactgcttttgtgaccagaaaaggccataacatggtccaggatcatcattcttctgactctagatgggacacttgacagtgacttgaaacatttgcatattcaggaatgcatgagatttcaagagagcctacagtatgaaatcattttcacaaaataagcagcttgcttctgaaatgctgtctttcccagtagctactcacctgcctctggtggctgggattcagatgccacaaaactgtcagtatctatagaccaggtctgtgccacctcctctctcctctgtgctcagtgaggaggcagtaaatgaagttacaggctagcacaatacctaactcatgtttcccagtacacctgtagatattactgtacttttatgttctcaagaaataagttgttgcctattcagtgttacagatttctttgtttctttttaattaaaatacaagaagcagctgaggaaagggagacaaggtattttatttctgactgattttagaaaaaacttgtgtacatgtgtttggaactgttgaaatgccaagttttctgtataagtgtttttgtaattaaactttcagattttctttgttttttaagaagttgatgtgcttgtttgacatttgtctcattaaaacttttctacgttg

SEQ ID NO: 11993 - protein, 347 aa, Homo sapiens
MENLMTSSTLPPLFADEDGSKESNDLATTGLNHPEVPYSSGATSSTNNPEFVEDLSQGQLLQSESSNAAEGNEQRHEDEQRSKRGGWSKGRKRKKPLRDSNAPKSPLTGYVRFMNERREQLRAKRPEVPFPEITRMLGNEWSKLPPEEKQRYLDEADRDKERYMKELEQYQKTEAYKVFSRKTQDRQKGKSHRQDAARQATHDHEKETEVKERSVFDIPIFTEEFLNHSKAREAELRQLRKSNMEFEERNAALQKHVESMRTAVEKLEVDVIQERSRNTVLQQHLETLRQVLTSSFASMPLPGSGETPTVDTIDSYMNRLHSIILANPQDNENFIATVREVVNRLDR

SEQ ID NO: 11994 - DNA, 2256 bp, Homo sapiens
  CDS (125)..(1366)
cagtgcgcaggcgtgagcggtcgggccccgacgcgcgcgggtctcgtttggagcgggagtgagttcctgagcgagtggacccggcagcgggcgataggggggccaggtgcctccacagtcagccatggcagcgctgcgctacgcggggctggacgacacggacagtgaggacgagctgcctccgggctgggaggagagaaccaccaaggacggctgggtttactacgccaatcacaccgaggagaagactcagtgggaacatccaaaaactggaaaaagaaaacgagtggcaggagatttgccatacggatgggaacaagaaactgatgagaacggacaagtgttttttgttgaccatataaataaaagaaccacctacttggacccaagactggcgtttactgtggatgataatccgaccaagccaaccacccggcaaagatacgacggcagcaccactgccatggaaattctccagggcccggatttcactggcaaagtggttgtggtcactggagctaattcaggaatagggttcgaaaccgccaagtcttttgccctccatggtgcacatgtgatcttggcctgcaggaacatggcaagggcgagtgaagcagtgtcacgcattttagaagaatggcataaagccaaggtagaagcaatgaccctggacctcgctctgctccgtagcgtgcagcattttgctgaagcattcaaggccaagaatgtgcctcttcatgtgcttgtgtgcaacgcagcaacttttgctctaccctggagtctcaccaaagatggcctggagaccacctttcaagtgaatcatctggggcacttctaccttgtccagctcctccaggatgttttgtgccgctcagctcctgcccgtgtcattgtggtctcctcagagtcccatcgatttacagatattaacgactccttgggaaaactggacttcagtcgcctctctccaacaaaaaacgactattgggcgatgctggcttataacaggtccaagctctgcaacatcctcttctccaacgagctgcaccgtcgcctctccccacgcggggtcacgtcgaacgcagtgcatcctggaaatatgatgtactccaacattcatcgcagctggtgggtgtacacactgctgtttaccttggcgaggcctttcaccaagtccatgcaacagggagctgccaccaccgtgtactgtgctgctgtcccagaactggagggtctgggagggatgtacttcaacaactgctgccgctgcatgccctcaccagaagctcagagcgaagagacggcccggaccctgtgggcgctcagcgagaggctgatccaagaacggcttggcagccagtccggctaagtggagctcagagcggatgggcacacacacccgccctgtgtgtgtcccctcacgcaagtgccagggctgggccccttccaaatgtccctccaacacagatccgcaagagtaaaggaaataagagcagtcacaacagagtgaaaaatcttaagtaccaatgggaagcagggaattcctggggtaaagtatcacttttctggggctgggctaggcataggtctctttgctttctggtggtggcctgtttgaaagtaaaaacctgcttggtgtgtaggttccgtatctccctggagaagcaccagcaattctctttcttttactgttatagaatagcctgaggtcccctcgtcccatccagctaccaccacggccaccactgcagccgggggctggccttctcctacttagggaagaaaaagcaagtgttcactgctccttgctgcattgatccaggagataattgtttcattcatcctgaccaagactgagccagcttagcaactgctggggagacaaatctcagaaccttgtcccagccagtgaggatgacagtgacacccagagggagtagaatacgcagaactaccaggtggcaaagtacttgtcatagactcctttgctaatgctatgcaaaaaattctttagagattataacaaatttttcaaatcattccttagataccttgaaaggcaggaagggaagcgtatatacttaagaatacacaggatattttggggggcagagaataaaacgttagttaatccctttgtctgtcaatcacagtctcagttctcttgctttcacattgtacttaaacctcctgctgtgcctcgcatcctatgcttaataaaagaacatgcttgaatatcaaaaaaaaaaaaaaaac

SEQ ID NO: 11995 - protein, 414 aa, Homo sapiens [sequence omitted]

SEQ ID NO: 11996 - DNA, 2295 bp, Homo sapiens
  CDS (47)..(2038)
cgcgcggccctgcccggcccaccgagccctggtgtggcagcggctcatggcggccgtggggcccccgcagcagcaggtgcggatggcccatcagcaggtctgggcggcgctcgaagtggcgctccgggtgccctgcctttacatcatcgacgccatcttcaactcctacccggattccagccaaagccggttctgcatcgtgctccagatcttcctccggctctttggtgtatttgcatccagtattgttctgatcttgtcacaacgatcacttttcaagttttacacgtacagctcagcctttctgttagctgcaacttcagtgttggtgaattattatgcttctttgcacattgacttctatggtgcctacaacacgtcagcttttggaattgagctgcttcctcgaaaaggtccctcgctgtggatggcacttatcgttctacagctaacatttggaattggatacgttacactactccagattcattccatctattcacaattaattattttggatctcttggttcctgtaataggcttaatcacagagctaccattacacatcagagagactttactgtttacttcttccttgattctcacattaaatacagtgtttgtcctggcagtgaaactgaagtggttttattattccacacgatatgtttatcttttggtgaggcacatgtatcgaatttatggattacagttattgatggaggacacatggaagaggattcgtttcccagacatactacgagtcttttggctaacaagagttacagctcaggctacagtgttaatgtacatcttaaggatggcaaatgaaactgattctttctttatttcttgggatgatttttgggacctcatttgcaatcttataattagtgggtgcgattctacactaactgtactgggcatgagtgctgtaatttcctcagtagcccattatttggggcttggaatattggcctttattggatcaactgaggaagatgacaggcgtcttggctttgttgcacctgttttattttttattttggctcttcagactgggttaagtgggctaagaccagaagagagacttattcgcttaagtagaaacatgtgccttttattaactgcagtcctgcattttatccatggaatgacagaccctgtattaatgtctctcagtgcctctcatgtgtcatcttttcgtagacattttcctgtgctgtttgtctctgcttgcctgtttattcttcctgtcttactcagttatgttctttggcatcactatgcactaaatacatggttgtttgcagttacagcattttgtgtggaactgtgcttaaaagtaattgtttctctcactgtttatacgttattcatgattgatggctactataatgtcctctgggaaaagcttgacgattatgtctactacgttcgttcaacaggcagtattattgaatttatatttggagttgtaatgtttggaaatggggcttacactatgatgtttgagtcgggaagtaaaattcgggcttttatgatgtgcctacatgcatattttaacatctacttacaagccaaaaatggctggaagacatttatgaatcgtaggactgctgtgaagaaaattaattcacttcctgaaataaaagggagccgcttacaagaaataaatgatgtatgtgcaatctgctatcatgagtttacaacatctgctcgtattacaccgtgtaatcattatttccatgcactttgccttcggaaatggctgtacattcaagatacttgtccaatgtgccatcagaaagtatacatcgaagatgatatcaaggataattcaaatgtatctaacaacaatggatttattccacccaatgaaactccagaggaagctgtaagagaagctgctgctgaatctgacagggaattgaacgaagatgacagtacagattgtgatgatgatgttcaaagagaaagaaatggagtgattcagcacacaggcgcagcagctgaagaatttaatgatgatactgactgatgaaaatagcatttattaatgattgaggtatttgtttaaaattcagttcatccaaaatggagtaatatccttcaccttcagtgtgtaaccaagcacaaaaacagtatcaatgttgaatctgtgaatggttttccgtttactgtgatgtgctactgtaaatatacctctttaattacttctggtctctttggtgacctgtttaaatttgtgtacattattgtacatagaataaaatgttttcacatttttatgac

SEQ ID NO: 11997 - protein, 664 aa, Homo sapiens
MAAVGPPQQQVRMAHQQVWAALEVALRVPCLYIIDAIFNSYPDSSQSRFCIVLQIFLRLFGVFASSIVLILSQRSLFKFYTYSSAFLLAATSVLVNYYASLHIDFYGAYNTSAFGIELLPRKGPSLWMALIVLQLTFGIGYVTLLQIHSIYSQLIILDLLVPVIGLITELPLHIRETLLFTSSLILTLNTVFVLAVKLKWFYYSTRYVYLLVRHMYRIYGLQLLMEDTWKRIRFPDILRVFWLTRVTAQATVLMYILRMANETDSFFISWDDFWDLICNLIISGCDSTLTVLGMSAVISSVAHYLGLGILAFIGSTEEDDRRLGFVAPVLFFILALQTGLSGLRPEERLIRLSRNMCLLLTAVLHFIHGMTDPVLMSLSASHVSSFRRHFPVLFVSACLFILPVLLSYVLWHHYALNTWLFAVTAFCVELCLKVIVSLTVYTLFMIDGYYNVLWEKLDDYVYYVRSTGSIIEFIFGVVMFGNGAYTMMFESGSKIRAFMMCLHAYFNIYLQAKNGWKTFMNRRTAVKKINSLPEIKGSRLQEINDVCAICYHEFTTSARITPCNHYFHALCLRKWLYIQDTCPMCHQKVYIEDDIKDNSNVSNNNGFIPPNETPEEAVREAAAESDRELNEDDSTDCDDDVQRERNGVIQHTGAAAEEFNDDTD

SEQ ID NO: 11998 - DNA, 2858 bp, Homo sapiens
  CDS (19)..(1221)
ctttcccgagccggggccatggcacctgcaaggtgtttctcagcaagattgaggaccgtgtttcagggcgtggggcattgggctttgtccacatgggctggcctgaagcccagccggctactgccacagcgggcttctcccaggctgctctcggtcggccgtgcggacctcgccaagcatcaggaactcccggggaagaagctgctctctgagaaaaagctgaaaaggtactttgtggactatcggagagtgcttgtctgtggaggaaacggaggcgctggggcaagctgcttccacagtgagccccgcaaggagtttggaggccctgatggaggggacggaggcaacggtggacacgtcattctgagagttgaccagcaagtcaagtccctgtcgtcggtcctgtcgcggtaccagggtttcagtggagaagatggagggagtaaaaactgcttcgggcgcagtggcgccgtcctctacatccgggtccccgtgggcacgctggtgaaggagggaggcagagttgtggccgacctgtcttgcgtgggagatgagtacattgccgcgctgggcggggcaggagggaaaggcaaccgcttcttcctggccaacaacaaccgtgcccctgtgacctgtacccctggacagccaggacagcagcgagttctccacctggagctcaagacggtggcccacgccggaatggtgggattccccaacgccgggaagtcctcactgctccgggccatttcaaacgccagacccgccgtggcttcctacccgttcaccaccctgaagccccacgtcgggatcgtccactacgaaggccacctacaaatagcagtggccgacatccccggcatcatacgaggcgcccaccagaacaggggtctggggtccgccttcctcaggcacatcgagcgctgccgctttctcttgttcgtggtggatctttctcagcctgagccgtggactcaagttgacgatttaaaatatgaactggagatgtatgaaaagggcctgtctgcgaggccccacgcaatcgtcgcaaacaagattgacctccctgaagcccaagccaatctgtcccagctccgggatcacttgggacaggaggtcatcgtgctgtcggcgttgaccggcgagaacctggagcagctgctgttgcacctgaaggtgctgtatgacgcctacgcggaggccgagctgggccagggccgctagccgctcaggtggtagccacgccagagcggggtcgcctctgggcctctgtctgagcaaacctggatgtgaattcggtggttttgaatgcataaagtgccttgtggacacgggggagttgtggtgcttctgggtctctgggccccgcctgctggcctgggatgccctcatgttgggaagcattccgtgccccccaccccgcctgccctccgtgattaacacccctaataaggggttggggtgcccataacggggtggccctgccgctgactcgggtctccgccatgcacgcgtggactctccgatgagctcagcagaaccgcacagccagagccccaggtcagaagtgcagaccagggttctcagcacagtgcccgtcgtgcttccatggcttgctacggagagagacctctggatccacactggggctgcgtctggcccgttgtccagcagccctgcggtaccgcaagcccaggcaccagtgtctcggggggcctcactgctgcgcaaggggtggggccgaggatgcaagtccaggcagagcggcgcaggcagctgtgagcttttctccatcagccgtctgagaagagcagtgaggccagctgcttcctgtccttcagaacacttctctgtgctcagtgggagccaggaagcctcaggcttcacgactgaatgcacccaatatccgacctggctgcgtgtttctggctgggctgccgtgtgcacagcaagttaactagaggggctgtgggccatggaactgtcagcgttattctcagaaggcggccgtggcatgggcagggtatagtgaggagtggaaggagacgtgtgcctggtaatatggggcggaatttccactcagctccatttgctggggatttaaagagaacccttgtgctgcgccaggcagttaccgagccgaagggagatgatgggccttcgcccctcagtgggatggcagctgagggggccctgcatttgaccctcgagactgcagcagcgcctttcctgtctgtggtttaagtctttgcagtcaagtactgatgcatccaagccaggcctatgcctggtgtctcctgactgcagaggagccccagggcaaggacagctcagctgctggcagcctgcctggcccatagacatcccccaagtagtctcaggcctctgacatgtccctgaggggcccctaagaaagaaagtggaggggacactccagaggctgtcgtgggaggatcatgtgagcctgggaggtcaaggctgcagtgagccgtgattgcaccactgcactccagcctgagtgacagagcgagaccctgtctcaaaaaacaaacaaacaaacaaacaaaaacagaacattctgggcacggtggctcatgcctgtagtcccagcactttgggaggccgaggctggtggatcacaaggtcaggagattgagaccatcctggctaacacagtgaaaccccgtctctactaaaaatacaaaaaaattagccaggcgtggtggcggtcacctgtagtcccagctactcgggaggctgaagcaggagaatggcgtgaacctgggaggcggagcttgcagtgagccgagatcacaccactgcactccagcctgagcgacagagcaagactccatctc

SEQ ID NO: 11999 - protein, 401 aa, Homo sapiens
MAPARCFSARLRTVFQGVGHWALSTWAGLKPSRLLPQRASPRLLSVGRADLAKHQELPGKKLLSEKKLKRYFVDYRRVLVCGGNGGAGASCFHSEPRKEFGGPDGGDGGNGGHVILRVDQQVKSLSSVLSRYQGFSGEDGGSKNCFGRSGAVLYIRVPVGTLVKEGGRVVADLSCVGDEYIAALGGAGGKGNRFFLANNNRAPVTCTPGQPGQQRVLHLELKTVAHAGMVGFPNAGKSSLLRAISNARPAVASYPFTTLKPHVGIVHYEGHLQIAVADIPGIIRGAHQNRGLGSAFLRHIERCRFLLFVVDLSQPEPWTQVDDLKYELEMYEKGLSARPHAIVANKIDLPEAQANLSQLRDHLGQEVIVLSALTGENLEQLLLHLKVLYDAYAEAELGQGR

SEQ ID NO: 12000 - DNA, 2694 bp, Homo sapiens
  CDS (104)..(1453)
ctgccagccgcgctgctgctgctcctcctgctgtgggaccgctgaccgcgcggctgctccgctctccccgctccaagcgccgatctgggcacccgccaccagcatggacgctcgccgcgtgccgcagaaagatctcagagtaaagaagaacttaaagaaattcagatatgtgaagttgatttccatggagacctcgtcatcctctgatgacagttgtgacagctttgcttctgataattttgcaaacacgaaacctaaattcaggtcagatatcagtgaagaactggcaagtgttttttatgaggactctgataatgaatctttctgcggcttttcagaaagtgaggtgcaagatgtattagaccattgtggatttttacagaaaccaaggccagatgtcactaacgaactggccggtatttttcatgccgactctgacgatgaatcattttgcggtttctcagagagtgagatacaagatggaatgaggctgcagtcagttcgggaaggctgtaggacccgcagccagtgcaggcactctggacctctcagggtggcgatgaagtttccagcgcggagtaccaggggagcaaccaacaaaaaagcagagtcccgccagccctcagagaattctgtgactgattccaactccgattcagaagatgaaagtggaatgaattttttggagaaaagggctttaaatataaagcaaaacaaagcaatgcttgcaaaactcatgtctgaattagaaagcttccctggctcgttccgtggaagacatcccctcccaggctccgactcacaatcaaggagaccgcgaaggcgtacattcccgggtgttgcttccaggagaaaccctgaacggagagctcgtcctcttaccaggtcaaggtcccggatcctcgggtcccttgacgctctacccatggaggaggaggaggaagaggataagtacatgttggtgagaaagaggaagaccgtggatggctacatgaatgaagatgacctgcccagaagccgtcgctccagatcatccgtgacccttccgcatataattcgcccagtggaagaaattacagaggaggagttggagaacgtctgcagcaattctcgagagaagatatataaccgttcactgggctctacttgtcatcaatgccgtcagaagactattgataccaaaacaaactgcagaaacccagactgctggggcgttcgaggccagttctgtggcccctgccttcgaaaccgttatggtgaagaggtcagggatgctctgctggatccgaactggcattgcccgccttgtcgaggaatctgcaactgcagtttctgccggcagcgagatggacggtgtgcgactggggtccttgtgtatttagccaaatatcatggctttgggaatgtgcatgcctacttgaaaagcctgaaacaggaatttgaaatgcaagcataatatctggaaaatttgctgcctgccttctacttctcaaatctttcttgtaaaagtttccaattttttcactgaaacctgagttaaaaatcttgatgatcagcctgtttcataagaaactccaatcaagttaatcttagcagacatgtgtttctggagcatcacagaaggtatattgctagttacactttgccctcctgcagtttcttctctgctcccaacccccatctcatagcatccccctctatttccaatgctcctctccaaccgcttagtttctgaatttcttttaaattacagttttatgaaagcatattttatttacttggtgttgaaatagccctcataaaacctaagcacttggaaacacaataatagtattaactaactagatctattgaatttcagagaagagccttctaacttgtttacacaaaaacgagtatgatttagcattcatactagttgaaatttttaatagaatcaaggcacaaaagtcttaaaaccatgtggaaaaattaggtaattattgcagattgatgtctctcaatcccatgtattgcgcttatgttacaagttgttgtcacagttgagacttaatttctcctaatttcttctgcccgaagggtaagtggtgcgtccagcttacacaatcataattcaaaggttggtgggcaatgtaatacttaattaaaataatgatggaagagctatctggagattatgagtaagctgatttgaattttcagtataaaactttagtataattgtagtttgcaaagtttatttcagttcacatgtaaggtattgcaaataaattcttggacaattttgtatggaaacttgatattaaaaactagtctgtggttctttgcagtttcttgtaaatttataaaccaggcacaaggttcaagtttagattttaagcacttttataacaatgataagtgcctttttggagatgtaacttttagcagtttgttaacctgacatctctgccagtctagtttctgggcaggtttcctgtgtcagtattccccctcctctttgcattaatcaaggtatttggtagaggtggaatctaagtgtttgtatgtccaatttacttgcatatgtaaaccattgctgtgctattcaatgtttgatgcataattggaccttgaatcgataagtgtaaatacagcttttgatctgtaatgcttttatacaaaagtttattttaataataaaatgtttgttct

SEQ ID NO: 12001 - protein, 450 aa, Homo sapiens
MDARRVPQKDLRVKKNLKKFRYVKLISMETSSSSDDSCDSFASDNFANTKPKFRSDISEELASVFYEDSDNESFCGFSESEVQDVLDHCGFLQKPRPDVTNELAGIFHADSDDESFCGFSESEIQDGMRLQSVREGCRTRSQCRHSGPLRVAMKFPARSTRGATNKKAESRQPSENSVTDSNSDSEDESGMNFLEKRALNIKQNKAMLAKLMSELESFPGSFRGRHPLPGSDSQSRRPRRRTFPGVASRRNPERRARPLTRSRSRILGSLDALPMEEEEEEDKYMLVRKRKTVDGYMNEDDLPRSRRSRSSVTLPHIIRPVEEITEEELENVCSNSREKIYNRSLGSTCHQCRQKTIDTKTNCRNPDCWGVRGQFCGPCLRNRYGEEVRDALLDPNWHCPPCRGICNCSFCRQRDGRCATGVLVYLAKYHGFGNVHAYLKSLKQEFEMQA

SEQ ID NO: 12002 - DNA, 2913 bp, Homo sapiens
tcacttacccattccataattagtttccttgtatgtaaaatcaggggataataatgtcaacaaatagttatctgcttaacattgttttattaaaaagcaggtatgttcgcatgaataaaacaaccttcccttttaaactccttgtttggcatcctcaaacctctcagcttgtttcagatgggaacttcaacccaatatcaggtcacagtgcccaggttgatctgtactccgtgtgggctctgaaagcatcacccctgcagaggctggaagccctagtcttcccaggggatgccttgtctgcaggtactgcccccagcctgcagtgaactctggaccttttattgatcctgtgtgcatctggctccactctgataccaggaagaatgggggttgctggccctggacttggtcctggacaaataaatgtgtttgtcaaagccctttcctgacatcggttgtctctagcccaggtggcactgtggagggtaattagttctctttattagagggaacatcaggaagctctgcgctgctcaccgtggacacatgtaaaaagattttgttaatgcagctgttacttgccttttcattatgctaatgggcagcctgtaagaaatgtaacttcctgtcactggcaccaagcaacacctatcagacaaagcattgtttcttctcactgttgataagtgtgacttgtggggaccagcgataggatgctcatttttatccgctaagtgcacagcgcttgtaaaaaaccagcagtggccttgctaccacttgacgtgacactaggtttagctgtttacattgacacactgctgcacccttttagagctgcagccaggggtcagattcattagaaagcgtcagcgccgatagtgaagcagcatctggtgggattctctctgctctcctgttggaagcagcaaggcaaggcgcttgcatcttgaaatgggtgatttttaaatcttttcttcgtttgattatttgagaacccctgtttgttccttgaccctacatgaagaagatgagagagaaagagctggacatagcattcaccccagtgatgaagaatgggaatgttggggcctgctgtttgttgcttttctttttgctgatgtgtggctcttcgttgcccaaaaggtctgcagagagggagttaaatgcatgtgtttctcttgcacagcagcaaggctaaaatgtggaagtaagctaagtaaacctttataattagtcctttatgtctttctccttttgcctccctatgtatgagtattgccttgataaatttggtgaccatacttcccttataatgctggaagccacatatcttttggttctatgttgttatccctttagtcatttaggatatggaggatgatcacccagaatccttggttcattttgcaatcactgtgaccagatgagttgctgataacctagagcagccagagtgcttgttgcattaagagccagagcccaggccttcacttttgccacatgtgactctatgtccatgaaactatgtgcaggacaatgcacacggcaattgagaaggttctggagacctttcataatgttgtgtgagggctcgctggccaccatggcagagagagcaacatcctccttaccttcagaaacctctggcaccaccagcattgctgacatatctcacgccctgtcacagcttcttagttcaacaggctgcaaaagctcctccccacctccacctgttcataaggatgtaaggataattagtgcattttctcaagttcaatgatacactcattttgaaaagcaactaccgcattatcctgcccttgcccttgggaactggatcccttcatttgtcgagaataccccttgccaggccttttcatctagccgctgctcacactgcaccggggcttctgtctgggtgattcttgctgggtcatgccaggaggtatttggcatttccctaaagcccatcatgtgaagtaagagtaccaccgaatcacgaagctctgagaagttttgttaagatcagtcatggcttgatcagtccaagcattaggatacctagtttgcaagtccagtgttgtccacctggcctggaatttaccaactgctctgtggagagctctcatcccacttatgaactgtgctgcttatctgcactttctttttctgtatgcccagtacgtagctatgaagggaggatcccaggggccagaagccaggggaccatgtagtgtcttagtgtggtttatatgtcattgcagtctccatccaggtcttttccagatcctgggatgctgccaagaatttccatgcacaggaagacagagatggtcatggtgatatacagacttatacagaagacgtttttctatctttggggggcttttgacccctttccactcacttgaattcacacagaataattatatgctcttctgagggcttactgctgggtcagaaaagcagggagagttgcttttggatagtaatccccactgctggccaccagcagctgcagcctccacagcagctgcttcccctcgcctccatgccaccatctccccttcatatccactatctccttgtctctctgcaggtcatttataatcagcagtcatggcgtacaggcctcattagtgatatagccattccttcagtgcttcagaaataatcatttagaaaaaaatgcacggtttccatcccttgagagcccatgagtgatgaatttatttcagtttggctggcttggctgtcttgctcagccttatttccatatttatttcaacaaacaatgtagggtgggaacaagaaaacacatgctgggtgcacacacacgctgcatatctgctccctaagttgattcctcttggggaaggatgaaaaggaatgccaacgaaagaaccctccatt

SEQ ID NO: 12003 - DNA, 3384 bp, Homo sapiens
  CDS (6)..(830)
acaccatgtcaagtctgcacaagagccgaattgcagatttccaggatgtcctgaaggagccctcaattgcattggaaaagctgcgggaactcagctttagtggcatcccctgtgagggcggactgcggtgcctctgctggaagattctcttgaactaccttcccttggagagagcctcatggacctccatcctggccaagcagagggagctgtatgcccagttcctgagggaaatgatcatccagcctggcattgccaaggccaacatgggtgtgtccagggaggatgtgacttttgaggaccatccactcaaccccaaccctgacagccggtggaacacgtacttcaaggacaacgaggtgctgctgcagatcgacaaagatgtccggaggttgtgcccagacatttccttcttccagagggccactgactacccttgcctcctcatcctggacccccagaatgagtttgaaacccttcgtaagagagtggaacagacaacactgaaatctcagacggtggcccggaaccggagtggggtcacaaatcaagagcagaacatcaagcctcagttctttgccttccgctggctgacactgctgctgtcccaggagttcttgctgcctgacgtcacccgcatctgggactccctcttcgccgatgacaaccgctttgacttcctcctcctcgtctgctgcgccatgctcatgctgatccgggagcagttgctggaaggggacttcactgtgaatatgcggctgctgcaggactaccccatcacagatgtctgccagatcctgcagaaagccaaggagctccaagactcaaagtagcccggcggcaagaggcccacgttcgggagagaagcctcccgaccctgtgccctggctcccgggacacatagaaacctgtaggaacccagcctgaggggaagccacaggatcggcccgagacccaggccatgcccactggggacacactgtgccgtgctccttctgccgccacgcccagctccccacctgccctgcactctgccctctttgcccaggatactgaggagggctggagctcgggaagttgtccttcctgggccagggccgtttctggcactgggaggctggcaggggcccctccctgcctcggctctgccgccccagcctcagttcctgcttctggtcttctcttgggctccactcaggggaggtgcttggccaatgggccagaaaccgcttctgagcggggcacttcggctgctccacagggaaggcgacactgaaagctgagtcctgccgtctgtctcacccacagatgtctgtagtcggtcggtgtgaatgtgggcccaagtccccaggcatcttctccgtgtgtgtgtgtgtgtgtgtgtgtgtgtgtgtgtgtgtgtgtgtgtgtgtgtgttagggagtgagggtctctcaggcctccaggtctcccagcccctccttctctgtctctacctctctgcctgtctccttccacctccttcccagagtgggactgtgtcttgcttcatgattcctctctccattactctccctgcccttctctgttggggtgccttatcctgagccacctcctctccccgcttgcctctgctcccctgaacctgggagacagatgaggagactggctcagcaaggcccctggaggtcaagcttggcctttgcctcctgttcccatcccccagccctggctcctaggtcctcccaactgggagggagtcctccgtgcctcacttagagggttctgaacccgttccctacacagaaatcttggaaaccaaatgctgctgagtaaggatgaagctttgagcctcctgcccctgctttctgcccagggagggagaaggaagagggggagctggtttttctggaggttcccccagaggccctcctgtccgaaaagaaaaggaccttgattctgggcccagggtcggaacccattgcttcagaagagttgtcattccctcggcttccaggtcccaacccagggttgggttgagtgagtcccacaaagggcaagtggggcccgaggaagcctctctggggccaggggtagctgagcttaaaggccctgggtcctgccagttccaggagggccatgtctgtgcctctgtgtacccctccacccgctgcgggctgagggaggtgcagggccttctctgacccctgcctgagctgttcccagggctggagcaggtgtaccctgagcaggggcagctggccactcccagttctcaccaagtcacctccctccttgtacaaggtttgcgtccggaagccgggtgccatagtgaggaccctcgtcctccagactggctggcaggagtcaggccccagcagccctcctgcccccaaagctttccgagtctggtgggcaggacttctcgctgccctaccaagcccggctttgggccagaaaaggcttccccaggtggctcttctaccaggcttttcctttgatgccgcctggatttccgcacctgcctgtctcctctcccagagcacagtatttgggagactttgactatttattcagactcctggctatgtattgcacattggcaagtgctctggggatgaggcatgggtataggaagggagaaaggagttggagacaagatcctcttcattttccaagatcaaagtcagcctcttctccccatgcttctaggaactgcctggttttcaagcaggtcctggctgagcgggctctgagttctgtactggaattgagtgtaaagatgggaagagaactgggctgactccaggacctccaggatgaggcagaggcatgatgcttcctgctcacctgggccaccctctctccaggacttgtcagctggtggttcagccccttctccaaccccttcataagcttgggccactgcctgggacccagcagacactgcccaggactctttagtgcactcactcttgtctgccccctaccttccctcctggaaccacactacttgaatcaccattactttgcctcgctggcagagttgggtcaagtgccctctccttgaccttgagatgaaggtcaagagcacagggaccaggccttggttaggctgagctcccagcaggacaccgcctgcagaaaggacctgccctgataatgtcccttccccagattctcaagcagatgcccaagggaggtccccacagagccagagtgcctgaggcttcctgcttgagaacctgccccctggatcttggacacttacagattgagctgtatgaattcagcgggtctcactccagagggtcagaacgtttgctttagttttttcatctgttttgttccttgagtcagtgctgttgatgacgagttgtcttgaataaatcatgtgttctttgc

SEQ ID NO: 12004 - protein, 275 aa, Homo sapiens
MSSLHKSRIADFQDVLKEPSIALEKLRELSFSGIPCEGGLRCLCWKILLNYLPLERASWTSILAKQRELYAQFLREMIIQPGIAKANMGVSREDVTFEDHPLNPNPDSRWNTYFKDNEVLLQIDKDVRRLCPDISFFQRATDYPCLLILDPQNEFETLRKRVEQTTLKSQTVARNRSGVTNQEQNIKPQFFAFRWLTLLLSQEFLLPDVTRIWDSLFADDNRFDFLLLVCCAMLMLIREQLLEGDFTVNMRLLQDYPITDVCQILQKAKELQDSK

SEQ ID NO: 12005 - DNA, 3179 bp, Homo sapiens
  CDS (18)..(2258)
aagacgctagcgctgcgatggcggaggccgtggagcgcactgacgagctggtccgggagtacctgctcttccgcgggttcacgcacacactgcggcagctggacgccgagatcaaggcggacaaggagaaggggttccgggtggataagattgtggaccagctgcagcagttaatgcaggtgtatgacttggctgcccttcgggattattggagctacttggagcgtcggctcttcagccgcttggaggatatatacagacccacaatccacaagctgaaaaccagcctgtttcgattttatcttgtctacacaatccagacaaacagaaatgacaaggctcaggagttctttgcaaagcaggccacggaactccagaaccaggctgagtggaaggattggtttgtcctgcccttcctgccatccccggacaccaaccccacctttgctacctacttttctcgacagtgggctgacaccttcattgtgtccctgcacaacttcctgagcgtcctgtttcagtgcatgccagtccctgtgatcctgaactttgatgcggagtgtcagaggactaaccaggttcaagaagaaaatgaagttctgcgtcagaagctttttgcattgcaagctgaaatccaccgactgaagaaagaggagcaacagccagaagaggaagaggccttggtccaacacaaattgcctccttatgtctccaacatggaccgcctgggggactcggaacttgccatggtgtgcagccaaaggaatgcctccctctcccagtcacctcgtgtgggcttcctgtcctcgctgctgcctcagagtaagaagagcccctcaaggttgtcgcctgctcagggccctcctcaacctcagagctcggccaagaaagagtccttcggtggtcagggcaccaagggaagggacccgacgtccggagccaaggatgggaagagcctcctcagcgggctggccactggggagtccggttggtcacagcaccggcagcggcgcctgcaggaccatggcaaggagaggaaggagcttttctccacaaccacttcccagtgtgcagagaagaaaccagaagccagtggcccagaggctgagccctgcccagagctccacacggagccagtggagccactgactcgggcatcctcggcaggccctgagggtggaggagtccgccccgagcagccctttattgtgctgggacaggaggagtacggggaacaccactcatccatcatgcactgcagagtggactgctctgggaggagagtcgccagcttagacgtagatggggtcatcaaagtgtggtccttcaaccccatcatgcagaccaaagcatcctccatttccaaatcaccgctgctgtctttggaatgggccaccaaacgggacagactgctcttgctgggcagtggtgtgggaacagtgcgtctctatgacacggaagccaagaagaatctctgtgaaatcaatatcaacgacaacatgcccagaatcctgtctcttgcgtgcagccccaacggggcctctttcgtctgttcggcagcagctccgagcctcacttcccaggtggacttctcagcaccagacatcggcagcaagggcatgaaccaggttcctggcaggctgctgctgtgggacacgaaaaccatgaagcagcagctccagttctccctggatccagaacccattgctatcaactgtacagccttcaatcacaacgggaacctgctggtcacaggggcagctgatggcgtcatccggctgtttgacatgcagcagcatgagtgcgcgatgagctggagggcccactacggggaggtctactctgtggagttcagctatgatgagaacaccgtgtacagcatcggcgaggacgggaagttcatccagtggaacatccacaagagtggcctcaaggtatccgagtacagcctcccctcagatgccacgggcccctttgtgctgtctggatacagcggctacaagcaggttcaagtccccaggggccgactcttcgcttttgactcggagggaaattacatgctgacatgttctgccacaggcggcgtcatctacaagctgggtggcgatgagaaggttctggagagctgcttgagcctaggtggccaccgagcccctgtggtcaccgtggactggagcactgccatggactgtgggacctgcctcaccgcctccatggatggcaagatcaagctgaccaccctcctggcccataaagcctgatgacttgccccaagggccacccgaggaagcagtattatctgcggtggggggaggagatataggacaggaaaaccacgtgctccactccagctccctgccagtgcagtgactctgcagggaaagactggcaaggaggctcaggtgcttccatctgtggtgactggaatgggacccacgtggagtaggtgacatatgcttcccagagactggtattgtggctgtgccaggagtacatgtgagactatgggaggaaagctccggaagaaggagaaacattgcagtggctactgtgttggcccagtagaaattgacagtattttgtatatatgtgcccatttatctttttcttttttaaaaaaagagaatactcttgtggtcccctgatgtctctttctaggatgtgtgtcactttgcttcagtgacagccctcccacccagcctggctctgctggccccgaactgaacctctccaggctctcctgttgctttgccatggagccaggtcagctctctgtctgttctgctgggtaacaaggtttggcagttcctgtttctctgggcttaagtcaaggccacagaattctttttcttccctgaaagctggcagcttttgttacagaagattctcaggatgaaggcaggggctgaggcctctgctactggctgcccctttccatccagtggctgctgtttcccaagacaggctaagcgtttcttatctgaaatgcttgggacaggagtgttacagattttggattttttcagactttggaatatttgcatatatacataatgaggtatcttggtaggtctcatgtctaaacatgaaattcattcatgttttatatataccttatacatgtagcctgaaggtaactctatacagtattttaaataattttgtacatgaaacaaagt

SEQ ID NO: 12006 - protein, 747 aa, Homo sapiens
MAEAVERTDELVREYLLFRGFTHTLRQLDAEIKADKEKGFRVDKIVDQLQQLMQVYDLAALRDYWSYLERRLFSRLEDIYRPTIHKLKTSLFRFYLVYTIQTNRNDKAQEFFAKQATELQNQAEWKDWFVLPFLPSPDTNPTFATYFSRQWADTFIVSLHNFLSVLFQCMPVPVILNFDAECQRTNQVQEENEVLRQKLFALQAEIHRLKKEEQQPEEEEALVQHKLPPYVSNMDRLGDSELAMVCSQRNASLSQSPRVGFLSSLLPQSKKSPSRLSPAQGPPQPQSSAKKESFGGQGTKGRDPTSGAKDGKSLLSGLATGESGWSQHRQRRLQDHGKERKELFSTTTSQCAEKKPEASGPEAEPCPELHTEPVEPLTRASSAGPEGGGVRPEQPFIVLGQEEYGEHHSSIMHCRVDCSGRRVASLDVDGVIKVWSFNPIMQTKASSISKSPLLSLEWATKRDRLLLLGSGVGTVRLYDTEAKKNLCEININDNMPRILSLACSPNGASFVCSAAAPSLTSQVDFSAPDIGSKGMNQVPGRLLLWDTKTMKQQLQFSLDPEPIAINCTAFNHNGNLLVTGAADGVIRLFDMQQHECAMSWRAHYGEVYSVEFSYDENTVYSIGEDGKFIQWNIHKSGLKVSEYSLPSDATGPFVLSGYSGYKQVQVPRGRLFAFDSEGNYMLTCSATGGVIYKLGGDEKVLESCLSLGGHRAPVVTVDWSTAMDCGTCLTASMDGKIKLTTLLAHKA

SEQ ID NO: 12007 - DNA, 2288 bp, Homo sapiens
aaagatatgctagttttgattacgaagatgcaggctaccagactgcagaacttgtaaaaatggatattctactgaatggaaatactgtagaggagctagtaactgttgtacacaatgtgaaagcctataggaaaaacgttttggcaaaatgttatggtggtgatattacccgaaaaatgaagcttttgaagagacaagcagaagggaaaaaaaagctgaggaaaattggcaacgttgaagttccaaaagatgcttttataaaagttctgaaaacacaatcttctaaataattggtgggaaaacaaagaattttcattgcaatttgtaatatgctgacaacagaaagaaaattataaaatttgcttgttactttcagggtattcaggttcaaataacctactagtctttcgttgaaagggagtagttagtgggtaggcaagagcttagattttgaagccatgttgcctgttctcaaatatctgttccaaccactcactagtaaggtgaccgtggccagattaacctttgtttcctcttcagtaaaatcgagattatactactacctacataagttgttgttgtgaagattaaatgaggtaatacgttaaatattcagaggtgcaagacacatagtaagcactcaattgtaactacagttaagtccttaaatgccatcgaaaggttcttagaaactgactttaagcaaaatgacacgtagcacaatgttcttgaatgatgtcatttccttaagtggtttgtaacatcgatgaggaaaaaaaattggtttatgcgtcatttcattttatttttatttattttttgagacagagtcttgccctgtcgcccaggctggagtgcaatggcacaatctcgactcactgcaacctctgcctcctgggttcaagagattctcctgcctcagcctccattacaggcgtgcaccaccatgctcggctaattttttgtatctttagtagagtcggggtttcaccatgttggccaggctggtcttgaactcctgacctcgtgatccacccgccgtggcctcccaaagtgctgattacaggtgtgagccaccatgcccagccatgtcatttcatttaaagtcacaatttccatgaatctcaacaagtgaggacctgctatattttgttgcatgcagtttttctttacggacactaaaaggccccatacttaagattccatctactttaagtttaaaggattttcagaatcaccttaagtgtcaaatttgttagcaggattaattgatatgaattcacttattaaacagtaaactcaaataacatagacatcaaataacagacatctgctctagttcatgataaaatgttgatagattttatcaggtggttagtttgaaactaaatggtttacatctaaattaagggcaggagctgtctttcagacattcaaaacgcatttgtgtaaaatgacaggtgtttggtattaccaggaactcataatgacattttaataattattgtctaaatttcataatcgaagcgattttagagtagttaacttgagatttcacagccagtaaatggctgtatttctccagagctctcagctcccatgtttattcagccaacgaacaaaccagactgcagactgtattagagcaagacaacatcatttagccattgatttttatcttctaccttgaatgaattgaatgaagaaaatgtcttttagggataaacactatcaaggatgaattttatactaaggttatatgaaagaaaaatctcaaaaccactaagccaaagggaagtcaagctgggaactgattgaggcaaacctgcctcccattttattcctaaataagacagccacaaagataaaatttgctcacaagggaattccttatggacaaagaactcaaagtcttcacatgaaacaaatgcataaatgattgctttctctgtttcatgtttcactaagccagattaaggtataactgactattcctctactctcctctcacatgtaaattgtatattcagtgaaaggctaatcagaaactcaaaaaaatgcaaccctttctctcttacctgcctatgcttgaagcccctgcccctcttcaagttgtcctgcctttcaagaccaatgtacaccttacacatactgattgatgtctcatgtctctctaaaatgtgtaaaaccaagctgtgccccaaccaccttgggcacatgtggtgaggacctcctgaggctgtgtcatgggcacaccttaaccctgggaaaataaactttctaaactg

SEQ ID NO: 12008 - DNA, 2953 bp, Homo sapiens
  CDS (134)..(433)
cagcttgtcttctctgtttggctatcattgttggctagtcagcaaaaataaatctacattagaggcattcagaagtccagtatttcgacatggaacagataagaatggattcagcttgggtttcagtaaaaacatgcgacaagtttttggtgatgagaagaagtactggttgctacccattttttcaagtctaggtgatggctgctcctttccaacttgccttgttaaccaggatcctgaacaagcatctactcctgcagggctgaattccacagctaaaaatctcgaaaaccatcagtttcctgcaaagccattgagagagtcccagagccaccttcttactgattctcagtcttggacggagagcagcataaacccaggaaaatgcaaagctggtatgagcaatcctgcattaaccatggaaaatgagacttaactcttcaagcaagataaattcatactttataaaagtatcaatgctgtagatggatggaagaggcttcccacaggaaggtgccaccagtcagttgtgcctatgtccctttggctggaaatgcagaatatgaattgattagttctctccaagccattgcttaaaatataacatgttttggatccaatacacacattgttacaactaacacaaattcctattaaatattaaaagtagttctggtttattaatcaacggggaaaacatcttctccaaaaaacttggaataaatccaaggaccagtttttacccaaatatatgggtagcacagtttatcacatagaaactccattaatcatctgattttccgaatctgaaaattgagactattaagatattaagatttcagagatttcaagtcacattataatgataagcattattcataaaacttgttacctttaagaaggtggaagtggcaaaccatacttcttttttttcctctgatgtgaatccagcctcagactgagtgaactgtaataattatgaattcattacagagtccaggtggcctgcagttgaagatcatcaaccatttttgcctcacttaattccagccttttgttttctgctggaaaataagtgtggacattgaagcttgagctctcaaagcagttggctggaatacttttgtcagaatacggtacatttctattacatcagaaatatattttcatctcttcttgttaaattgggaggaaatttatgatagcaattatgaagattgttttatgacattcttttgtcagtttggctttctaaaaatctctttttagattatttctcctgttgaacatagtaaaactattgaatttctcttaagaattcctaataggtcaatagatttaccctccagtgatatctatattatttctttctcgtctcatcaaaatgatgacaggtaaactatatttttccttaaacacctattacagttaaattatgcaaatcattaaataaaaatcatacaacttttggaaagttagttcaacatgaactaaaatggcatgctatttggaaatttagtttgagataaactaaagtgtgttgatgccagaatgttcagcttcagtaaatataataagctcttgtgccttgtatgcactatttaaaaaaagttttttttatttgagtccagtataattcatgtaaatgttaacaattagaataatactctgtatgcttttttgatactgattttgagaatttaaagcagattaccttttaaaactggaccaactaagtaattggtatttaatcaaagagaaaatggtaataaacttttcaaaatctttgttaaaccaaacattcaacacaaaataaactagaaggccagaggataatggaataaaagatcattgcaattacttatccttcctaaaaatatagttttatattaattgtgcttatggaagaaacaatgtcagccaagtccattttatagtttgagtgcaattctttgaacaatagaaatatctgcagtctttcacagatttgtattatgctgaagagtttcatctgacaatctgcttcaagaaatctcagaaaatatgataacattttaactttcgttttagagcacgttttggtcatttttaaaaatacctaaagtgccagaccggaacctatagctactgctagaagtcttaaaaaaaccaacagcagcacaggatgtattaagaattatatgaagtcaggtttgtttttttttttttttttttttcaaagcacagtactgttagctgtttttgtggacaggattcgattaagtattccctcttgtcaaactggaagctaggggaaaaagagggatttttatcctttactcttctagagtactgttaatgcccctttcccacagtcttttatataattaaatatatgtcaatacacattagaatcagatttgaaaaagttaaaacaatttcattgttgtaattgttccctttctgttttcatatagtgaataacctttaaagggttgttttgttttgttttgaattataggagttataatctttggagatgattgcatatctcattagatatgcaatataaatttatctgagtgaacaaagtgctaaataaatagatctacattttgtacatatttatataaaatttacctttaagtatttactttaaaaaatttaatggcttaactcgaacttgaagacacatacttcaactgtccttattgtccattaaactgataattttgatttttcttgcttttatagattttactatataggaatcaagatttaagaaattttgcattaaaaatagtgtaccaatgcttcatatacgttagttatttgctattatgtagggaagaggattgttatttcaaagatatattaaagaacagttgcatctgaatataatcatgatgcattcaatgaagttcatatccatgaattcactcctaatataccctaataaagtggttgaaactgc

SEQ ID NO: 12009 - protein, 100 aa, Homo sapiens
MRQVFGDEKKYWLLPIFSSLGDGCSFPTCLVNQDPEQASTPAGLNSTAKNLENHQFPAKPLRESQSHLLTDSQSWTESSINPGKCKAGMSNPALTMENET

SEQ ID NO: 12010 - DNA, 2242 bp, Homo sapiens
  CDS (153)..(2144)
gtgctaccccctccccccgggtgctggctccatgtctgtgtgaccggcctcaggggtagagtccaggcccgacgcggggcgggccagcggcggcggcagctgaggtgagagacggcggcggcggcgcgggcacccggccccccagcgggaggatgaagcggcggaacgccgactgcagtaagctccgccgccccctaaagcggaaccggatcaccgagggcatttacggcagtacatttttatacctgaaattcctggtggtgtgggcacttgtcctcctagcagattttgtcctggagttcagatttgaatacctgtggccattctggcttttcatcagaagcgtctatgattccttcagataccagggactggccttctcagtattttttgtttgtgtagcattcacgtcaaatataatatgcctgctgttcatccccatacagtggcttttttttgctgctagcacatatgtatgggttcagtacgtatggcacacagaaaggggagtgtgtttgcctacagtgtctctctggatcctctttgtttatattgaagcagccattagatttaaagatctcaaaaactttcatgtagacctttgtcgtccatttgctgctcactgtattgggtaccctgtggtaactttggggtttggcttcaaaagttacgtaagctacaaaatgcggttaaggaagcaaaaagaagtacaaaaagagaacgagttttacatgcaacttcttcaacaagctctccctccagagcaacagatgctacagaagcaagaaaaagaggccgaggaagcagccaaaggattacctgatatggattcttcgatccttatacaccacaatggaggtatcccagccaacaaaaaactctccacaactttgccagagatagaataccgagaaaaagggaaagaaaaggacaaggatgccaaaaaacacaaccttggaataaataacaacaatattctacaacctgtagactctaaaatacaagagattgagtatatggaaaaccatatcaatagtaaaagattaaataatgatcttgtgggaagtacagaaaatctcttgaaagaggactcatgcactgcttcctcaaaaaattacaaaaatgccagtggagttgtgaactcttcacctcgaagtcatagcgccacaaatgggagcattccttcctcatctagtaaaaatgagaagaagcagaaatgcactagcaagagcccaagtacacacaaggacttaatggaaaactgtattcctaataaccagctaagcaaaccagacgcactggtcaggctggaacaagacattaaaaagttaaaggctgacctgcaagccagcagacaagtggaacaagagctccgcagtcagatcagctccctttcgagcaccgagcgagggatccgctcagaaatgggccagcttcggcaggagaacgagctgctgcagaacaagttacataatgctgtgcaaatgaagcaaaaagacaagcagaatatcagccagttggagaaaaagctaaaagctgagcaggaagcccgaagttttgtagagaaacagttaatggaagagaaaaagaggaagaagttagaagaagccactgctgcccgggctgttgcgtttgctgctgcatctaggggagaatgcaccgaaaccttacggaatcggatcagagaactagaagcagagggcaagaagctcacgatggacatgaaggtgaaagaagaccaaatcagagaactagaactaaaagtccaggagcttcggaaatataaggaaaatgagaaggacactgaggtgttaatgtcagccctctcagccatgcaagacaaaacacagcacctggagaacagcttaagtgcagagacgataatcaagctggacctgttctccgcactgggcgatgcaaagcggcagctcgagattgcccaaggacaaatccttcagaaagatcaggaaatcaaggacctaaaacagaagatagccgaagtcatggccgtcatgcccagcataacatacagtgccgccaccagccccctgagccctgtttccccccactactcttccaaatttgtggagaccagcccctctggacttgaccccaatgcctctgtttaccagcccctgaagaaatgaaggccagctgtgtgttgtgcccaaaaatttggttaccggaaggcattgcaaaggagcgtctctggcagtcaagataaaaaaacagtttctattgt

SEQ ID NO: 12011 - protein, 664 aa, Homo sapiens
MKRRNADCSKLRRPLKRNRITEGIYGSTFLYLKFLVVWALVLLADFVLEFRFEYLWPFWLFIRSVYDSFRYQGLAFSVFFVCVAFTSNIICLLFIPIQWLFFAASTYVWVQYVWHTERGVCLPTVSLWILFVYIEAAIRFKDLKNFHVDLCRPFAAHCIGYPVVTLGFGFKSYVSYKMRLRKQKEVQKENEFYMQLLQQALPPEQQMLQKQEKEAEEAAKGLPDMDSSILIHHNGGIPANKKLSTTLPEIEYREKGKEKDKDAKKHNLGINNNNILQPVDSKIQEIEYMENHINSKRLNNDLVGSTENLLKEDSCTASSKNYKNASGVVNSSPRSHSATNGSIPSSSSKNEKKQKCTSKSPSTHKDLMENCIPNNQLSKPDALVRLEQDIKKLKADLQASRQVEQELRSQISSLSSTERGIRSEMGQLRQENELLQNKLHNAVQMKQKDKQNISQLEKKLKAEQEARSFVEKQLMEEKKRKKLEEATAARAVAFAAASRGECTETLRNRIRELEAEGKKLTMDMKVKEDQIRELELKVQELRKYKENEKDTEVLMSALSAMQDKTQHLENSLSAETIIKLDLFSALGDAKRQLEIAQGQILQKDQEIKDLKQKIAEVMAVMPSITYSAATSPLSPVSPHYSSKFVETSPSGLDPNASVYQPLKK

SEQ ID NO: 12012 - DNA, 2500 bp, Homo sapiens
  CDS (569)..(1618)
ctttgcagctgagactgggtggagggagaggcgcggagacactggggctctgacgagctggctgaggccctctcagtaggggggtcacgcctcctggaactcagggaccccaagtttctgtgcattcagggcggggctggccccatgccctgtgcataggggcctggctgcatcccagtcgatcagccagaggcagcagcagtggactcatcaattgtggaggaagccctggggaccctggggaccttgccgactctattcccagccagctcctaggacaagcctcagagccaacacccgctcgaccctctcccggcccctccccttctttgtcttttgcagatgatcgccgggtgtcgatccttttccctccagtcagggccaggcgtggacgccgccggaccgctgagactcggggcacggtgaagcactggccggggtctggctgggtctggcgctcgggagccagatggaggtggcgataggggccatgggagccggcgccaagtagccggtggacccccgcgctcgcacctctcccggcgcccgggcgctccccaaggctgccatggaggtgcctaacgtcaaggacttccagtggaagcgcctggcgccactgcccagccgccgggtctactgctccctgctggagaccgggggccaggtctatgccatcgggggatgtgacgacaacggcgtccccatggactgcttcgaggtctactccccggaggccgaccagtggaccgccttgccccggctgcccacagcccgggcgggggtggccgtcaccgccctggggaagcggatcatggtgattgggggcgtgggcaccaatcagctgcccctgaaggtcgtggagatgtacaacatcgatgagggcaagtggaagaagaggagcatgctgcgtgaggccgccatgggcatttctgtcacggccaaagattaccgagtatatgcggcaggcgggatgggcctggacctacgtccacacaaccacctccaacactatgacatgctgaaggacatgtgggtgtccctagcacccatgcccaccccgagatatgctgccacctccttcctccgaggctccaagatctacgtgctggggggacgacagtccaagtacgcggtcaacgccttcgaggtctttgacatcgagactcgctcctggaccaagtttcccaacattccctataagcgggccttctccagctttgtgaccctggacaaccacttgtacagcctaggaggcctgcggcaaggtcgcctctaccggcagcccaagttcctgcggacgatggacgtgttcgacatggaacaggggggatggctgaagatggaacgatcgttcttcctcaagaagcggcgggcagattttgtggctggctctctgagtggacgggtcatagtggctgggggacttgggaatcaacccactgtcctggagacggcggaagcattccacccagggaagaacaaatgggagatcctccctgccatgcccacaccccgctgtgcctgctccagcatagtcgtcaagaactgcctcctcgccgtgggaggtgtcaaccagggtctgagtgacgcagtggaggccctgtgtgtctctgactcctagctgtctctgggctcagtacctttgccctggaccatatcacttcactcttaacatgaggaatgatcttgtccaagcagtcggggctacttccaagaatgtcagctcctgttagcaaccagtggagtctggccttggggctctaagttgacctctctatagctccaaatcctaccaatctcagaaaactgtaagaggcacagatgactccaccagctgcagagctgactctgaagagagtcttcacttactgcacaggcaaagaaaggcacaggaatatttcctacctctccctcctgtgagtcccacctccccccacccccatctccaggaggcaggtagagcagttctgaccgagaggatagactgctgttgctgtctttccccagctctgaactagttttaaggtagcttaggatgaaaaatggagaatgattgggggttccaaaccactttcttctcccttggcttatatctcttcaccatttggtggtcaactgtgggcctaccctggacctcatctactcagcgagaattggacatgaagctagaggcagctgccttggaagggaagtcaggctcacttggacagcccaggccatggcaggaagaatcccttcctcttggggtccttgatgggcatgtgtgatggggaaggagcagtctcccagccctgggtctgctccccacatctctcctaattccacttcaccttttgccaccccctccccaccagaggcctagcccttttgtcaccgaaggcccccagagtgtttctgtgtgaaaccctctcatttacactgtggcatcaaaatccacaaaagatggattaattgcactctggttaatagcagcagcacaatgattaaaatctatattcct

SEQ ID NO: 12013 - protein, 350 aa, Homo sapiens
MEVPNVKDFQWKRLAPLPSRRVYCSLLETGGQVYAIGGCDDNGVPMDCFEVYSPEADQWTALPRLPTARAGVAVTALGKRIMVIGGVGTNQLPLKVVEMYNIDEGKWKKRSMLREAAMGISVTAKDYRVYAAGGMGLDLRPHNHLQHYDMLKDMWVSLAPMPTPRYAATSFLRGSKIYVLGGRQSKYAVNAFEVFDIETRSWTKFPNIPYKRAFSSFVTLDNHLYSLGGLRQGRLYRQPKFLRTMDVFDMEQGGWLKMERSFFLKKRRADFVAGSLSGRVIVAGGLGNQPTVLETAEAFHPGKNKWEILPAMPTPRCACSSIVVKNCLLAVGGVNQGLSDAVEALCVSDS

SEQ ID NO: 12014 - DNA, 2701 bp, Homo sapiens
  CDS (163)..(2325)
aggcggtacccggacgggttcgtcccgggctgtttcgcgtccggcctgaggcggctggggccgcgcaggtagtgtccctgcacttcttgcccgggcgcgtgaggccagctccgctgcgctggcctccagcttccagccctcctcccctaagccgccgccatcatgctgctgcctgtgttcaccctgaaactgcgccacaaaatcagcccccgaatggtggccatagggcgctacgacgggactcacccgtgcctggcggccgccacccaaacgggcaaggtttttattcataatcctcatacacggaaccagcatgtcagtgcatccagggtcttccagagccccctgggatctgatgtttctcttctcaacattaaccaggcagtcagctgtctgactgcaggcgtattgaaccctgagcttggctatgatgcccttttagtggggacacagactaatcttttggcttatgatgtctacaataattcggatttgttctacagagaggtagcagatggggcaaatgcagttgtgctggggacattgggagacatttcttcccctcttgcgattattggtggcaattgtgctctgcaaggtttcaatcatgaaggaagtgatctcttttggacggttactggagacaatgttaattccttggccttgcgtgactttgatggtgatggaaagaaagagcttcttgttggatctgaggattttgatatccgagtttttaaggaagatgagattgtggcagaaatgacagaaacagagatagtcacctctctttgtcccatgtatggcagtcgatttggttatgccctttccaatggcacagttggagtttatgacaaaacatcccgatactggagaattaaatcgaaaaatcatgccatgagcattcatgcttttgaccttaattctgatggagtgaatgaactgataactggttggtccaatgggaaggttgatgctcgaagtgaccgaactggggaggtcatctttaaggacaatttttcttctgcaattgccggtgtggtagagggagattaccggatggatggccacatacagttaatctgctgctcagtggatggggaaatccggggctacctgcctggcacggctgagatgaggggcaacctcatggacaccagtgcagagcaggacctgatccgagagctgagtcagaagaagcagaatctgttgctggaactccgtaactatgaggaaaatgccaaggctgaattggccagtccactgaacgaggctgatgggcatcggggcataatcccagccaataccaggctccacaccacgctctcagtcagcctggggaatgagacccaaactgctcatacagaattacgcatttccacttctaatgacaccatcatccgagcagtattgatttttgcagaaggaatttttacaggtgaaagccacgtggtacatcccagcattcacaacctctccagttccatctgcatccctattgtgcctcccaaagatgtccctgtggatctgcactcgaaggcattcgtgggttacagaagcagcacccagtttcatgtctttgaatcgacaagacagctccctcgattctccatgtatgcgctgaccagcctggaccctgccagtgagccaatcagttatgttaactttaccattgcagaacgggcacagagggttgttgtatggctcggtcagaactttctgttaccagaagacactcacattcagaatgctccatttcaagtgtgtttcacatctttacggaatggcggccacctgcatataaaaataaaacttagtggagagatcactataaatactgatgatattgatttggctggtgatatcatccagtcaatggcatcattttttgctattgaagaccttcaagtagaagcggattttcctgtctattttgaggaattacgaaaggtgctagttaaggtggatgaatatcattcagtgcatcagaagctcagtgctgatatggctgatcattctaatttgatccgaagtttgctggtcggagctgaggatgctcgtctgatgagggacatgaaaacaatgaagagtcgttatatggaactccatgaccttaatagagacttgctaaatggatataaaattcgctgtaacaatcacacagagctgttgggaaacctcaaagcagtaaatcaagcaattcaaagagcaggtcgtctgcgggttggaaaaccaaagaaccaggtgatcactgcttgtcgggatgcaattcgaagcaataacatcaacacactgttcaaaatcatgcgagtggggacagcttcttcctaggtgaggaaaatacaggtcatgaagttcctggcaaagattttctgttaaaaacctatgctggtttgctttggatcacaccctggtgaaccccgggtgctaagaatgaaaataaccttggtgagttgtacaaattaaagacaaagaactacatgtgaagatagacttgctttctatttttaaatcagtagtagtactgttgctgaataatactaggtttttatggaataggatgaatgcttttgaagtattagggcttcagagtccaattttgcttatttatggtatataaatacatatttttttcttgaaattgcaattgagtttgtacttttcaaatagattatctactttttcattaaaatgtaaagatgtt

SEQ ID NO: 12015 - protein, 721 aa, Homo sapiens [sequence omitted]

SEQ ID NO: 12016 - DNA, 2330 bp, Homo sapiens
  CDS (73)..(1119)
aataagactctatcaagatccatagcatctgaagttgtagccaggcctgcttcattgtctaatgataaactgatggaaaagtcagagcccgttgaccagcgaagacatactgcaggaaaagcaattgttgatagtagatcagctcagcccaaagaaacctcggaagagagaaaagctcgtctgagtgagtggaaagctggcaaaggaagagtgctaaaaaggccccctaattcagtagttactcagcatgagcctgcaggacaaaatgaaaaaccagttgggtctttttggactaccatggcagaagaagatgaacaaagattatttactgaaaaagtaaacaacacattttctgaatgcctgaacttgattaatgagggatgtccaaaagaagatatactggtcacactgaatgacctgattaaaaatattccagatgccaaaaagcttgttaagtattggatatgtcttgcacttattgaaccaatcacaagtcctattgaaaatattattgcaatctatgagaaagccattctggcaggggctcagcctattgaagagatgcgacacacgattgtagatattctaacaatgaagagtcaagaaaaagctaatttaggagaaaatatggagaagtcttgtgcaagcaaggaagaagtccaagaagtcagtattgaagatacaggtgttgatgtagatccagaaaaactggaaatggagagtaaacttcatagaaatttgctatttcaagattgtgaaaaagagcaagacaacaaaacaaaagatccaacccatgatgttaaaacccccaatacagaaacgaggacaagttgcttaattaaatataatgtgtctactacgccatacttgcaaagtgtgaaaaaaaaggtgcagtttgatggaacaaattccgcatttaaagagctgaagtttttaacaccagtgagacgttctcgacgtcttcaagagaaaacttctaaattgccagatatgttaagagatcattatccttgtgtgtcttcattggaacagctaacggagttgggaagagaaactgatgcttttgtatgccgccctaatgcagcactgtgccgggtgtactatgaggctgatacaacataagagaaataaagctctgttagggaatggggtttttattatttgtggggtgttttgttttgagtagctttatattgctcttaggtctggagttggccatgtacctatgtatcctaagcattcacggcagtgagctcctttactaacattcatgttatggcaagagttgtcctctacattggaaagctaatcctaccttgtcagtttcaaccaactgagttttttctttaagaaaggtaaattttgtcagctagtttactatgttccttgaatataaacaggttataatactaccctgttcactttactaaatataagtacagtaatgatgcataattagaaaatgaggtattctaggtaaaatgtatgtttgccttgacatgtttttaaaagttatgatgtacctccctgcctttaaacagaatacttttttcttttttttggcctttctcagattagtcaaaaattctatagaatgactcacttcgaatactaagacacaggaggtttagcctgctttcttaccaaattcatgttacccagacttgtgttctcttgcgtcccttggactgcctgttgattgatggaaagtgtctgcactgacacttttcgtcagtagtctgtagtttcgtggcctcttttgattataactggggtcaccaagaaggtttacttaattaaataccgcatttctaagagaagatactttgtgtaagaaaagatgccacatttagtggtttaacttttgtaacttcacttgatagtttttaagcaattagaatggagttagggaaagaacatatcatactgaacaaatgtcattctagtttagatagcatttctaagataactgatactaatacttgttttcttccctataacataaaaaacttcactgttaagtcatgtcccttgaaacatgatagttacatacacagttttctctccacacataaataacaccactaaagttgttttgtaaggttccaaactaatatggcatatatcaactctacagtttcaaataaatgactttttaattgtaaaagattagttgaaaaactgtatgaatgtgaagatcacatgcttagtcatttttatgttcattccactttgtatatcttttctatttattgacttctcatgttctagagagtaggacttttattccgtgtacctgatatatatacaattaaaatatctgtataatt

SEQ ID NO: 12017 - protein, 349 aa, Homo sapiens
MEKSEPVDQRRHTAGKAIVDSRSAQPKETSEERKARLSEWKAGKGRVLKRPPNSVVTQHEPAGQNEKPVGSFWTTMAEEDEQRLFTEKVNNTFSECLNLINEGCPKEDILVTLNDLIKNIPDAKKLVKYWICLALIEPITSPIENIIAIYEKAILAGAQPIEEMRHTIVDILTMKSQEKANLGENMEKSCASKEEVQEVSIEDTGVDVDPEKLEMESKLHRNLLFQDCEKEQDNKTKDPTHDVKTPNTETRTSCLIKYNVSTTPYLQSVKKKVQFDGTNSAFKELKFLTPVRRSRRLQEKTSKLPDMLRDHYPCVSSLEQLTELGRETDAFVCRPNAALCRVYYEADTT

SEQ ID NO: 12018 - DNA, 2624 bp, Homo sapiens
atcagatgttgggacccttaagtgttctgcacctggggagagttaggaaccacttaaggagtgtctgttgcttgccaatcttaaaatttttagtttgcacctgaatcaggggctgtcagagtccagactgctcttgaaatagaaaagactggtcgttaaaggcaggttcgttgagtctttcatcgttgagtgataccacctctgcagatggctcagtggggcagccccgtaccacagcctgcccttgaggttgtgtagtttagataggtcacagagttgctgggcctaccgcaggtctcctgaccctggtgcagttttacttcaattacaaccaccaaaatagctacagtcaaaaattccaaagttcctacaccatcaacctccaccccacttccgtccaaagtccacttagaggctctcagttttggaccttagaaacacttagggagctttttaaaaagatcgattctgtatttttagtagagatggggtttcacccagctactcaggaggctgaggcaggagaatcacttgaaccggggagttggaggttgcagtgagccgagattatgtcactccagcctgggcaacagagtgagactccgtcttaggaaaaaaaaaaagattgattctggccgggcacagtggctcacgcttacagtcccagcactttgagagactcaggcaggaggatcacttgagcttaggagtttgagactagcctgggcaacccagtgagaccccgtatctacaaaaattagccaggtgttgtgacatgtgcctgtggtcccagctactcaagaggctgaggtgagaggagcaagtgagcccaggagttcaaggctgcaatgagctgtgatcgcaccactgcactccagctcgggtgacaagagtgagaccccgtctgaaaaaaagattgatcccaaggccttgcccagattctgattttattggcctggagtgtggcctaggcattagaaaatcttcaagagagtctaaggtgcagcggaattgagagccacggacagaagaagccctaaattgtggaaatgcacagccaccgtcaccacctatcggtacgatgacatctcaaggagtcactggccctaggtttctgcagtaggatcttaagatctgatctctgccctcaagtgagtgcacgtgcagtaaagctgtcatcgtgccatgacagatgtctgcaaggactttacagtggggtccaaaggatgccaccatcagctccacctggggctcaacaaagcctgaaagaagaaagggatgatgcttccagcagaaacctggaggcctgcagctctgccagcccagcacagcaagcgaggccatttgtccagcaggggcagaaggagggaactcagccagccagcgtttcctacaagcagctccatgagaggtttccacttaaaatgctaaatcataattatttaatcagattcgttccttaagttctttaagcagcatcgctgtcctaccacgagtggtcatcaaggagcagggtttaactcaactctgagttacccggcagggtacctgggtaactgcctgggttgaggtacccagcaggcttcatgtgcatgtgcacactgccccctgataggacctggtttattcacaggctcaggtgtcactgcagctccccagtgactatcttcgcgcaagttggactcaatggcctgggaggtttgtcccagccgacagatacctgaccatgcccatcctcaccattccctcccccatgctgcatccatccaaccttgatctccactgtgtcccaggcaccctaagatgcacaagctatgtgggccctgccctcacagaacttgtagtcttctgccccaaacaagccagttcaccgtcttcatgatcaggccaaaggttgaggtacccagcaggcttcatatgcacatgcacactgtcccctataggaccatgccttgcccagctggctgcactctagagggtgctttgtaggaaggacagagtggagaggacagtggggaggtacttgggtgttcaacagccagaagggagggaaactgaaaaagaatcaggagtccagccatcccctccccacctcctgcccccacttccaccctggctgctggccctttgcccttgaatatgggtgatataggtgtggctattcagttccagtcacagtgctgcctctatgtcttttgcaagctggggtcttccttactcagaaggcctggaggccctgccagatgctgccttccggactggctgcccgctgcagtgttttcacgggagccaagccagccccgggcctgtagcctcccatgtgacaaagtttcagacaccacagtcctcagctggaccacagtaaaacacttgccttccccaacccatgattcttgcttggaaacatgaacctgatgttccacgtgcgttcagccaatcaaacctcaagaatgtgattgagcagtgaggctgcgttttgggcaagacactgagctctgaaataagacttttcttggaatctcaagccctcaacttacagtgggaccctaagaaatgcacttcagtttccttttatgtaaaatggtggtaaaattaattgtgttcattaaattgcacacaactat

SEQ ID NO: 12019 - DNA, 2456 bp, Homo sapiens
acacaatggtgagaagccctatgaatgtaatgaatgtgataaagccttcagtgtgctttcttcccttgttcaacatcagagaatacataatggagacaaaccctatgagtgtcacaaatgtgggaaggcctttagccaggggtcacaccttattcagcatcagaggagtcacattggtgagaaaccctatgagtgtaatgagtgtgggaaaacctttgggcagatatccaccctaattaagcatgagagaacacacaatggagagaagccctatgagtgcagtgactgtgggaaggccttcagccagagtgcacaccttatccaccatcaaagaattcacactggagagaatccctatgagtgcagtgaatgtgggaaggccttcaatgtttgttcctctctcattcagcatcacagaattcatactggtgagaaaccttatgaatgtagtgactgtggcaaggcgttcagtcagcattcacaatttatccaacatcagagaattcacactggagagaaaccctacatgtgcaatgagtgtgagaaatccttcagtgcatgcttatcccttatccaacacaagagaattcacactggagagaaaccctatgtatgtgccaaatgtggaaaatccttctgacaaagctctcaccttattcaacatcagagaattcacagtggggagcaacctcatacgtgtaatcgatgtgaaaaaaccttcagttagagaataactcttagtagtcatgagaaaatccatacaattcacattagagagcaagtctatgaatgtagtaagtgtggggaactctagcgcacagtcatctttcattcaacattgtacagttcacagtggagagtaactgattagtctataaattcttcacagttatacattatatgagagtcatactcgtgagaaatgagtcactttatggttttccttttggagattcagctcttaagggatttcactctcccagtgagctgctaactaaaggcaggctgctgaagtatatagcagcaatcccacaatagcacaccttgcttcagattcagaggatgagcccccttcttgagccctgtagatatgtgaaacttaattatttagatgcatttcatggcaccagaccctaaggtacagttaggtatttcactggagaccacttactttgctttgctttgctttttttttttttttttgtatgatttatttcaacttcaaagaaagtagttgagatccttgcacttccaagtgtgatggaaccaggctagggttttctttgtttgggcctcttcaaaacgtttttattctgttataaggaatatgataccttaagcttcaattcacagggaagagaaacatgattataagcaaaagtttgtcaaggaattaaggtgagtctttgtgtagattaaaatagtcgagaccttgctaaaaagtcagataacactgtaatccacctccaggtttccaagagttaagatgctgccagcaaggagcttgcagtcttgtagctggcccaatatatccaactattcaaaatgggaaattgtacattttacttaaacaggatttggtagatgggtcttctagatatgttgtcatgaagaaaaatcaggaaaatgtccaagggtgggagcctgtggcttatggcttcacttacccatcacagatagctatgttacactgcaagaacagagttcatggcttttcctgaggtggctggaaaccttaatctcctgaagttaagtcaaaacttaaatgtcaattcacccagctctcttgcctgcaggctgatccagggacttagagcttgttacccagttacaacttcttctagagaagaacttttaagaaggaagcaaaaagaaattcagtttcccccaaggatctcttctttgaggttccatcaagagatgacaaaaggaggctgggtgcggtgtctcacacctgtaatcccagcactttgggaggctgaagtgggcagataacgaggtcaagagatcaagaccatcctggccaacatggtgaaaccacatttctacaaaatgcaaaaattagctgggcatggtggtgcacgcctgtagtcccagctacttgggaggctgaggcaggagaattgcttgaacccaggaggtggaggtagcagtgagccaagattgcaccactgcattccagcatggccacaaagcaagactccaaaaaatatatatatatatgacaaaagggttaggaagcttttcctctgaggcccacgattacacaaccaaatcagaaaataatattttttttgttttaaacctgtttacataagatggaggtgtttacttaactaagaacctcggtatttactcaaatccggttttgggttttatggctaaaacatttctccagattaaccttatcagtttggaatatgtttttattttccattaaatatttcatccaaatc

SEQ ID NO: 12020 - DNA, 2907 bp, Homo sapiens
  CDS (142)..(525)
tcggaactcgccaggggcgccgccggcggcggagggagcgtgactgcgctgcgcagggcgctaggaggcattgtcgccgctcaggcccttttgtgagaagcagaccagcctgggggctggcggcaggacacctgtgtctgcatgctgaagaagatgggtgaggccgtggccagagtagcaaggaaggtcaacgagacggtggagagcggctctgacactctggacctggccgagtgcaagctggtctcctttcccattggcatctacaaggtcctgcggaatgtctctggccagatccacctcatcaccctggctaacaacgagcttaagtccctcaccagcaagttcatgaccacattcagtcagctccgagatgtgcccgtggagaagctggccgccatgccagccttgcgcagcatcaacctccgcttcaacccactcaacgccgaggtgcgcgtgatcgccccgccgctcatcaagtttgacatgctcatgtctccggaaggcgcaagagcccccctaccttaggccaccctcctcatgcccacccagcaagggacagaggccacaggcctggaaccctggaagggagggaggcccatgggaggccaagcctgggggctgggggcgggtgggccgagcagcacgtggtgggtggggtgcagctggtctggatagatagcttacagcagtagtgggctctggaatgcccaagggaagaggcaaggtggggcctgcagcccggactcggcactcacagctgctgtgcaaactcaggcagatctcctgccctctctgagccttgtcacttgaaaaaaacaggaccctttccctcctttgggctccctggaggtttttaagcagtacgtgcctccaagttacctccagatcagcaggcacaggtgggcattgccaggtattttctgagcccctgcgggtttgaggccttgtttttagtgctgagagccagttgctgccctgagaagagaagacaacctccatctatttattgcttcctgagaactgacctggatgcggccctctgcagggcccagtcttcagtcctgtggtccctggactggtgggaacctgaactaggagtcctgggagagctgtggtgggaatatgggctggcactgctgcagggcaagaacattcatgtaggagcccgaggaccagcaggctgggaatggggagcaagtcacgtcagctctgtcattccccacagttaacaaattggcggggtgggaagtccctgagtgctccgtccctctagcatcactcctgagctgcgggagaggtggcccagagaacagcagagtcagttacacctgcagctcttgtctaaagtgattagatggccaccctcaccactgtccagtccagcagcagcctggctgccttgtcatggcctcctgggggcagaaggcgatgtggaccacgggatttgtagccagccagctcccaggccaacgcccaaagccctgatgacctggttcttctgaggccctcaacctggcatcttagggtatggtcaggcaacagggtgaccagctgtcctggtttcccaggacatggaactttcaatgctaaaactgggacagtacccagcaagtggggatggttggtcccctaccaggagagggcctggggctcttgcttcccgagaacgcctgtggcttgaagaaccttgactgcttggtcctcaggtatctacctcccaccttctcctcatctgtggagcaagccaactcagtgccccagaccccacctgatctgcatctttgtttgcatctccagagacacctgaggccccagagcttgaggcaaagccaggccgtccaaatcctgtgtgccgtggacgagtggccactttactactcctaaggctaagatgttgagagctcagaccactgctcagagcagtaatccctgctcagaatgctcccagttccctcgtccctgcccaggtctcttgtctcttgggaaggaactgataggtcgggccattgttgggccatcactgagcgctcagtatctcaagagactctgttcattctgctcgtatcccaaggcctggttggtcaaactctgggcaaagggttttcaggatgaggaggtcaagacaggatgtccagagctaccgagttcatctgtgggtgttgggggcaagtgggggctgaagtcctgtgcaggctgcgctggccccacctgccttgtgccctggagtggggtttctccttgttgaagaagaggcatccttctctgatgtgcacaaacacaatgtatgaccagagccttgcaactcaaagtgtggtctgtggaccagcagcggcagtgacacctgggagcttgttaggaatgcagagtctaggcctcaccctatacctcccgactcagaccctgcattttagcaagacccccagctgattcctataagcactttagagtttgagaagcaaggacctaggctggggatgtcctccgagcagagggtgaagtttctctcagttctctccctgccacttccagggatctgagcctgtgttcagcctcctccctaacccaccctgggagacacttggcctgttagattgttccagagtctgcatggcactcctgaagaagggagtgggacctgcagtcaccaggagatgagggttaggtgtgcccagccctccagacccggcctttctggttaacccctgcatgccaagctgcctgctgccccaggtcctcacctcaggcctttgaaggggcagcttctggaagttgttttctcctctgcttggagagtttgcccttgtctgtcttggaaagtgtgggcagccacagatgcccccaaatcagagctcacagtgggtgagcccctaagcttcagtctgcaataaagaatgcattggtttc

SEQ ID NO: 12021 - protein, 128 aa, Homo sapiens
MLKKMGEAVARVARKVNETVESGSDTLDLAECKLVSFPIGIYKVLRNVSGQIHLITLANNELKSLTSKFMTTFSQLRDVPVEKLAAMPALRSINLRFNPLNAEVRVIAPPLIKFDMLMSPEGARAPLP

SEQ ID NO: 12022 - DNA, 2697 bp, Homo sapiens
  CDS (48)..(2435)
aaaaaaaaaaagcgggtgctgcttgctgcaggctctggggagtcgccatgcctacaacacagcagtcccctcaggatgagcaggaaaagctcttggatgaagccatacaggctgtgaaggtccagtcattccaaatgaagagatgcctggacaaaaacaagcttatggatgctctaaaacatgcttctaatatgcttggtgaactccggacttctatgttatcaccaaagagttactatgaactttatatggccatttctgatgaactgcactacttggaggtctacctgacagatgagtttgctaaaggaaggaaagtggcagatctctacgaacttgtacagtatgctggaaacattatcccaaggctttaccttttgatcacagttggagttgtatatgtcaagtcatttcctcagtccaggaaggatattttgaaagatttggtagaaatgtgccgtggtgtgcaacatcccttgaggggtctgtttcttcgaaattaccttcttcagtgtaccagaaatatcttacctgatgaaggagagccaacagatgaagaaacaactggtgacatcagtgattccatggattttgtactgctcaactttgcagaaatgaacaagctctgggtgcgaatgcagcatcagggacatagccgagatagagaaaaaagagaacgagaaagacaagaactgagaattttagtgggaacaaatttggtgcgcctcagtcagttggaaggtgtaaatgtggaacgttacaaacagattgttttgactggcatattggagcaagttgtaaactgtagggatgctttggctcaagaatatctcatggagtgtattattcaggttttccctgatgaatttcacctccagactttgaatccttttcttcgggcctgtgctgagttacaccagaatgtaaatgtgaagaacataatcattgctttaattgatagattagctttatttgctcaccgtgaagatggacctggaatcccagcggatattaaactttttgatatattttcacagcaggtggctacagtgatacagtctagacaagacatgccttcagaggatgttgtatctttacaagtctctctgattaatcttgccatgaaatgttaccctgatcgtgtggactatgttgataaagttctagaaacaacagtggagatattcaataagctcaaccttgaacatattgctaccagtagtgcagtttcaaaggaactcaccagacttttgaaaataccagttgacacttacaacaatattttaacagtcttgaaattaaaacattttcacccactctttgagtactttgactacgagtccagaaagagcatgagttgttatgtgcttagtaatgttctggattataacacagaaattgtctctcaagaccaggtggattccataatgaatttggtatccacgttgattcaagatcagccagatcaacctgtagaagaccctgatccagaagattttgctgatgagcagagccttgtgggccgcttcattcatctgctgcgctctgaggaccctgaccagcagtacttgattttgaacacagcacgaaaacattttggagctggtggaaatcagcggattggcttcacactgccacctttggtatttgcagcttaccagctggcttttcgatataaagagaattctaaagtggatgacaaatgggaaaagaaatgccagaagattttttcatttgcccaccagactatcagtgctttgatcaaagcagagctggcagaattgcccttaagactttttcttcaaggagcactagctgctggggaaattggttttgaaaatcatgagacagtcgcatatgaattcatgtcccaggcattttctctgtatgaagatgaaatcagcgattccaaagcacagctagctgccatcaccttgatcattggcacttttgaaaggatgaagtgcttcagtgaagagaatcatgaacctctgaggactcagtgtgcccttgctgcatccaaacttctaaagaaacctgatcagggccgagctgtgagcacctgtgcacatctcttctggtctggcagaaacacggacaaaaatggggaggagcttcacggaggcgagagggtaatggagtgcctaaaaaaagctctaaaaatagcaaatcagtgcatggacccctctctacaagtgcagctttttatagaaattctgaacagatatatctatttttatgaaaaggaaaatgatgcggtaacaattcaggttttaaaccagcttatccaaaagattcgagaagacctcccgaatcttgaatccagtgaagaaacagagcagattaacaaacattttcataacacactggagcatttgcgcttgcggcgggaatcaccagaatccgaggggccaatttatgaaggtctcatcctttaaaaaggaaatagctcaccatactcctttccatgtacatccagtgagggttttattacgctaggtttcccttccatagattgtgcctttcagaaatgctgaggtaggtttcccatttcttacctgtgatgtgttttacccagcacctccggacactcaccttcaggaccttaataaaattattcacttggtaagtgttcaagtctttctgatcaccccaagtagcatgactgatctgcaatttaaaattcctgtgatctgt

SEQ ID NO: 12023 - protein, 796 aa, Homo sapiens
MPTTQQSPQDEQEKLLDEAIQAVKVQSFQMKRCLDKNKLMDALKHASNMLGELRTSMLSPKSYYELYMAISDELHYLEVYLTDEFAKGRKVADLYELVQYAGNIIPRLYLLITVGVVYVKSFPQSRKDILKDLVEMCRGVQHPLRGLFLRNYLLQCTRNILPDEGEPTDEETTGDISDSMDFVLLNFAEMNKLWVRMQHQGHSRDREKRERERQELRILVGTNLVRLSQLEGVNVERYKQIVLTGILEQVVNCRDALAQEYLMECIIQVFPDEFHLQTLNPFLRACAELHQNVNVKNIIIALIDRLALFAHREDGPGIPADIKLFDIFSQQVATVIQSRQDMPSEDVVSLQVSLINLAMKCYPDRVDYVDKVLETTVEIFNKLNLEHIATSSAVSKELTRLLKIPVDTYNNILTVLKLKHFHPLFEYFDYESRKSMSCYVLSNVLDYNTEIVSQDQVDSIMNLVSTLIQDQPDQPVEDPDPEDFADEQSLVGRFIHLLRSEDPDQQYLILNTARKHFGAGGNQRIGFTLPPLVFAAYQLAFRYKENSKVDDKWEKKCQKIFSFAHQTISALIKAELAELPLRLFLQGALAAGEIGFENHETVAYEFMSQAFSLYEDEISDSKAQLAAITLIIGTFERMKCFSEENHEPLRTQCALAASKLLKKPDQGRAVSTCAHLFWSGRNTDKNGEELHGGERVMECLKKALKIANQCMDPSLQVQLFIEILNRYIYFYEKENDAVTIQVLNQLIQKIREDLPNLESSEETEQINKHFHNTLEHLRLRRESPESEGPIYEGLIL

SEQ ID NO: 12024 - DNA, 2503 bp, Homo sapiens
  CDS (90)..(1667)
actggttcgccgcggggaccgggcagggctccccgtcggagtgcactgcgccggacacttcaagccctggagggacaggaaagccagaaatggacttcgtgagactcgctcgactgttcgccagggcccgccccatgggactgttcatcctgcaacacctggacccctgtagagccaggtgggcaggaggcagggaggggctgatgcggccagtgtgggcgcccttcagcagctcctcctctcagctgcccctcggccaggagcgtcaggaaaacacgggcagcctgggctctgacccgagccactccaactccacggccacgcaggaagaagacgaggaggaggaggagagttttgggaccctctctgacaaatactcctcccggagactattccgcaaatccgcagcccagttccataacctgcggtttggggaacggagagatgagcaaatggaaccggagcccaaattatggcgaggccggagagacaccccgtactggtacttcttgcagtgcaaacacctgatcaaggaagggaagctggttgaagccctggacctgtttgagaggcagatgctgaaggaggagcgattgcagcccatggagagcaactacacggtgctgattgggggctgcgggcgggttggctacctgaagaaggccttcaacctctacaaccagatgaaaaagcgggacctggagccctcggacgccacctacacggccctgttcaacgtctgtgccgagtccccctggaaggactcagctctacagagcgccctgaagctccggcagcagctgcaggccaaaaacttcgagctcaacttgaaaacataccacgcgctgctgaagatggctgccaagtgcgcagaccttaggatgtgcctcgatgtgttcaaggaaatcatccacaaagggcacgtggtcacagaggagaccttcagtttcctgctcatgggctgcatccaagacaagaagacaggcttcctgagcaagatggcagagcacaggcagcagcccgacatcaggaccctcacgctactggccgaggtggtggagtccgggagtcctgcagagtccttgctgctggccctcctggatgagcaccaggtagaggccgacctgacattctttaacacgctggtgagaaagaagagcaagctgggagacctggagggggccaaggcgctgttgccggtcctggcaaagaggggcctcgtccccaacctgcagacattctgcaacctggccatcgggtgccacaggccgaaggacggtctacagcttctcacagacatgaagaagtcccaggtgacccccaacactcacatctacagtgccctcatcaacgcggccatcaggaagctgaactacacctatctcatcagcatcttgaaggacatgaagcagaacagggtcccggtgaacgaagtggtcatccgccagctggagtttgcagcccagtaccctcccacctttgaccggtaccaagggaagaacacctacctggagaagattgacggcttccgagcctattacaagcagtggctgacagtgatgcccgcagaggaaaccccgcacccctggcagaagttccggaccaagccccagggggaccaggacaccggcaaggaggctgatgacggatgtgcccttgggggcaggtgatggaagcacagctggaacaatgtgctcggcccccagtgctctgtgggagccccaggacaagtgagctggtgtcacctcctgcctgggggaagagccaggccctgaggaacagccgcagcgtgtcacaggtgttggtgaggacacacactaggcccaaggtgcctgtgctcccagcaggtccaagtgcagctccagccacctttgcgtgtcaccttcacgggacttccagctccagctacctttgtgtgtcacctcacacaccacaagggggctggggcatctggtccctggggcctgggccgccccgccgggttccataggccgatgctctgaaagaagagacgtggggctcgagagatttaaagattttatttttacaaatcacagctgatagacagcgaagccttccccatagagaccgtgctccaactcgggcctggggcactgctcgctgctcccaggaagggggtggcgtgacaggcaggaacctgcgaagtccagagtccagggtggagcgcgccagcctcagccagagcagccacgacagccacagtgtgtgcactcgatgatgcggccctgcaacggaggaggacagtgagacgatgccactgcgccacgctcgcccctgcacactcacatatgtggcaaccctcccacgaaggacctgccaccatgccatatagggacacacctcagaaacccttccttgacagctctggacagggaaaatttggctccctcatgaaggtagaaccagctgctgttgacaccgaggttacatctgtatgtctatttataatatgttctgcaaatccaacacacgtttgccaatc

SEQ ID NO: 12025 - protein, 526 aa, Homo sapiens [sequence omitted]

SEQ ID NO: 12026 - DNA, 2260 bp, Homo sapiens
  CDS (125)..(871)
aaaactcagctatgcaaagcaactcaggaatctttcaaagaagtaccaacctaaaaagaactcgaaggaggaagaagaatacaagtatacgtcatgtaaagctttcatttccaacctgaacgaaatgaatgattacgcagggcagcatgaagttatctccgagaacatggcatcacagatcattgtggacttggcacgctatgttcaggaactgaaacaggagaggaaatcaaactttcacgatggccgtaaagcacagcagcacatcgagacttgctggaagcagcttgaatctagtaaaaggcgatttgaacgcgattgcaaagaggcggacagggcgcagcagtactttgagaaaatggacgctgacatcaatgtcacaaaagcggatgttgaaaaggcccgacaacaagctcaaatacgtcaccaaatggcagaggacagcaaagcagattactcatccattctccagaaattcaaccatgagcagcatgaatattaccatactcacatccccaacatcttccagaaaatacaagagatggaggaaaggaggattgtgagaatgggagagtccatgaagacatatgcagaggttgatcggcaggtgatcccaatcattgggaagtgcctggatggaatagtaaaagcagccgaatcaattgatcagaaaaatgattcacagctggtaatagaagcttataaatcagggtttgagcctcctggagacattgaatttgaggattacactcagccaatgaagcgcactgtgtcagataacagcctttcaaattccagaggagaaggcaaaccagacctcaaatttggtggcaaatccaaaggaaagttatggccgttcatcaaaaaaaaataagcctccccctccccctcctgcctctgcctcaccctctgctgttcccaacggcccccagtctcccaagcagcaaaaggaacccctctcccaccgcttcaacgagttcatgacctccaaacccaaaatccactgcttcaggagcctaaagcgtgggggtgcaacaccggaggatttcagcaacctcccacctgaacaaagaaggaaaaagctgcagcagaaagtcgatgggttaaataaagaaattcagaaggagatggatcaaagagatgccataacaaaaatgaaagatgtctacctaaagaatcctcagatgggagacccagccagtttggatcacaaattagcagaagtcagccaaaatatagagaaactgcgagtagagacccagaaatttgaggcctggctggctgaggttgaaggccggctcccagcacgcagcgagcaggcgcgccggcagagcggactgtacgacagccagaacccacccacagtcaacaactgcgcccaggaccgtgagagcccagatggcagttacacagaggagcagagtcaggagagtgagatgaaggtgctggccacggattttgacgacgagtttgatgatgaggagcccctccctgccatagggacgtgcaaagctctctacacatttgaaggtcagaatgaaggaacgatttccgtagttgaaggagaaacattgtatgtcatagaggaagacaaaggcgatggctggacccgcattcggagaaatgaagatgaagagggttatgtccccacttcatatgtcgaagtctgtttggacaaaaatgccaaaggtgctaagacttatatttaataccataaaaaaaaaaaaacttaaaaaaaatggagttgtttctccccacaaccgtgactgttacaggcagttcctcaagagactggctggcaagcaccataatgcacgttctcctgtagtctcacgtggacttcagggtccgggcacctgaattgccttgtctagtttgggctgtaatcaagtttcacttgctgatgaaattttatgtggaaagctgccaaccgccaacttacagctatgtcattcaaaatctgataaacatttcttcttttggcggtatctgtagattaaaaaaaaagttgcattgtagcttctcatctttctgaatttaaaagccggcacgcatcatgcaggtgccaaagacttccctactcttgtttatatctagtatccaccatacactgagctacattaggtggttacagattgtaacttaataaactgaactgtgttagtttgttaaattgtatactcattcacttgggaggaagtcacaagtgaaataacatctccttcttgactaaagcagtaaataagattcttatattggc

SEQ ID NO: 12027 - protein, 249 aa, Homo sapiens
MNDYAGQHEVISENMASQIIVDLARYVQELKQERKSNFHDGRKAQQHIETCWKQLESSKRRFERDCKEADRAQQYFEKMDADINVTKADVEKARQQAQIRHQMAEDSKADYSSILQKFNHEQHEYYHTHIPNIFQKIQEMEERRIVRMGESMKTYAEVDRQVIPIIGKCLDGIVKAAESIDQKNDSQLVIEAYKSGFEPPGDIEFEDYTQPMKRTVSDNSLSNSRGEGKPDLKFGGKSKGKLWPFIKKK

SEQ ID NO: 12028 - DNA, 2363 bp, Homo sapiens
  CDS (63)..(1853)
aactattacatattgcggcgtcacagggacacgcagagtgtctacagcacctcacttctttgatgggagaagactgcctcaatgagcgcaacactgagaagttgactccagcaggcctggccattaagaatggtcagttggagtgcgtacgctggatggtgagcgaaacagaagccattgcagaactgagttgttctaaggattttccaagccttattcattacgcaggttgctatggccaggaaaagattcttctgtggcttcttcagtttatgcaagaacagggcatctcgttggatgaagtagaccaggatggcaacagtgccgttcacgtagcctcacagcatggctaccttggatgcatacagaccttggttgaatatggagcaaatgtcaccatgcagaaccacgctggggaaaagccctcccagagcgccgagcggcaggggcacaccttgtgctccaggtacctggtggtggtggagacctgcatgtcgctggcctctcaagtggtgaagttaaccaagcagctaaaggaacaaacagtagaacgtgtcacgctgcagaaccaactccaacaatttctagaagcccagaaatcagagggcaagtcactcccttcttcacccagttcaccatccccacctgcctccagaaagtcccagtggaaatctccagatgcagatgatgattctgtagccaaaagcaagccaggagtccaagaggggattcaggttcttggaagcctgtcagcctccagccgggctagacccaaagcaaaagatgaagattctgataaaatcttacgccagttattgggaaaggaaatctcagaaaatgtctgcacccaggaaaaactgtccttggaattccaggatgctcaggcttcctctagaaattctaaaaagatcccactggagaagagggaactgaagttagccaggctgagacagctgatgcagaggtcactgagtgagtctgacacagactccaacaactctgaggaccccaagactaccccagtgaggaaggctgaccgaccaaggccgcagcccattgtagaaagcgtagagagtatggacagcgcagaaagcctgcacctgatgattaagaaacacaccttggcatcagggggacgcaggtttcctttcagcatcaaggcctccaaatccctggatggccacagcccatctcccacctcagagagcagcgaaccagacttagaatcccagtatccaggctcagggagtattcctccaaaccagccctctggtgaccctcagcagcccagccctgacagtactgctgcccagaaagttgccacaagtcccaagagtgccctcaagtctccatcttccaagcgtaggacatctcagaacttaaaactgagagttacctttgaggagcctgtggtgcagatggagcagcctagccttgaactgaatggagaaaaagacaaagataagggcaggactctccagcggacctccacaagtaacgaatcgggggatcaactgaaaaggccttttggagcctttcgatctatcatggagacactaagtggcaaccaaaacaataataataactaccaggcagccaaccagctgaaaacctctacattgcccttgacctcacttgggaggaagacagatgccaagggaaaccctgccagctccgctagcaaaggaaagaataaggcagaaatgtacagcagctgcatcaatctttcctctaacatgctgattgaagagcatctgtgtaacgacacacggcataatgacatcaatagaaaaatgaagaaatcctacagcataaagcacattgctgagccagagtcaaaagaactcttcttgtaagtcactttttaaattttctctcactgatgccctttggaaattattggaaatttctggactatcctctttggaaagagaaccatgaaaacaatgcctcaccagcagaagaacagaatatcaggatgccttaaatttatagtagtagactgtaaaagattcattttggggtgatatctgtatatataacttgtttttttaaaagatgccgtttaaaagcatgattgggaaaatgtatgttttttaagagtagattgattcaccctacccacaggacattcaccaagccactgataccattttatatttcatcaattgcatgagtatttgctaatgttgattgaacctccctttccccataatgtgggcagatttggctcagctccttcatgagatcaggtcagtggtattgtttctgtcaagagtgttttttctgtcatttctactttttgtataaaggaaataaaacaatgttaacagccacctataagcttggggcacctactttct

SEQ ID NO: 12029 - protein, 597 aa, Homo sapiens [sequence omitted]

SEQ ID NO: 12030 - DNA, 2786 bp, Homo sapiens
  CDS (123)..(1634)
atgagagagatgttgttgcacagcaggaatccattttggctttggaaaaattccctactccagcatctcggcttgcactcactgatatattagaacaagagcagtgtttctacagagtaagaatgtcagcttgcttctgtcttgcaaagattgcaaattcaatggtgagcacatggacaggaccaccagccatgaagtcactcttcactaggatgttttgttgtaaaagttgtccaaacattgtgaaaacaaacaactttaagagctttcaaagctattttctacagaagactacgccagttgcaatggctttattaagagatgttcataatctttgtcctaaagaagtcttaacatttattttagacttaatcaagtacaatgacaacaggaaaaataagttttcagataactattatcgtgcagaaatgattgatgccctggccaactctgttacacctgcagtcagtgtgaataatgaagttagaactttggataacttaaatcctgatgtgcgactcattcttgaagaaatcaccagatttttgaatatggaaaaacttcttccgagttacaggcataccatcactgtcagttgtttgagagccatacgggtacttcagaagaacggacatgtgccaagtgatccagctctttttaaatcttatgctgaatatggccactttgtggacattaggatagcagctttggaagcagttgttgattatactaaagtggacagaagttatgaagaactgcaatggctacttaatatgattcagaatgaccctgtaccctatgtaaggcataagattctcaacatgttgactaagaacccaccatttactaagaacatggagtctcccttatgcaatgaagccctggtagatcaactttggaaacttatgaattctggtacttcacatgactggaggttacggtgtggtgctgtggacttgtacttcacactttttggcctcagtagaccttcctgtttacccttgccagagcttgggttggttcttaatctaaaggagaaaaaagctgtcttgaatcctaccataattccagagtcagtagcaggcaaccaagaagctgcaaataatccaagcagtcacccacagctagttggatttcagaaccctttttccagttctcaagatgaggaggagattgatatggatactgttcatgatagccaggccttcatttcccatcatttaaacatgcttgaaaggccgtcaactccagggctctcgaaatatcggccagctagctcccgatctgctttaataccccagcactcagcaggctgtgacagcacacccaccacaaaaccccagtggagtttggaacttgcacggaagggaacaggtaaagaacaagcacctttggagatgagtatgcatccagcggcaagcgctccactctcagtctttactaaggaatctacagcctccaaacacagtgaccaccatcaccaccatcaccatgagcacaagaaaaagaagaagaagcataaacataagcacaaacacaagcataagcatgacagtaaagaaaaggacaaggagcctttcactttctccagccctgccagtggcaggtctattcgttctccttccctttcagactgagaaggggacaaaaagacctttcctttcatgtccagaagaatgtatgtaactaaagctttgtcctctgtgaagaattataaaagggaggggggaaaggattcgcctctcctacagaaattctgaattcatttaagttctaagcatttgatttatgttatttatacagttgggatctaattaggaaaatgtgttttgtagttctggataaactatttcatccgctgtttcctccccaaaacacacacacagagcaaactccctttcataaaagccctcatatccactggcagtccccgttcgcatcatggtctccatgtgtaccgccaaagtcaattatgtttgaaagcctttggtggatgttatggggcaaagttatgatttacacagaagcgactgccaaatctgtggtgcaaccactatctccagtgaaatattgtataacaccatttggaactactgaaaagacagtggcttttctacagtactcttccttattgcaccatttttgtattaacgtagaaactaagcatcagaacttatgaacaaagaatatgttatttttccttttgctctaaaatactgagatttggggaagcaattcttttttaaaaaaattttgaataactatcttttgataacacattcggcggttacgatgttggaatttagcagaactatcaaatccaaaattattttcaaatcaagatgtttaaattataagtttttttgttttgttttccagtaagtataaatgaaaatattcatatgtaaaatatgttttgcttaatgtggacaatttacacacccaacacatactgtttccaaaattatttctatatgacacaaagtatgatacctttaaaaaggtgagcttatatattgtttattaacctggaaatagacaatttggctctcataccataagcatttaaaaacatatgaaatattttgatttctttatatggtggtgtgtttttatttctgaattttccatgtgctttaatatttgtttaagaatattttttatatctgttcaatttttatcattccccttaccattagaaagtttgacaaaaatacttgaatcttggacctctaaatatacttttagttgtgtttaacttgtttaataaataactttttaagttg

SEQ ID NO: 12031 - protein, 504 aa, Homo sapiens
MSACFCLAKIANSMVSTWTGPPAMKSLFTRMFCCKSCPNIVKTNNFKSFQSYFLQKTTPVAMALLRDVHNLCPKEVLTFILDLIKYNDNRKNKFSDNYYRAEMIDALANSVTPAVSVNNEVRTLDNLNPDVRLILEEITRFLNMEKLLPSYRHTITVSCLRAIRVLQKNGHVPSDPALFKSYAEYGHFVDIRIAALEAVVDYTKVDRSYEELQWLLNMIQNDPVPYVRHKILNMLTKNPPFTKNMESPLCNEALVDQLWKLMNSGTSHDWRLRCGAVDLYFTLFGLSRPSCLPLPELGLVLNLKEKKAVLNPTIIPESVAGNQEAANNPSSHPQLVGFQNPFSSSQDEEEIDMDTVHDSQAFISHHLNMLERPSTPGLSKYRPASSRSALIPQHSAGCDSTPTTKPQWSLELARKGTGKEQAPLEMSMHPAASAPLSVFTKESTASKHSDHHHHHHHEHKKKKKKHKHKHKHKHKHDSKEKDKEPFTFSSPASGRSIRSPSLSD

SEQ ID NO: 12032 - DNA, 3405 bp, Homo sapiens
  CDS (289)..(738)
gtgcaatttgtagaggctgcagcacacgagagtgaacagcagaaagaggcttcttggaaacataaccaggaattgcgaaaagccttgcagcagctacaagaagtattgcagaataagagccaacagcttcgtgcctgggaggctgaaaaatacaatgagattcgaacccaggaacaaaacatccagcacctaaaccatagtctgagtcacaaggagcagttgcttcaggaatttcgggagctcctacagtatcgagataactcagacaaaacccttgaagcaaatgaaatgttgcttgagaaacttcgccagcgaatacgtgataaagctgttgctctggagcgggctatagatgaaaaattctctgctctagaagagaaagaaaaagaactgcgccagcttcgtcttgctgtgagagagcgagatcatgacctagagagactgcgcgatgtcctctcctccaatgaagctactatgcaaactatggagagtctcctgagggccaaaggcctggaagtggaacagttatctactacctgtcaaaacctccagtggctgaaagaagaaatggaaaccaaatttagccgttggcagaaggaacaagagagtatcattcagcagttacagacgtctcttcatgataggaacaaagaagtggaggatcttagtgcaacattgctctgcaaacttggaccagggcagagtgagatagcagaggagctgtgccagcgtctacagtgaaaggaaaggatgctgcaggaccttctaagtgatcgaaataaacaagtgctggaacatgaaatggagattcaaggcctgcttcagtctgtgagcaccagggagcaggaaagccaagctgctgcagagaagttggtgcaagccttaatggaaagaaattcagaattacaggccctgcaccaatatttaggagggagagactccctgatgtcccaagcacacatctctaaccaacaagctgaagttacccccactggccgtcttggaaaacagactgatcaaggttcaatgcagataccttccagagatgatagcacttcattgactgccaaagaggatgtcagcatacccagatccacattaggagacttggacgcagttgcagggctggaaaaagaactgagtaatgccaaagaggaacttgaactcatggctaaaaaagaaagagaaagtcagctttacccctcaaacatgggagaaaaagtttcagcattttaattcaaattggtaaaaggctgagcaacccttaaagctgccataatggaagaagactgtgagctagcttaaaaaagagagaatgaaggggaagaaacaaaacccctgtgtggcagagtgtcgagatgagatgagcatttatttgtctccgtcgaattccttacggagataaggtgcagctgcaggggatgacaccgaagatacaagcactgagttcactgacagtattgaggaggaggctgcacaccatagtcaccagcaagtaagtcagtgtcagggtctgggacttccagggtggacagcacacagcccttctgaggtctgatagtctcctgcagcccttgcggacttagtgagaagatatctttttacataaactacttctcagtcatctacctgttctccttgaacttcccagctgcctttccaacccatatcttcactccatttttctctccaatccaccctttggtttgtattgtatctctttcttctgcttccttccccctcctacccacctttgcccctatttattctctgtagctatagcttcagaagcatttttacttgcaagacgatggacacattccccttgggctttttgtaactgaaatgcatcacagaagacagggagtcatcgaagggctgctcggggaggtggcagggcggaggaactgcttgggaagaaactccaagaagattggaatgcttccaaagcaagaatctttctcagtgaaatctcattatacaaagagaaccttatgcaacctgacaaaccactgaggtcatggtgactcagtgatcagcagatggtacttcaacagcaatcccctgtcaaacctcagaacttgaggctgaaacattgcttccacccaccatcagtgaagatgtaactagcatgttacaagagtgaataatctggacttcagagattaagtcaccaatagtgatctcacaagtactcaccggaactcctataatgtctccactttgtccatgccatttagcaatctcatctcctaaatggactgtgcctatgattcttaaggagaaagtgaatcattggtagatatcctgcacaagcagctggactttccagtaatagctttcttggggctattaggaaaattaaacaagaaatgaggctttctgggtctgcctgtatgtcttctgcataagaaaaagaagagacatcgaatcaaccaataagaagagcccaaataagcatcctcaaatcttttgggatttggcacttggggacatgagtagttgtctgggatacgtcatattctcaacagtttctttgtagtagtaggatcaccttcttataataggatcaccttcttgttgctatagctgtacccgaccttcccttctcccttgagtgcttgcatgagctccacttttccttttgcttgaacagcttctcctgagtcctccttaccgatggttgtgactttaattatatacatctctgtccctccagacagatccctctgtcctcactctctgatttcattgaggatcttgggtgagagagagggacctgcaggatgaacaaatgtctactctaagacagctagattgggaggttggctggtcactgatggttataatgactgtgggacaggattaacttcagaataaatgaacaggagacacagatgtgaagaaagtttctgattgatatggtctgaagtactcctggtattgcaagtcatttgctctaattctcaattgtaggcaaactgatttgtaaatttgcttcttcagccttctttcctgtagcctagcatggagaatctgaccagaccccattttgagaaggtcagcctacactggaatgaactttttacattagggcatttgtatttccctcacaatacttgccacattacttggcataggagagatgcttagtgtaattatgagttaacaagcctttggatcagggcttgactcatgatagacaaagtatatgcctgctggatggaagaatctcttgggcgagcaccatttttctttccatcacctttccttgaaaatatatcttcagctttgggtaggaggaatcttggtgtatgaaatcattgcaaatttacttcatcttttctggagtttgaagttgtgactctcctgctaccaattaaataaagcttactttgccataac

SEQ ID NO: 12033 - protein, 150 aa, Homo sapiens
MLLEKLRQRIRDKAVALERAIDEKFSALEEKEKELRQLRLAVRERDHDLERLRDVLSSNEATMQTMESLLRAKGLEVEQLSTTCQNLQWLKEEMETKFSRWQKEQESIIQQLQTSLHDRNKEVEDLSATLLCKLGPGQSEIAEELCQRLQ

SEQ ID NO: 12034 - DNA, 2741 bp, Homo sapiens
  CDS (113)..(1204)
gttttggcgttcagttatatttcacaaccaccttgattatttagctaaaaatggttatgaatatgaagagagcactaaaaatcaagcaacaaaagagcaacaggaacttttaatgaaaatgcttgcgctttcttgtaaactggagcgagaattccgttgtgtggaacttgctgatctaatgactcaaaatgctgtgaatttagccattaaatatgcttctcgctctcggaaattaatactggctcaaaaactaagtgaactggctgtagagaaggcagccgaattgacagcaacccaggtggaagaggaagaagaagaagaagatttcagaaaaaagctgaatgctggttacagcaatactgctacagagtggagccaaccaaggttcagaaatcaagttgaagaagatgctgaggacagtggagaagctgatgatgaagaaaaaccagaaatacataagcctggacagaactcgttttccaaaagtacaaattcctctgatgtttcagctaagtcaggtgcagttacctttagcagccaaggacgagtaaatccctttaaggtatcagccagttccaaagaaccagccatgtcaatgaattcagcacgttcaactaatattttagacaatatgggcaaatcatccaagaaatccactgcacttagtcgaactacaaataatgaaaagtctcccattataaagcctctgattccaaagccgaagcctaagcaggcatctgcagcatcctatttccagaaaagaaattctcaaactaataaaactgaggaagtgaaagaagaaaatcttaaaaatgtattatctgaaaccccagctatatgtcctcctcaaaacactgaaaaccaaaggccaaagaccgggttccagatgtggttagaagaaaatagaagtaatattttgtctgacaatcctgacttttcagatgaagcagacataataaaagaaggaatgattcgatttagagcattgtcaactgaagaaagaaaggtgtgggctaacaaagccaaaggagaaacggcaagtgaaggaactgaagcaaagaagcgaaaacgtgtggttgatgaaagtgatgaaacagaaaaccaggaagaaaaagcaaaaaagaacctgaatttgtctaaaaagcagagacctttagatttttctacaaatcagaaactatcagcttttgcatttaagcaggagtaaaggaagaaagtgaccctagggaagtaatggatttttttttactcatctttgaatatagactcgagtctttgggaaactcattatatatatattttttaaagagtttgaagcaactgtttgtctttataagataatgtagtaattatattggtgtaggtaacaggacatatgtaaaaactatcatctttgcagattactctgcctccaaatgcagggcctttcagagatgcattgtgattgtaattactgagttgaagctccaaccaatttgaatttgtttcttaaccttgaaaaatcattaaagccaaggtattaaaacctttgtgcattaataccttctaggggtttggttcatttggtttttgtcatgtgcaaggaaggacaatagtcctctttccaagtgtgttagcatagacttctctatatgtttctactagacctaggggatgacgtcttttaataatactggccctaaacatgtaaataatcttgtaggtgagactttttcttttgtgtttcggaaatttcctatgtggctttcagttgtctgtttgtatagcctggatttttttgaggtaaatgaaactttctcatttgtatatttggcttgatatggtcttaatattatctttccacgaaatggatatatttctagaaaatatatatttactaccataatttctaccaccacccccattttgctctgcattatacacagtagagaagaactgaagacactgctgtgacagtattgcagtccaaggcatcatgtgctcttggtgggatactctgattatcagcatcaacagtactttactgagcaagactttgaaggcctgagaagagagcaaagttatggaaagtatttaactcttattttatattgaacaaacaaggtttaatcatgtcatacatttttggttttctaagcagagactaatacaaatgcagccacataaaggcagtgtactgggggtgggagggaaggaaacaatcacataaaatcagctgactcaaaattgaggatagttaataggttgaaagggaaaaagtatgttgaaaatttagacataaatgaaccaagaatattccttatctggtggtgattaaagttaggaaaacatacattttttattttttaattagtagctgctatcagagacattatagcacagtggttatgagcacagattccaaagccagattacctaggttcggagacccgcttctctacctactactaatagttgggtcatgttgggccggtgacccaaattctagccttcattcactcatctgtaaaatggatataatgatagtacctactttataggttgttatgagaattgaatgaaatgaaagcccttagtttctgacacatagtaatcttttatataaatgttagttactattctgataatgatgatgctgttggttatttcatcttgctttgtcattaggtttgattctgaatactatacaaactaattttgatttcaagatcttaagtaaaggtttatttatagtacattgg

SEQ ID NO: 12035 - protein, 364 aa, Homo sapiens [sequence omitted]

SEQ ID NO: 12036 - DNA, 3436 bp, Homo sapiens
  CDS (235)..(1659)
ccactacctctagactgccctcccgggctggcgtcccacggagtctcagccgcgcaccccttcctcgcgttaccctccttccggacagcaccccctcccttctccggtagctcctacccctgcctgtgcgggcctcgtccccgcgcccagccctcggtgctgcctccgacagcgccgcgctctctcagccgcccccctgcccctcgggcccccctctctgctgcccctggcgccatggcgtgcagcctcaaggacgagctgctgtgctccatctgcctgagcatctaccaggacccggtgagcctgggctgcgagcactacttctgccgccgctgcatcacggagcactgggtgcggcaggaggcgcagggcgcccgcgactgccccgagtgccggcgcacgttcgccgagcccgcgctggcgcccagcctcaagctggccaacatcgtggagcgctacagctccttcccgctggacgccatcctcaacgcgcgccgcgccgcgcgaccctgccaggcgcacgacaaggtcaagctcctctgcctcacggaccgcgcgcttctctgcttcttctgcgacgagcctgcactgcacgagcagcatcaggtcaccggcatcgacgacgccttcgacgagctgcagagggagctgaaggaccaacttcaggcccttcaagacagcgagcgggaacacaccgaagcgctgcagctgctcaagcgacaactggcggagaccaagtcttccaccaagagcctgcggaccactatcggcgaggccttcgagcggctgcaccggctgctgcgtgaacgccagaaggccatgctagaggagctggaggcggacacggcccgcacgctgaccgacatcgagcagaaagtccagcgctacagccagcagctgcgcaaggtccaggagggagcccagatcctgcaggagcggctggctgaaaccgaccggcacaccttcctggctggggtggcctcactgtccgagcggctcaagggaaaaatccatgagaccaacctcacatatgaagacttcccgacctccaagtacacaggccccctgcagtacaccatctggaagtccctgttccaggacatccacccagtgccagccgccctaaccctggacccgggcacagcccaccagcgcctgatcctgtcggacgactgcaccattgtggcttacggcaacttgcacccacagccactgcaggactcgccaaagcgcttcgatgtggaggtgtcggtgctgggttctgaagccttcagtagtggcgtccactactgggaggtggtggtggcggagaagacccagtgggtgatcgggctggcacacgaagccgcaagccgcaagggcagcatccagatccagcccagccgcggcttctactgcatcgtgatgcacgatggcaaccagtacagcgcctgcacggagccctggacgcggcttaacgtccgggacaagcttgacaaggtgggtgtcttcctggactatgaccaaggcttgctcatcttctacaatgctgatgacatgtcctggctctacaccttccgcgagaagttccctggcaagctctgctcttacttcagccctggccagagccacgccaatggcaagaacgttcagccgctgcggatcaacaccgtcctcatctagtccaggcagaaggagaccacaacctcctgggaccactgccacctgcaagagccctgcccaggagatagaagacctggactccagcccaccgtggccactggagacctcaggccagttgtttaccctccagcctccagtctgtaaaatggaggttgcattccctacttcctaaactctcttccagcatcgatgttctgtagctctgaccttgatagggatacagctttgatccaaggatgtgacatggcttctcctcagggcaacccctgcccaaccctcatccccatcttctcaggggcaggggactaccttccagtgtctccctccagcccagccctgacctcaggaagtgtcagagcatggccagtagttggcagcccgaaagacacacagcaccctcttatgtcccatggcctaagacttacccctgaccaagctagtgatgggccatttacccttgaccccagtccacagtggtcacaggtagtacctggtcctagggttgcctgagagccaacctctcctgccacccccacaccaagaactatatggttcctacttctcccactgatctgctggtcagtgatgatgctgtggcctgtggaaggcacctggtagttgagtccacacattatagtcatgtgccaccaccttcctgcccacaggccgagggacagggtgagggtatacccaaagctgatgcagagcccattagcctaaaagcaactgcaggacaagcctccctggatgatcgaggtccccagtagctctgaacaagagtccagccaaccctcttcagccaggcctctgtgacctgctagggtgcaggaggcttccagaagcagttgttgtaattaggacccaagcactgggaggggctgttggctagaccccttgtcagacttggcatctatctcagttaggatcctgctgcagaaaacaagagccacttgtagctggtttaattagacaaggatttactacctggcccctggtggcttgcaaaattgttggaagagctggagaagcagactctgctgaatttccaggaactcccagcgccagattcatcatgtctgttgtgaccaggaaagctgcccccatctgcaggaagccactatgccagaaagctgctgactgcagaactaggctccctctgccacggtccgtgccagccaatagatgtcctgaggcctgcccctctcccacttcactcagttcccaaatctaaatttttacaagagattctgtttgggggaacttaagtcagatccagaaccttggctgcaagggagtctgggaaatgtcatctccctagaaggaagttagggtgggtggagcaagccccacctgcgtttttctgccacagcatccaatcgtgaagaactcgggagagggtggagtccacatctagggttgtcctgccccttggctctatccctgcccagaggtgggaactggaggagtgggctgcaagactgagcctaaatgtctccccggccttgacttttctttctagtcctggggcctagattctgcacttggggtctctgacacaacacaccatcccaaagtagccggaagagctaaacacagggggttcttaaaatggctgcccccgccacccgggcctcccttgggcaaaaggaattgtcagccctaccccaacccttcaactaccagaatctgggccaccccagcagtatttttatttaaaatgttgcccattttatgagttatgatcaatttgtattaaattaaagttacagatgtc

SEQ ID NO: 12037 - protein, 475 aa, Homo sapiens
MACSLKDELLCSICLSIYQDPVSLGCEHYFCRRCITEHWVRQEAQGARDCPECRRTFAEPALAPSLKLANIVERYSSFPLDAILNARRAARPCQAHDKVKLLCLTDRALLCFFCDEPALHEQHQVTGIDDAFDELQRELKDQLQALQDSEREHTEALQLLKRQLAETKSSTKSLRTTIGEAFERLHRLLRERQKAMLEELEADTARTLTDIEQKVQRYSQQLRKVQEGAQILQERLAETDRHTFLAGVASLSERLKGKIHETNLTYEDFPTSKYTGPLQYTIWKSLFQDIHPVPAALTLDPGTAHQRLILSDDCTIVAYGNLHPQPLQDSPKRFDVEVSVLGSEAFSSGVHYWEVVVAEKTQWVIGLAHEAASRKGSIQIQPSRGFYCIVMHDGNQYSACTEPWTRLNVRDKLDKVGVFLDYDQGLLIFYNADDMSWLYTFREKFPGKLCSYFSPGQSHANGKNVQPLRINTVLI

SEQ ID NO: 12038 - DNA, 3996 bp, Homo sapiens
  CDS (297)..(2642)
tgaggcaagcgcctcaggagtgcgtgaggcccacgcagaactcggggagccttttatcctgaggacacaggggaagaattggaggactatattcagctgcgggcgcttacctgccccccctgcagcaggtgttccaggcacctcgccggcctggcattggcactgtggggaaaccaatcaagctcctggccaattactttgaggtggacatccctaagatcgacgtgtaccactacgaggtggacatcaagccggataagtgtccccgtagagtcaaccgggaagtggtggaatacatggtccagcatttcaagcctcagatctttggtgatcgcaagcctgtgtatgatggaaagaagaacatttacactgtcacagcactgcccattggcaacgaacgggtcgactttgaggtgacaatccctggggaagggaaggatcgaatctttaaggtctccatcaagtggctagccattgtgagctggcgaatgctgcatgaggccctggtcagcggccagatccctgttcccttggagtctgtgcaagccctggatgtggccatgaggcacctggcatccatgaggtacacccctgtgggccgctccttcttctcaccgcctgagggctactaccacccgctggggggtgggcgcgaggtctggttcggctttcaccagtctgtgcgccctgccatgtggaagatgatgctcaacattgatgtctcagccactgccttttataaggcacagccagtgattgagttcatgtgtgaggtgctggacatcaggaacatagatgagcagcccaagcccctcacggactctcagcgcgttcgcttcaccaaggagatcaagggcctgaaggtggaagtcacccactgtggacagatgaagaggaagtaccgcgtgtgtaatgttacccgtcgccctgctagccatcagacattccccttacagctggagagtggacagactgtggagtgcacagtggcacagtatttcaagcagaaatataaccttcagctcaagtatccccatctgccctgcctacaagttggccaggaacaaaagcatacctaccttcccctagaggtctgtaacattgtggctgggcagcgctgtattaaaaagctgaccgacaaccagacctcgaccatgataaaggccacagctagatccgctccagacagacaggaggagatcagtcgcctgatgaagaatgccagctacaacttagatccctacatccaggaatttgggatcaaagtgaaggatgacatgacggaggtgacagggcgagtgctgccggcgcccatcttgcagtacggcggccggaaccgggccattgccacacccaatcagggtgtctgggacatgcgggggaaacagttctacaatgggattgagatcaaagtctgggccatcgcctgcttcgcaccccaaaaacagtgtcgagaagaggtgctcaagaacttcacagaccagctgcggaagatttccaaggatgcggggatgcctatccagggtcaaccttgtttctgcaaatatgcacagggggcagacagcgtggagcctatgttccggcatctcaagaacacctactcagggctgcagctcattattgtcatcctgccagggaagacgccggtgtatgctgaggtgaaacgtgtcggagatacactcttgggaatggctacgcagtgtgtgcaggtgaagaacgtggtcaagacctcacctcagactctgtccaacctctgcctcaagatcaatgtcaaacttggtggcattaacagcatcctagtcccacaccagcgctctgccgtttttcaacagccagtgatattcctgggagcagatgttacacaccccccagcaggggatgggaaaaaaccttctatcacagcagtggtaggcagtatggatgcccaccccagccgatactgtgctactgtgcgggtacagcgaccacggcaagagatcattgaagacttgtcctacatggtgcgtgagctcctcatccaattctacaagtccacccgtttcaagcctacccgcatcatcttctgccgagatggggtgcctgaaggccagctaccccagatactccactatgagctactggccattcgtgatgcctgcatcaaactggaaaaggactaccagcctgggatcacttatattgtggtgcagaaacgccatcacacccgccttttctgtgctgacaagaatgggcgaattgggaagagtggtaacatcccagctgggaccacagtggacaccaacatcacccacccatttgagtttgacttctatctgtgcagccacgcaggcatccagggcaccagccgaccatcccattactatgttctttgggatgacaaccgtttcacagcagatgagctccagatcctgacgtaccagctgtgccacacttacgtacgatgcacacgctctgtctctatcccagcacctgcctactatgcccgcctggtggctttccgggcacgataccacctggtggacaaggagcatgacagtggagaggggagccacatatcggggcagagcaatgggcgggacccccaggccctggccaaagccgtgcaggttcaccaggatactctgcgcaccatgtacttcgcttgaaggcagaacgctgttacctcactggatagaagaaagctttccaagccccaggagctgtgccacccaaatccagaggaagcaaggaggagggaggtggggtagggaggagtgtaggatgccttgtttccttctatagaggtggtgtaagagtggggaacagggccagcaagacagaccaccagccagaaatctctgatatcaacctcatgtcccccacccctcaccccatcttgtcacatctggccctgaccccactggaccaaaaggggcagcactggtgcccaccatacacacaggtgtctcatgtgactcacagtgctaaagactcatgcttgacagcttggtaaggtcaactctgtagccctgcagacaaaagctggttaggtttgggtttgatactttagatgggaaagtgaggggcttgagaaagtgggtgggaggagggaaggattttttaggagccttaatcagaaaaggactagatttgtttaagaagaaaaatgaaaccagacccagatcaatattttaggatactagatgttttaatgggttcagaatccagtttgtaggaagattttttgatggttttggttgctcctcccccagctgccaccccccaccttacccttattcctctctgtccacattttctgccccaccttacttctcctccctgacagacatccagcccctagtaatacttaaggcactatggcacttagctttgaagtgacacgaccctgtcttccttccgcccgctggtgggtaaccagtgccttccctgtaacggtaatgctgcagaactgcaaccttttgtacctttctttggggaatggggtgggggtgggagaggaggtagatggggaagaaataccccagacccaacaaacctccagccagaaagccagctattttgcatttgaaggaattgacttcctcattcattgagctttttaaaagatcacaacctcaagatggttaaaatccattgacatttgcactttcaaacatgacaagtctcggagctgctgagatgacaggcccctggcctttccacttatgcctccttttctccttattcctcctacctcccgccccgcccaggtctggagttactttcatagcatttttcactcttggcttcttttctcccttgatggtcaagtctcttatgtttcaatatttcttaactggggtgtcttataacaaaaaactcttaggtctaaaatgagaaaaaagagagaaaacaaaatgttatttttataccataacttgagtgtattgccaaaatttggaaatccttcccatgcctgatgagtttatatcccagaaacattgagccatcagaatg

SEQ ID NO: 12039 - protein, 782 aa, Homo sapiens [sequence omitted]

SEQ ID NO: 12040 - DNA, 2430 bp, Homo sapiens
  CDS (43)..(1224)
gctagcgtctgccgcggctccgagggggtggggctgctgggaatggctgtgcccccttcggcccctcagcagcgcgcgtcctttcacctgaggaggcacacgccttgcccgcagtgctcatggggcatggaggagaaggcggcggccagcgccagctgccgggagccgccgggccccccgagggccgccgccgtcgcgtacttcggcatttccgtggacccggacgacatccttcccggggccctgcgcctcatccaggagctgcggccgcattggaaacccgagcaagttcggaccaagcgcttcacggatggcatcaccaacaagctggtggcctgctatgtggaggaggacatgcaggactgcgtgctggtccgggtgtatggggagcggacggagctgctggtggaccgggagaatgaggtcagaaacttccagctgctgcgagcacacagctgtgcccccaaactctactgcaccttccagaatgggctgtgctatgagtacatgcagggtgtggccctggagcctgagcacatccgtgagccccggcttttcaggttaatcgccttagaaatggcaaagattcatactatccacgccaacggcagcctgcccaagcccatcctctggcacaagatgcacaattatttcacgcttgtgaagaacgagatcaaccccagcctttctgcagatgtccctaaggtagaggtgttggaacgggagctggcctggctgaaggagcatctgtcccagctggagtcccctgtggtgttttgtcacaatgacctgctctgcaagaatatcatctatgacagcatcaaaggtcacgtgcggttcattgactatgaatatgctggctacaactaccaagcttttgacattggcaaccatttcaatgagtttgcaggcgtgaatgaggtggattactgcctgtacccggcgcgggagacccagctgcagtggctgcactactacctgcaggcacaaaaggggatggccgtgacccccagggaggtgcaaaggctctacgtgcaagtcaacaagtttgccctgggtcctagctgtgtgtcttccacaatgactgcatccctccagtgctgtagagtcggaaacaggcatggggagattgccaggctgaccctctctggtctgtttccaggcgtctcacttcttctgggctctctgggccctcatccagaaccagtactccaccatcgactttgatttcctcaggtacgcagtgatccgattcaaccagtacttcaaggtgaagcctcaagcgtcagccttggagatgccaaagtgaccagccaccccatccctcccctacccatctgtctggccagacctgttctccagagctcaattctgcactctgggatccacacccttggacagggtgggagaggggacacatgggtgtccagggagaaggctctgtccctgccgccagaccccagtggttgccactgaagacctcattctcctgtctggaggggctgataggacccccttccgggggtccccttcaccccaccaggcttgggaggaagtgcctgcagccaggtcctgaaccataaccacccctgggaaacacatcattcccagcctcaggccctgctggaattggggctgccttatatgtgtgtttaccccttcctggcctggggaaggaggcggggagggctcctttctacctccagtgccctgagcctccagtccgtctccccctgcatgccccatgtgggaggtgctgagctccaaaccagcatcacaccaactctgacacatggatgtacctatcttggtgatgggtgggggccaagaattgagcatgacatcttccccagcagccacctcctctgagatccctcaccttctccaaaccagatccaatcaaacctcagcccgaggaaacatgctccccaacgtgctctcctgtgcttctgttttgtccccctgctggggggacaggagagggagtggtgaggccctgggcctccagagcctggctctgctttgtgctgtggcttagccggaggggacgtggccaagggtgaggtggccaaaaccagaaccagcagtctcctgccttgttccctccctggccctcaggccctccttccagggatgtctctccagctctactttatgtcctgaagctgacccgaggtcttcctatctggaatgactagagggagccaagaggatggggtgggggccagggccccccagggcctatcgtgggagagcctgggcaggatcccatcagaaaggtgctgactaaactggttgcccggacactcaacagcctccacctccctttctaccctcacagctcctggggccttcctggctctggcccagaaagtgattcatttgtaaattatcatggttttctttctgcattaaaatgctcatttccgg

SEQ ID NO: 12041 - protein, 394 aa, Homo sapiens
MAVPPSAPQQRASFHLRRHTPCPQCSWGMEEKAAASASCREPPGPPRAAAVAYFGISVDPDDILPGALRLIQELRPHWKPEQVRTKRFTDGITNKLVACYVEEDMQDCVLVRVYGERTELLVDRENEVRNFQLLRAHSCAPKLYCTFQNGLCYEYMQGVALEPEHIREPRLFRLIALEMAKIHTIHANGSLPKPILWHKMHNYFTLVKNEINPSLSADVPKVEVLERELAWLKEHLSQLESPVVFCHNDLLCKNIIYDSIKGHVRFIDYEYAGYNYQAFDIGNHFNEFAGVNEVDYCLYPARETQLQWLHYYLQAQKGMAVTPREVQRLYVQVNKFALGPSCVSSTMTASLQCCRVGNRHGEIARLTLSGLFPGVSLLLGSLGPHPEPVLHHRL

SEQ ID NO: 12042 - DNA, 2725 bp, Homo sapiens
  CDS (173)..(796)
agagtggcgcggggggcgtggggcggtgctgaggagctgaagccgtggccagctcgacgccggacagtccagcgagcagcacggcgggaaccggcagccggagcagtcccggagcagaagcagcagcagcagcagcagccctcgccgttcgcggagcgcagccgagccggccatggcgttgtcgatgccactgaatgggctgaaggaggaggacaaagagcccctcatcgagctcttcgtcaaggctggcagtgatggtgaaagcataggaaactgccccttttcccagaggctcttcatgattctttggctcaaaggagttgtatttagtgtgacgactgttgacctgaaaaggaagccagcagacctgcagaacttggctcccgggacccacccaccatttataactttcaacagtgaagtcaaaacggatgtaaataagattgaggaatttcttgaagaagtcttatgccctcccaagtacttaaagctttcaccaaaacacccagaatcaaatactgctggaatggacatctttgccaaattctctgcatatatcaagaattcaaggccagaggctaatgaagcactggagaggggtctcctgaaaaccctgcagaaactggatgaatatctgaattctcctctccctgatgaaattgatgaaaatagtatggaggacataaagttttctacacgtaaatttctggatggcaatgaaatgacattagctgattgcaacctgctgcccaaactgcatattgtcaaggtggtggccaaaaaaatatcgcaactttgatattccaaaagaaatgactggcatctggagatacctaactaatgcatacagtagggacgagttcaccaatacctgtcccagtgataaggaggttgaaatagcatatagtgatgtagccaaaagactcaccaagtaaaatcgcgtttgtaaaagagatgtcttcatgtcttcccctaagaatacgcttttcctaacaggctactccttcctgtagagcagaaattgtattttgcacgaacatgcagttattgaagattaggatcaaggatagacaaggtatagtagttatcttaaaatatacactcctaagcagtattattttaaaatcctttaccctggctacctcccctacccgggttcccctctctttaatttggagacactccaccacaaacttttcactttagaggtagcttgccatctctcaggagccctcaccattgtgtccattcactgtgtatagatggcagaacttttgaggtgcaatgtttaattgttaaaaatagtagccacgactttatcaggcagccccaaactggtgcataatgcatggtacaagaaatatttatgtattttttggaattttgtaatatttagtaagagtatatgaaaggattgctactgtatcagaaatattgtttcaatttagtctatcctggatatgtactaacgaatattaccaccagagaagagagctttctacaaaagtcactacagattttgctatattgctttgtagatagatttttacttttgcctaaaagcatttatccttcataccaattgtaacatctgacaccatgtagaagctaaaagtttagagggagtgagcgttttctcaagaccttcctcaagcactttatctttagaagagaaactgatgggcacctgatactctgtctaaatacgtttgttatatgtgttttgccctgtgccattcatttggaactttattgcattctttattttaaaaagcttgtttttacgtaatcatagagcttgctatttgtacatctgttgagcaacactacataactgatttttagttgacttagctatagcagtacaatgattagtaatgtaaaaattaacacagaaattaacctaaggaatgaagggtgggtttgtcaaaatatcaagtaaatttttgtttctaaagtacatttaatgtagatgacctaaagaatgcgttatccatcctatataaaagaaagataaaacacaggtcaccaattttctcatttcaccccatttaccttgtatagaggattgttcattcctttgggactaagttatagctatggtgagtgtgtatttactgtagttttgcctgatctcactcattgcacttcctggagttaaattttccaacagccatgttgaggaatagcactctgcatgtttttgttttgtttttcggggttttttttaattgaagccctaaaccaggaattatttgtgttctaacaggaggatgaacttgctgaaaataaaactttgctatgtatttactcttttttaaaagacaaaagcaaaaccagactttctacgtactactccaaagactgtgattgtgactataatacatttttggtaatttttttatacctaatttgtataggaagtgctatttctcataggctgtttcttgaaattttaagtttattgctttaaaatggcagtgtttctcccactttgatatgctaacatttagtaagcactggctttatgaaagcggctttttataagtatactgcattttttgagcctatcattaattagcttagtattttctttataatttcttgaacaggcaaatgaaagcttattatagaatgcatgtattttcttttatctttggaacatcagcaccagtatattgctggcagctattgtattaaaaaataaagtatattttcactatcg

SEQ ID NO: 12043 - protein, 208 aa, Homo sapiens [sequence omitted]

SEQ ID NO: 12044 - DNA, 2524 bp, Homo sapiens
  CDS (16)..(2223)
aggtctgagggagcgatggcggtacgcgcgttgaagctgctgaccacactgctggctgtcgtggccgctgcctcccaagccgaggtcgagtccgaggcaggatggggcatggtgacgcctgatctgctcttcgccgaggggaccgcagcctacgcgcgcggggactggcccggggtggtcctgagcatggaacgggcgctgcgctcccgggcagccctccgcgcccttcgcctgcgctgccgcacccagtgtgccgccgacttcccgtgggagctggaccccgactggtcccccagcccggcccaggcctcgggcgccgccgccctgcgcgacctgagcttcttcgggggccttctgcgtcgcgctgcctgcctgcgccgctgcctcgggccgccggccgcccactcgctcagcgaagagatggagctggagttccgcaagcggagcccctacaactacctgcaggtcgcctacttcaagatcaacaagttggagaaagctgttgctgcagcacacaccttcttcgtgggcaatcctgagcacatggaaatgcagcagaacctagactattaccaaaccatgtctggagtgaaggaggccgacttcaaggatcttgagactcaaccccatatgcaagaatttcgactgggagtgcgactctactcagaggaacagccacaggaagctgtgccccacctagaggcggcgctgcaagaatactttgtggcctatgaggagtgccgtgccctctgcgaagggccctatgactacgatggctacaactaccttgagtacaacgctgacctcttccaggccatcacagatcattacatccaggtcctcaactgtaagcagaactgtgtcacggagcttgcttcccacccaagtcgagagaagccctttgaagacttcctcccatcgcattataattatctgcagtttgcctactataacattgggaattatacacaggctgttgaatgtgccaagacctatcttctcttcttccccaatgacgaggtgatgaaccaaaatttggcctattatgcagctatgcttggagaagaacacaccagatccatcggcccccgtgagagtgccaaggagtaccgacagcgaagcctactggaaaaagaactgcttttcttcgcttatgatgtttttggaattccctttgtggatccggattcatggactccagaagaagtgattcccaagagattgcaagagaaacagaagtcagaacgggaaacagccgtacgcatctcccaggagattgggaaccttatgaaggaaatcgagacccttgtggaagagaagaccaaggagtcactggatgtgagcagactgacccgggaaggtggccccctgctgtatgaaggcatcagtctcaccatgaactccaaactcctgaatggttcccagcgggtggtgatggacggcgtaatctctgaccacgagtgtcaggagctgcagagactgaccaatgtggcagcaacctcaggagatggctaccggggtcagacctccccacatactcccaatgaaaagttctatggtgtcactgtcttcaaagccctcaagctggggcaagaaggcaaagttcctctgcagagtgcccacctgtactacaacgtgacggagaaggtgcggcgcatcatggagtcctacttccgcctggatacgcccctctacttttcctactctcatctggtgtgccgcactgccatcgaagaggtccaggcagagaggaaggatgatagtcatccagtccacgtggacaactgcatcctgaatgccgagaccctcgtgtgtgtcaaagagcccccagcctacaccttccgcgactacagcgccatcctttacctaaatggggacttcgatggcggaaacttttatttcactgaactggatgccaagaccgtgacggcagaggtgcagcctcagtgtggaagagccgtgggattctcttcaggcactgaaaacccacatggagtgaaggctgtcaccagggggcagcgctgtgccatcgccctgtggttcaccctggaccctcgacacagcgagcgggacagggtgcaggcagatgacctggtgaagatgctcttcagcccagaagagatggacctctcccaggagcagcccatggatgcccagcagggcccccccgaacctgcacaagagtctctctcaggcagtgaatcgaagcccaaggatgagctatgacagcgtccaggtcagacggatgggtgactagacccatggagaggaactcttctgcactctgagctggccagcccctcggggctgcagagcagtgagcctacatctgccactcagccgaggggaccctgctcacagccttctacatggtgctactgctcttggagtggacatgaccagacaccgcaccccctggatctggctgagggctcaggacacaggcccagccacccccaggggcctccacaggccgctgcataacagcgatacagtacttaagtgtctgtgtagacaaccaaag

SEQ ID NO: 12045 - protein, 736 aa, Homo sapiens [sequence omitted]

SEQ ID NO: 12046 - DNA, 3041 bp, Homo sapiens
  CDS (88)..(1887)
tttattgagtcttctgttgccaaattaaatgccctgaggaaaagtggccagttctgtgatgttcgacttcaggtctgtggccatgaaatgttagcacacagagcagtgctagcttgctgcagtccctatttatttgaaatctttaatagtgatagtgatcctcatggaatttctcacgttaaatttgatgatctcaatccagaagctgttgaagtcttgttgaattatgcctacactgctcagttgaaagcagataaggaattggtaaaagatgtttattctgcagcaaaaaagctgaagatggatcgagtaaagcaggtttgtggtgattatttactgtctagaatggatgttaccagctgcatctcttaccgaaattttgcaagttgtatgggagactcccgtttgttgaataaggttgatgcttatattcaggagcatttgttacaaatttctgaagaggaggagtttcttaagcttccaaggctaaagttggaggtaatgcttgaagataatgtttgcttgcccagcaatggcaaattatatacaaaggtaatcaactgggtgcagcgtagcatctgggagaatggagacaatctggaagagctgatggaagaggttcaaaccttgtactactcagctgatcacaagctgcttgatgggaacctactagatggacaggctgaggtgtttggcagtgatgatgaccacattcagtttgtgcagaaaaagccaccacgtgagaatggccataagcagataagtagcagttcaactggatgtctctcttctccaaatgctacagtacaaagccctaagtatgagtggaaaatcgttgcttcagaaaagacttcaaataacacttacttgtgcctggctgtgctggatggtatattctgtgtcatttttcttcatgggagaaacagcccacagagctcaccaacaagtactccaaaactaagtaagagtttaagctttgagatgcaacaagatgagctaatcgaaaagcccatgtctcctatgcagtacgcacgatctggtctgggaacagcagagatgaatggcaaactcatagctgcaggtggctataacagagaggaatgtcttcgaacagtcgaatgctataatccacatacagatcactggtcctttcttgctcccatgagaacaccaagagcccgatttcaaatggctgtactcatgggccagctctatgtggtaggtggatcaaatggccactcagatgacctgagttgtggagagatgtatgattcaaacatagatgactggattcctgttccagaattgagaactaaccgttgtaatgcaggagtgtgtgctctgaatggaaagttatacatcgttggtggctctgatccatatggtcaaaaaggactgaaaaattgtgatgtatttgatcctgtaacaaagttgtggacaagctgtgcccctcttaacattcggagacaccagtctgcagtctgtgagcttggtggttatttgtacataatcggaggtgcagaatcttggaattgtctgaacacagtagaacgatacaatcctgaaaataatacctggactttaattgcacccatgaatgtggctaggcgaggagctggagtggctgttcttaatggaaaactgtttgtatgtggtggctttgatggttctcatgccatcagttgtgtggaaatgtatgatccaactagaaatgaatggaagatgatgggaaatatgacttcaccaaggagcaatgctgggattgcaactgtagggaacaccatttatgcagtgggaggattcgatggcaatgaatttctgaatacggtggaagtctataaccttgagtcaaatgaatggagcccctatacaaagattttccagttttaacaaatttaagaccctctcaaactaacaggcttagtgatgtaattatggttagcagaggtacacttgtgaataaagagggtgggtgggtatagatgttgctaacagcaacacaaagcttttgcatattgcatactattaaacatgctgtacatactttttgggtttatttggaaaggaatgcaaagatgaaggtctgttttgtgtacttttaagactttggttattttactttttggaaaagaataaaccaagaattgattgggcacatcatttcaagaagtcccctctcctccacatttgttttgccaatttgcacattaaatgactcttccctcaaatgtgtactatggggtaaaaggggtagggtttaaagatgtagacagttgggttttttaagggccctttttcaataactggaacactctataacaaaggatacttatttaaatagatgacattgactatttttgtttttattaaaaggaagcttacatgcctaccaatatttaatcttttatgattgcctttttataactttttatattctcagcagagtgctttaccaattgaagtaaaatgtggcaggctggagttattgaagcagagtggcagtcttcagtttgcagagtaggggtctgtcttttaaactctgagtgcaaacttcagagttcttgccttggctgcagtttttttccttcaagaatgcagtactaacatttatttgagtggagttactgaacagtaacatagctgtgatttttggtatttgaaacactggttttaaatattttgacttgttgagggtatgttttatatagcaagacattatatagcagtaaaaaatggtgttttatcttctatataattcctgtttttattattaacaaaacagtcctaaatagcagccctcaattgtgaaaaaatttactttaaactacattaggttgtgaatgcaggttttatcagaactatgtttttgttcagtttatctgttcatatggataaatattggttgggatgacttggtgtctaatgtgtagtgctacacacctaacttatggggccaaaatagcatgtcctaatgcttgctgctgatttaaacacattaaaggtactttgcaggaaatccttgcaccatgggattaatatcc

SEQ ID NO: 12047 - protein, 600 aa, Homo sapiens
MLAHRAVLACCSPYLFEIFNSDSDPHGISHVKFDDLNPEAVEVLLNYAYTAQLKADKELVKDVYSAAKKLKMDRVKQVCGDYLLSRMDVTSCISYRNFASCMGDSRLLNKVDAYIQEHLLQISEEEEFLKLPRLKLEVMLEDNVCLPSNGKLYTKVINWVQRSIWENGDNLEELMEEVQTLYYSADHKLLDGNLLDGQAEVFGSDDDHIQFVQKKPPRENGHKQISSSSTGCLSSPNATVQSPKYEWKIVASEKTSNNTYLCLAVLDGIFCVIFLHGRNSPQSSPTSTPKLSKSLSFEMQQDELIEKPMSPMQYARSGLGTAEMNGKLIAAGGYNREECLRTVECYNPHTDHWSFLAPMRTPRARFQMAVLMGQLYVVGGSNGHSDDLSCGEMYDSNIDDWIPVPELRTNRCNAGVCALNGKLYIVGGSDPYGQKGLKNCDVFDPVTKLWTSCAPLNIRRHQSAVCELGGYLYIIGGAESWNCLNTVERYNPENNTWTLIAPMNVARRGAGVAVLNGKLFVCGGFDGSHAISCVEMYDPTRNEWKMMGNMTSPRSNAGIATVGNTIYAVGGFDGNEFLNTVEVYNLESNEWSPYTKIFQF

SEQ ID NO: 12048 - DNA, 2160 bp, Homo sapiens
acgcagatggtgtaatatatttatataataaaagatgaaaatagtcactttccataataaaaataagttctattttttgtttattttacaatatacttaatattctcttcttctttaccttcctctccagcttcatttccttcatgctgaatcaccagggggtcccacatggctgtcccaactccatcaagctggagtccgagaggtggcaggcaggcgggcaggggcttaggaacacgcgaggcagccgcactctaagtgtctctccacctcttctacaaacgaggagccatccgtgcactggaagacgtatttccgccgcttgctgcgggtgggctggcagcactggggcccacagcccccacgacattccatgatgggcaccttggaggctgtggcacatgatgcataacctttctggcggcggatcacctctcggactacttgtcccaggcacggattctcttgttggcagtgctcgccgctaaagccgggctggcacaggcagtagggctccccttggtctgagatgtggcactgcccatggtgacacttgaaggctgagcaggcattggcagagtcattcttgttgtcacacaagtcccctccatagccctcggcacacttgcacatgtatgaggtcccagttgccacacattttccatggtggcatctgtggccgaggcaggggtcccgggcctcctgatcgcagagtgggccggtccagcctgggcggcactcgcacaccacgctgtccttctccacggagcggcacaggccgtgcttgcacacggtgcaggacttgcagcctggtgacacccccagggactgtggtgggagggccttgaagtcctgcagctcgttgttgatgcgcacctcatggatgcatccgtggaagccgcctagaggccggtccgtgccctggcgcaaggcggagaggccggtggaggtggggatgcctccaaggtagagggggctgttgatgcccactgctggctgcttctggagcttccccaggctctttggagttcctttgtccactactagttcagggtctggtttagcgtcaccagctccacactgtgaaactgcccatcattcactgtctccacactgtacactgtggttggaggggaactcaggctgtcatagaccagccgcacgtggccctggtacagctccagtgccagggggtcattgtctcctttgtagagaaggatgccgttgtccttgtcagtggccacctgcagggagatgttggcctggggtcggaccttggcggaggccagttccacgtaggagtctttgcccacgaagttgacagtgatgagcttctcgcatctggggccggcgaagcctggtgggcagcggcaggtgggctcctgctgcaccacgatgcactgggccccgttctggcactcgtactggtcgcatgggctggtctgcagtaggaccatgggtggggggtgttcacagaagggtccactgaagccctgggggcaggcgcatgtgtagccattgattgtgtccacgcactgggccccgtggcggcacttgtgggccacacagtcatcattgtctgtctcacagagcttcccgctgtagccagggacacactcgcagctgaatcctttgtccagggggatgcacttggcctcatgctgacagaggttcagctcaggcacacagtggtcaatcacctcgtcgcatagctcacctgtgtagttaggcggacagatacacacgtagttgttgatcccgtccacgcaggtggcattgttttcgcagtcgttgtcctcacagtcatctgggttgatctcacaccgctgcccctcaaagcccagagggcaggagcagctgaacccatccttgtggctgtcactcaggtggcaggtgcctccatgctgacaggggttctggatgcaggtgttgatgggcacagtgcagtccttgcccttgtagctgtaggggcaggcacagcggtacagctccacagggtcctgggtgcatgtcccgttattcttgcacgggctggagaggcaggcattgcatttggccacaatgttgatgtccactggccctttgcactggaagcggtgggttggggtggtgagcaggagcctgtcagccatgggctcagggctactgcagcgggcgatg

SEQ ID NO: 12049 - DNA, 4352 bp, Homo sapiens
  CDS (1734)..(3929)
caaaaaaaaaaatggcggctgccactgtggggcttctgccggccggtagtccctggcgctgctgacccagcatcggcttttctacgtcttgaacctggattcgcctaggggttgggaagggctgtggacggcgttgggggaggcctgacgagattaataaagaactcttcagaattcctggtgtttcatcatatatacgactaagatatcaactcttctagcttgctgtttctggaccaaaaaaaatgacgtctattatcaaattaactaccctttctggggtccaagaagaatctgccctttgctatcttctccaagttgatgagtttagatttttattggactgtggctgggatgagcacttttctatggatattattgattccctgaggaagcatgttcaccagattgatgcagtgctctgatgaatcccctaatgatttttatcaaaatcattaagttaaggtagatacacatcttgtcatatgatcaaatggtttcgccaaaaatcaataatcagacaacaaaatgtgcgaactcgatattttacacgactctctttaccaattctgccccgaattacacttaaaacgactcaacagcttaacgttggcttgccacgccttacttgactgtaaaactctcactcttaccgaacttggccgtaacctgccaaccaaagcgagaacaaaacataacatcaaacgaatcgaccgattgttaggtaatcgtcacctccacaaagagcgactcgctgtataccgttggcatgctagctttatctgttcgggcaatacgatgcccattgtacttgttgactggtctgatatccgtgagcaaaaacggcttatggtattgcgagcttcagtcgcactacacggtcgttctgttactctttatgagaaagcgttcccgctttcagagcaatgttcaaagaaagctcatgaccaatttctagccgaccttgcgagcattctaccgagtaacaccacaccgctcattgtcagtgatgctggctttaaagtgccatggtataaatccgttgagaagctgggttggtactggttaagtcgagtaagaggaaaagtacaatatgcagacctaggagcggaaaactggaaacctatcagcaacttacatgatatgtcatctagtcactcaaagactttaggctataagaggctgactaaaagcaatccaatctcatgccaaattctattgtataaatctcgctctaaaggccgaaaaaatcagcgctcgacacggactcattgtcaccacccgtcacctaaaatctactcagcgtcggcaaaggagccatggattctagcaactaacttacctgttgaaattcgaacacccaaacaacttgttaatatctattcgaagcgaatgcagattgaagaaaccttccgagacttgaaaagtcctgcctacggactaggcctacgccatagccgaacgagcagctcagagcgttttgatatcatgctgctaatcgccctgatgcttcaactaacatgttggcttgcgggcgttcatgctcagaaacaaggttgggacaagcacttccaggctaacacagtcagaaatcgaaacgtactctcaacagttcgcttaggcatggaagttttgcggcattctggctacacaataacaagggaagactcactcgtggctgcaaccctgcttactcaaaatctattcacacatggttacgttttggggaaattatgaggggatctctcagtgcagtgctgttgtctcaccctgatcctctccaccttggtgccctcccgtatgctgtcggaaagttgggtctgaactgtgctatctatgcaaccattcctgtttataaaatgggacagatgttcatgtatgatctttatcagtctcgacacaatacagaagattttacactctttacattagatgatgtggatgcagcctttgataaaatacagcagctaaaattctctcagattgtgaatttgaaaggtaaaggacatggcctgtctatcacacctctgccagctggtcatatgataggtggaacaatatggaaaatagtcaaagatggagaagaagaaattgtttatgcagttgacttcaaccacaagagggagatccatttaaatggatgttccctggaaatgctaagcaggccttccctacttatcacagattcattcaatgctacatatgtacagcctagaagaaaacagagagatgagcagcttctgacaaatgtcctggaaacacttcgaggtgatggaaatgtgttaatagcagtggacacagcaggcagagttttggaacttgctcaacttcttgatcagatttggaggactaaagatgcaggattgggtgtttactcattggcactcctaaataatgtcagttacaatgtggtggagttttctaagtcccaggtagaatggatgagtgataaattgatgagatgttttgaagacaaaagaaataatccgtttcagtttcgccatctctctttatgtcatggtctttctgacttggcccgtgtacctagccctaaagttgtacttgccagccaacctgacctggaatgcggattttcaagggatctctttattcagtggtgtcaggaccctaaaaactcaatcattctaacctacagaactactcctgggactttagcacgtttcctaattgataatccttctgaaaaaattacagaaatagagttgaggaaacgtgtgaagcttgaagggaaagaacttgaagaatacttggaaaaagagaaactaaagaaagaagctgccaaaaagcttgagcagtcaaaagaggcagatatagattccagtgatgagagtgatattgaggaagatattgaccagccatcagctcataagacgaagcatgacttgatgatgaaaggtgaaggcagtcgtaaaggaagttttttcaaacaggcaaaaaagtcctatcctatgtttcctgccccagaagaaagaattaaatgggatgaatatggagagattatcaaaccagaggatttcttagtgccagagcttcaagctactgaagaagaaaaaagcaaattagaatctggtttgacaaatggagatgaacctatggatcaggatttatctgatgttcctactaaatgtatttctacaacagagtctattgaaataaaagcccgggttacctacatagactatgaaggacgctctgatggggattccattaaaaaaatcattaatcagatgaaaccacgacagttgatcatcgtccatggcccaccagaggccagtcaagatctggcagagtgctgtcgcgcctttggtgggaaagatattaaagtgtacatgccaaagctacatgaaacagttgatgccactagtgaaactcacatctaccaggtgaggttaaaagactcacttgtcagctctcttcagttttgtaaggcaaaagatgctgaattagcttggatagatggtgtcttagatatgagagtttccaaagtggacacaggggttattttagaagaaggagaactaaaggatgatggagaagactcagagatgcaagtggaagctccctcagattctagcgttatagcacaacaaaaggccatgaaaagtctgttcggagatgatgaaaaagaaacaggtgaagaaagtgagatcattcctactttggaacccttgccacctcatgaggttcctggacatcagtcagtttttatgaatgaaccaaggctgtcagacttcaagcaagttctcttacgggaggggattcaagctgaatttgtaggaggtgtacttgtttgcaacaatcaagtagcagtccgcagaacggaaactggacgcattggattagaaggctgcctttgtcaagatttttataggataagagaccttttatatgaacaatatgccattgtataaaggacatgatgtcaagaagtatctgcttgacctttctaagaaaaagggattcttatcttactctgagcttttgatgttttgttttgtaacatacaaaaagaatctgccagaaaaacttacatgtatcagatttttaaaaatataaatagagaacattttgcaaatgctcaaatgagcattctatcttttggctttcagagtgatagagctcctaacaggtgtacaggcccaagagttgaaggtgattggttttctttacagactccttgttctctagaagggctttttacttgaataaaacaatgcaacttagcaaaccaatttatggccttagagaaacatttttgcatgagttcttacaaactgtttgttatattttctggaatgataagtgagaattatttagaaaagacatgctcc

SEQ ID NO: 12050 - protein, 732 aa, Homo sapiens
MRGSLSAVLLSHPDPLHLGALPYAVGKLGLNCAIYATIPVYKMGQMFMYDLYQSRHNTEDFTLFTLDDVDAAFDKIQQLKFSQIVNLKGKGHGLSITPLPAGHMIGGTIWKIVKDGEEEIVYAVDFNHKREIHLNGCSLEMLSRPSLLITDSFNATYVQPRRKQRDEQLLTNVLETLRGDGNVLIAVDTAGRVLELAQLLDQIWRTKDAGLGVYSLALLNNVSYNVVEFSKSQVEWMSDKLMRCFEDKRNNPFQFRHLSLCHGLSDLARVPSPKVVLASQPDLECGFSRDLFIQWCQDPKNSIILTYRTTPGTLARFLIDNPSEKITEIELRKRVKLEGKELEEYLEKEKLKKEAAKKLEQSKEADIDSSDESDIEEDIDQPSAHKTKHDLMMKGEGSRKGSFFKQAKKSYPMFPAPEERIKWDEYGEIIKPEDFLVPELQATEEEKSKLESGLTNGDEPMDQDLSDVPTKCISTTESIEIKARVTYIDYEGRSDGDSIKKIINQMKPRQLIIVHGPPEASQDLAECCRAFGGKDIKVYMPKLHETVDATSETHIYQVRLKDSLVSSLQFCKAKDAELAWIDGVLDMRVSKVDTGVILEEGELKDDGEDSEMQVEAPSDSSVIAQQKAMKSLFGDDEKETGEESEIIPTLEPLPPHEVPGHQSVFMNEPRLSDFKQVLLREGIQAEFVGGVLVCNNQVAVRRTETGRIGLEGCLCQDFYRIRDLLYEQYAIV

SEQ ID NO: 12051 - DNA, 2923 bp, Homo sapiens
  CDS (20)..(1123)
aaggaatcaagcccccaagatggcggcagcggcggaggagcggatggcagaggaaggaggcggcggccaaggcgacggcggttcctctttggcctccggctctacccagcgacagcctccaccgcccgcgccacagcacccgcagccggggtcccaggcgctcccagcccccgcgctggctccggaccagctgcctcaaaacaacacgcttgtggcgctgcccatcgtagccatcgagaacatcctcagctttatgtcctacgacgaaattagccagctccgcctggtttgtaaaagaatggacttggtctgccagagaatgttgaatcagggatttctgaaagtggagaggtaccataatctatgtcagaaacaagttaaagcacaactcccaaggagagagtcagaaaggagaaaccattcattagctcgtcatgcagacattcttgctgctgttgaaacaaggctgtcactattaaatatgactttcatgaaatatgtggattccaatctctgttgcttcatcccaggaaaggtgattgatgagatttatcgtgtgttgagatatgtcaattctaccagagcccctcaacgagctcatgaagtacttcaagaattaagggatatatcctctatggcaatggagtactttgatgaaaagattgttccaattttaaagaggaaattaccaggatcagatgtttctggaagactcatgggctctcctccagttccaggaccgtctgcagccctaacaacaatgcagctcttctccaagcaaaatccttcaagacaagaggttaccaaactccagcagcaggttaaaacaaatggtgctggcgtgactgttctcaggcgtgaaatttctgagcttcgcaccaaagtgcaagaacagcaaaaacagcttcaagaccaggaccagaaactgctagagcagacccagatcataggtgaacaaaatgcacggttggcagagctagaacgcaaactacgagaagtaatggaaagtgctgtaggaaattcctcagggtccgggcagaatgaggagtctcctcggaaacgaaaaaaggccacggaagccatagactctcttaggaaatctaaacgtcttcggaatagaaagtaaattggaatgtggttctagttccagaggaagacacagcttagtagcttaagcagttatgcatatcaggatactgtgagcaacatggtgtcccttaagcttctaggctttcagaacacaacttaaacttgaactcttatggttgggacattcttttcctgcttctcctgattgaactgatgcacagaatctttttactttgcaatagatttgtactaaccagacctgttctatcatgttttgaggagttaacttttttctgtgcagataatgttgaaagtaagttaatttgtttctgcatatatgcacatacatacgtaaggatcttaaacccagtcttgacagactagaagttaagtttaatacagaaaatgtcctgttcacttgaaagaaaagacctactttttaaatggacactatcttggttctttttttttaagtcatctttttgttataagtgacctttgtctggaatgtctgaaaagtagttaatgctttttggtattgaagtaatgggtaactaaaatggacttccatagtattgactgtagaaggagcctctacaatattgactatatatttttataaactactggcaaggaacttacccagctgttatacatgttttcagttctctttgggggccatgtcctacatttgcatggatggatgcatgcattgcctagtcaactcacttaaaaagctcttgcactggtattgatcttgaacctctatacttctccactttttagagcggcgtcttagtttatttaaacgcttaacatcttccaccgcaacagcttgcctctagagggggaattgttcatccatttgtcctccagttttataggaacaagagactattaaagcccattgctttatctgctctctgtagggttcaggtacactggctaaggcagaaccccaaatttcaaggctctttctatcaatattggacctctgggagctaatactcctctttgctcaccaccatgtgatcattgatcagatgtggtgagtgagtaggggactcgacttgcgggatgcagttttgccattgcagcaaagttcattgaggaaaattgtaccatgaaaaagcattttgattatttcatttctggaggatgaccttgagggaagctttttaatattagtttcaagctttccttaccctacaactttaaacaaaagctttaattttgtttgcactcctattttgagcttgtaactggaaaagcatgtcttgcactgttcaacctcctgagtggtcgctttaacaacctccaaattgtgtacagtggttattttccccagttgtatagttttgagacattcaattatcactgtcttagttgtattttaatttactaaattatgtagctatctgactgttaagttcttttaaacaactgtttccttgggcttcagttatttaaagtaaatttaggtgtaatatagaaaactgtccctttccaggtgggagcttaacacctgtataaaacctaaggttttagtaagtaccttagttgaataaaagcacaaggttatcaccttttttatccgtccaccgtgacatggttatgcatcctttagattaacctcaccaaatgaagctttttctatccatttttaatattgtccttacataatattgtccttagattttgatcaattctatgtctgactttgaaataccatttacaatgtagtatgttttcaatgaaaaaccataaagtaacatccaagtgtttcatggtttgttgggaaggtaattttaaaataaaacaatttccaaaaaac

SEQ ID NO: 12052 - protein, 368 aa, Homo sapiens
MAAAAEERMAEEGGGGQGDGGSSLASGSTQRQPPPPAPQHPQPGSQALPAPALAPDQLPQNNTLVALPIVAIENILSFMSYDEISQLRLVCKRMDLVCQRMLNQGFLKVERYHNLCQKQVKAQLPRRESERRNHSLARHADILAAVETRLSLLNMTFMKYVDSNLCCFIPGKVIDEIYRVLRYVNSTRAPQRAHEVLQELRDISSMAMEYFDEKIVPILKRKLPGSDVSGRLMGSPPVPGPSAALTTMQLFSKQNPSRQEVTKLQQQVKTNGAGVTVLRREISELRTKVQEQQKQLQDQDQKLLEQTQIIGEQNARLAELERKLREVMESAVGNSSGSGQNEESPRKRKKATEAIDSLRKSKRLRNRK

SEQ ID NO: 12053 - DNA, 3248 bp, Homo sapiens
  CDS (113)..(1330)
ggaagctggtggcggctggtgggcgaccgggcgcatcctcattgcagtgcggcggccctacctcggccctggcctgaccccggcggccctgcccgcccctccctccagcatcatggccagcccaagaaccaggaaggttcttaaagaagtcagggtgcaggatgagaacaacgtttgttttgagtgtggcgcgttcaatcctcagtgggtcagtgtgacctacggcatctggatctgcctggagtgctcggggagacaccgcgggcttggggttcacctcagctttgtgcgctctgttactatggacaagtggaaggacattgagcttgagaagatgaaagctggtgggaatgctaagttccgagagttcctggagtctcaggaggattacgatccttgctggtccttgcaggagaagtacaacagcagagccgcggccctctttagggataaggtggtcgctctggccgaaggcagagagtggtctctggagtcatcacctgcccagaactggaccccacctcagcccaggacgctgccgtccatggtgcaccgagtctctggccagccgcagagtgtgaccgcctcctcggacaaggcttttgaggactggctgaatgatgacctcggctcctatcaaggggcccaggggaatcgctacgtggggtttgggaacacgccaccgcctcagaagaaagaagatgacttcctcaacaacgccatgtcctccctgtactcgggctggagcagcttcaccactggagccagccggtttgcctcggcagccaaggagggcgctacaaagtttggatcccaagcgagtcagaaggcgtccgagctgggccacagcctgaacgagaacgtcctcaagcctgcgcaggagaaggtgaaggagggaaagatttttgatgatgtctccagtggggtctctcagttggcgtccaaggtccagggagtcggtagtaagggatggcgggacgtcaccacctttttttcggggaaagcagagggccccttggacagcccctcggagggccacagttatcagaacagcggtctggaccacttccaaaacagcaacatagaccagagcttctgggagacctttggaagtgctgagcccaccaagacccgcaagtccccgagcagcgacagctggacgtgcgcggacacctccaccgagaggaggagctcggacagctgggaggtgtggggctcggcctccaccaacaggaacagcaacagcgacggcggggagggcggggagggcaccaagaaggcagtgccgccggccgtgcccactgatgatggctgggacaaccagaactggtagggcccactgcgcccccgtccccagcgcccccgggcgacttcgtgtttgcactctgccctcgtcgttcctcctccttccatttgacccaagaatcagcaactgcagtgtgaggacagcgtctcgggaggcaggaccctagggagacccgggtgtgcgccgcctgcgcgtggggagtcttcggtgcgtgggggcggcttgctgtccagcctgtgtgggggccgtcccgtcccacactcccctgggcattcttggactcaaggccggggctctgcgtggcttgctgggaggtgggctgcagcacagaggcctgtgactgcgttccagcggccagttcactacgcagtatctctggggcctgggaccagccacgtgccgagctgtcagcgacgtgaggtgtcccttctcgttgagatatttaactttggttttgctctagttctttctttttgaagagagtgactggagtggtaaagatggaaatgctggaaatgatactggcgctcacgctgccatccgaccaccctcggctcccgagtccacgcctgcctgggcctgtgctgtcagacccgcgtcggtcgtaaccctctgtggctcccctgcatcagcaccgtcccaccaccaagttcaccaggttcaccagacacggcctccacaatagccacacccacacctgagctgtcctcagtgctggaacttgaccatcctggaacaccctggaagaaaaaggagcgcagggtgggccctcggccctgatgcaggagggtgcgatagcggacgtggccaggcaggaggggccgggttcaggagctgagcaggggatgcctgtgcgtggtgcctgggtctagggaagctccagccccaggatggggctgccctgcacaccggtgcccgccacatgccaaccctcacctccccgaggactggatgatgtgctgccacgtgtgactcgtctcccttgtctgccctgtgtgaccctcagtcttggccagccatgcatgcgcccgaagctcgtgcagtttgtacgtgaggtgctctcctccctgccaccatgctcatcactctggccttggccatgctccctggtcaccccacttcccggtcgccgtctgcagcactcctggagcagcctgggcccttcagcccctgtgctcgtcccaccctagggactcagtcacttgcagaacaggatgggaccgagatttcagcgagccctcctggcgcccggtcctccctgtgggcaccagccctcttggtagctggtgtggagggccggtgtccttggctgccacggagggatttgatcaccgaagcagccacctgctgtagttggacctgaggtcagaggcggggcatcagaggctcaaggtgctgagaagccaccgggaaagcagccagcacaaagggcccaggaagccagcccccgagagctgagcgtgggggtctttgagtgtctttctccaagctgagacgtgggcggccgcgtggtatctcccgagggctgcttggaccctggtgggctgagtgctccgaggaggggtggactccaccttggacagtgggatgtggtgttccacatgtgcctgtttccacgccagcaccttgacttggcagcatggagccaaggtctgtccccgcccaggagggtgccttcctcgggggtagggggacggcccactctgccccagggagtcccttttgatgggaagtgcagtcagcagcgtggaggtgtctgggccaccttcagaaggtggatgtggtggccgagaccccgtccacggagggtgatggcctttcccttctgcaggtgcgggcaggtgggcctgggaccggtgctggggcctctccttgctgtgtgtgagggcccaggtggaaggcgcggacctgacagcattccaataaagcatacgggaacatg

SEQ ID NO: 12054 - protein, 406 aa, Homo sapiens
MASPRTRKVLKEVRVQDENNVCFECGAFNPQWVSVTYGIWICLECSGRHRGLGVHLSFVRSVTMDKWKDIELEKMKAGGNAKFREFLESQEDYDPCWSLQEKYNSRAAALFRDKVVALAEGREWSLESSPAQNWTPPQPRTLPSMVHRVSGQPQSVTASSDKAFEDWLNDDLGSYQGAQGNRYVGFGNTPPPQKKEDDFLNNAMSSLYSGWSSFTTGASRFASAAKEGATKFGSQASQKASELGHSLNENVLKPAQEKVKEGKIFDDVSSGVSQLASKVQGVGSKGWRDVTTFFSGKAEGPLDSPSEGHSYQNSGLDHFQNSNIDQSFWETFGSAEPTKTRKSPSSDSWTCADTSTERRSSDSWEVWGSASTNRNSNSDGGEGGEGTKKAVPPAVPTDDGWDNQNW

SEQ ID NO: 12055 - DNA, 2833 bp, Homo sapiens
aattcatgggacttatataagaaggacaattaatgctgatttgggtacaggggaattatgtgtgtgaatgtcatctacaattaaaaaaaattagcacatccctttacttacttgttatcagtggattctcggggtttggacttaatgttgagctaagaagcattaagtctttgaactgaatgtattttgcatccctggttttggacgacagtaaacgtaggagcactgttgaagtcctggaagggagatcgaaggaggaagattgacttggttctttcttagtcctatatctgtagcatagatgacttggaataaaagctgtatgcatgggcattacccctcaggtcctaagaaataagtcctgaatgcatgtcgttccaaactaacactctgtaatttttcttttatgtcttattttccaagagtcctccattttttgcaccccctcaccgccaactctgttattcagtagagagaagtgtacggctttctgattggtgagtgaaaaagtaacttgagacacgacctaagttgaagagtttagacttgctgagttttagaagtgatggaaattaagagagcatttcaataaaatgtgacttggctgtctttggaagagaagtgcaaggctttcctttgaagaatttaaattagtccggtaggatgtcaggtgagactgtgtatgcaaaatgaatggcacaggtgatgccagggcctcttgcttgggtctgatgtcttggcacagggtaagtgaaggttaattccagaagagaggaatgacttgaaggcaaaggaaactaaggaaggaggttcagtgaggaaaataaggttgtccatgagatttgaatagatttttagttcccccaaggtttaaatacaaacatagtcaagcaaggtagtcatctttctgctggttgtgagggggaatctgaaaatggagttttagaggaaaagtcaacatctaactagtgagggaaagtgcctaatacaattagaatctccctcactctatagttgcccagttgaaaggataaggaggaggggtggcttttatggacttccatgagagaaggaaagaaatatttcaggtaagcttctcagggctggccctttttgggatttggatgagaaattggaagtactaactactttctagcatatctttaagaaaattgattgttatttactcccagatcctcttgcagacccagaattatcaggaacatagctctgtgattcatgagtgtccccatactgatgaattggagcatccatatggaaagcaaaggcagaattatcccagctgtattattttgatcttttggatgcaggtgccttaatgaagctctcaaaatattttaggagctgctcagggagtgttgggtggaactgtttggactacattgttttctcttagattatgtgatttttgttgggcactggcaaaaggtgtgtgtgtgaatgtgtgcatgtgtgtgaatgttgtgtgtgtgtgtgtgtgtttgtgtgtgtgtgtgtgtgtttgcagacatgcaaaactgcagctgaaataataccttagatttctaggtaagtctttccacatttcaataatgggtaagagtagaaccagggccgggtatcaattattgcttgctgtttgcaaccaggcataaaatcactttctcaaatcatccaccgttcctattaaatttatgccggaaactctccttctgtgagtataactcctgcagttcctatagcagataagatataagaaagtgcctcctagtgctcctccgcccgcttgtttgctaaaattccctttctctctaagtccaccattttcaagatttgtagatagtgtattagttaagacagctttgtcgatctggccagatgttttttctcctttgtccaaaggccagagaccatcccaggaagagtggtgggtggtttatacactggaaatgttgcgtttatgctttttaaaaacacacgttaacttcagaggaaggatgggcaaatctggtctagctgggtgaaacccttattttcccagagatgccttaacctttgttggttttggctttagggttcagagtcacttttgttcccttctccattctggagagggacttcccctacatagagccctgatttttgtggctgtggggattggaggtagcattcaaagatcagatgtgcttttcctcactttggagatgaacactctgggttttacagcattaacctgcctaaccttcatggtgagaaatacaccatctctcttctagtcatgctgtgcatgccgcttactctgttggggtctatataaatttgttgaactcttacctacattccaaagaagtttcaaggaaccataaatatatgtatacatatacatatataaaatatatatattaaaataaaattatcaggaatactgcctcagttattgaacttttttttttaagaatactttttttttaagctgagaagtatagggatgaaaaagatgttatattgtgtttgactattttccaacttgtattttcatataatttatattttttaaaagctgaaaatttagaagcaagatgaaaaaaaggaaaagcaggtgctttttaaaaatcagaactgaggtagcttagagatgtagcgatgtaagtgtcgatgtttttttaaaaaaaaatgcaaaaaaattcttatggcggagttttttgtttgtttattttagtagctgatgctggcacatcattttgctggagagttttttatatactgtagcctgatttcatattgtattttaaactgtgtgaaattaaaaacaaagaatttcattcataatgct

SEQ ID NO: 12056 - DNA, 2659 bp, Homo sapiens
  CDS (15)..(1184)
catttggcccggggatggtcacacgcgcgggggccggaactgccgtcgccggcgcggtcgttgtcgcattgctctcggccgcactcgcgctgtacgggccgccactggacgcagttttagaaagagcgttttcgctacgtaaagcacattcgataaaggatatggaaaatactttgcagctggtgagaaatatcatacctcctctgtcttccacaaagcacaaagggcaagatggaagaataggcgtagttggaggctgtcaggagtacactggagccccatattttgcagcaatctcagctctcaaagtgggcgcagacttgtcccacgtgttctgtgccagtgcggccgcacctgtgattaaggcctacagcccggagctgatcgtccacccagttcttgacagccccaatgctgttcatgaggtggagaagtggctgccccggctgcatgctcttgtcgtaggacctggcttgggtagagatgatgcgcttctcagaaatgtccagggcattttggaagtgtcaaaggccagggacatccctgttgtcatcgacgcggatggcctgtggctggtcgctcagcagccggccctcatccatggctaccggaaggctgtgctcactcccgaccacgtggagttcagcaggctgtatgacgctgtgctcagaggccctatggacagcgatgacagccatggatctgtgctaagactcagccaagccctgggcaacgtgacggtggtccagaaaggagagcgcgacatcctctccaacggccagcaggtgcttgtgtgcagccaggaaggcagcagccgcaggtgtggagggcaaggggacctcctgtcgggctccctgggcgtcctggtacactgggcgctccttgctggaccacagaaaacaaatgggggcatatcagacttgaaattgacaatttggggtcctgagattgaaacaggagtcaaaaccagagcccagggtagctgcggcccccggaccacgacgcccacttccccacacctcctgctgtccccctctccgcaggtccagccctctcctggtggccgcgtttggcgcctgctctctcaccaggcagtgcaaccaccaagccttccagaagcacggtcgctccaccaccacctccgacatgatcgccgaggtgggggccgccttcagcaagctctttgaaacctgagcccgcgcagaccagaagtaaacaggcaccttggacgggggagagcgtgtgtgtgatgggaaaatccggacccacgcgtgtgctgaaggcgtacggtgcttgccagattttcaacttgagcataaattggttgccattgagaatttaagaatctggaatattgcagcttttggttaaacttaatgcatggttggagatgttatggcgacactaaacaaagtattcctgaactttccttagctccttggtagtaactgggaagacggaaatgaagaaaatcacatgagaatgaagaattctttagcagctcaacagagtttctcggcctgctcccagatcggcgaagtttctacttgttactctctctgccggcgcccttcgttcctcctctgcttcccttccctagtctttcctccggcagggagctgggcaggggtccccgggtgtctccctgagtcccgactgcactgactgggtccatcagagggctgcttcgttctccagctcatcttcttttaaagtggtgactagcttggtggtatctggctgctggtgtttggcttattgacatactccagggtaatcaatgatgactttgtttggaaacccttttggaggcaccatgggaacagaaggaaacatgagtgacgctgacccttgagtgtgtgggtggggagctctgagacgcctcctgtcccacgctctccggtgtccgtgtctacacaggggtccccatgatacccaccggccccagcagggcagaccggaccggggacgggcacggtgaagggctgcagcctggggtctgacgtggcccctagtgctgtctcaggagaaggctctggaggacttgaggcatgctgggcctggtgcagtgatggcgctaaggagacccggggaaagacagtatcgtggtcacgtatgcttaggaagcagcacagccgtgtccttagggatgttcgcgtccagtaaagacactggtaactgcggtttcagccaacactcttcatggcagtgtcgacctcgggttagcttctgttgtctttgtggatggttttcctggagcggcctgacgttgacgtgttctctggtcccatgtcttagcggggcatggtacggtttcgtgcctgacgcgtgcattagggtgttctcttatactttcagtagcatctttccacagcaagggccaaaccctcctggttcccttcagagtctttttggcctgatgatgactcttgagtgataccctgtgatgcagacatgccccagatggattctactttctttaaaactagggactttcaagattaaaaaaaagattgtcactactaatttgacgcctaacttcagaagcttcactgcctacatgtgaacttttccagaaaaactgtgccatggacatttttcctctggggaattaacatctaaattctggtaactattaaaagacagatctggttaattt

SEQ ID NO: 12057 - protein, 390 aa, Homo sapiens
MVTRAGAGTAVAGAVVVALLSAALALYGPPLDAVLERAFSLRKAHSIKDMENTLQLVRNIIPPLSSTKHKGQDGRIGVVGGCQEYTGAPYFAAISALKVGADLSHVFCASAAAPVIKAYSPELIVHPVLDSPNAVHEVEKWLPRLHALVVGPGLGRDDALLRNVQGILEVSKARDIPVVIDADGLWLVAQQPALIHGYRKAVLTPDHVEFSRLYDAVLRGPMDSDDSHGSVLRLSQALGNVTVVQKGERDILSNGQQVLVCSQEGSSRRCGGQGDLLSGSLGVLVHWALLAGPQKTNGGISDLKLTIWGPEIETGVKTRAQGSCGPRTTTPTSPHLLLSPSPQVQPSPGGRVWRLLSHQAVQPPSLPEARSLHHHLRHDRRGGGRLQQAL

SEQ ID NO: 12058 - DNA, 2530 bp, Homo sapiens
  CDS (124)..(621)
agtgtccataaacctgtgttttgccagcttgcacaggatgaaggtagttacgttggtggctttgcagtggttgaatatagcactgcggagcaggctgaagaggtccagcaggcagcagacggtatgaccatcaagggcagcaaagtccaggtttccttctgtgctcctggagcgccagggcgaagtacattagcagcattgatagcggctcaacgtgtgatgcacagtaatcaaaagggcttacttccagagccaaatccagtacaaattatgaaaagtttaaacaaccctgccatgttgcaagttcttctacagccccagttatgtggacgagctgttaaaccagccgttcttggaacacctcacagcttgccacatctgatgaaaccatccatctctcctgcatttttacatttgaataaagcacatcagaatctttctcatataccactggcacaacaacaattaatgaagtttgagaatattcatactaataataaacccggcttacttggagagcccccagctgtggtacttcagactgcactagggatagggtcagtgcttccattgaaaaaggagttgggacatcatcatggagaagcacataaaagctgcctctaagaatcaaacttcactcttgggagaaccaccaaaagaaattcggctcagtaaaaatccatacttgaatttggcaagtgtgttgcccagtgtgtgcttatcatcccctgcaagtaaaaccactcttcataagactggaattgcaagcagcattctggatgcaatctctcagggaagtgaatcacaacacgcattggaaaagtgcattgcttattctccaccttttggtgattatgcacaggtaaataattcccaggttctgatgatactcagaaaaattggttcaactatatattgagttcactgaatatgaaattgtgatttctatattattaacgtaggcaaatcaaattgcactgatctatgtatttcttactcatcatttgaaatttgggaatgtgttcaagacattatttagtatcattttgcactagatatttacctctcactgtttacctagtggttggcaaactacagcccatagaacaaatctagcccaccacctggttttgtaaataaatttgtattgtaatacagccatgtccattcattaacatattgtctatggtgctgtcatgctataataaaagagttgagtgatgacagtagagactatgtggcctgcaagattaaatatttactatctggttctttatagaaaaatgctgctaacctctggtttgcactagtgtagacctaagaaacccaagggaatgcctctgttcttctccactgattgtagatggagaaagatgatcatatttacagacactactgtgctaacttctaaaccagccaatcaataacataaaaatattatgttcataagatgtcctgtgtcattacttaaatatttcagttttgctttggcccttcttcagcttactcttagtggtgtaagctgaatatatatcatgttagccctgtgtgattatggaatcataagagtccacaagagtcttataattatcagttctgactcttactttcctagaacagccagcttcttctcagatctatcctgttcgttggagtcttgtctccactttgatttccctggagcagctttgtgtttgcctgacccatccctaataaacttagaaaagaaaaccacttagaacaattgacgcctgattataagagtactagaacagcccaagttctgtaaaaatggtgcagctggatattagtgaaatatttgccatctcttatatacctgggacaagacggaaaaatatgggttgggtagatgatgtaattaggtgacagtatatctatatttagagaacagtgatcacaaattgctgcagtctgaaggcattctcttatattgattcataagagtcatcttcagtcctttattagataacatttgaagtaatgacttagataaagacattaattgtaaaatttacaagatatagtcctgtacaattccaatttgtttcttttcaagaaacaaactttttataaacaggagaagcacaataaattttttaaaaattcattaaatacatatttaagctttaaaaattttttgaacttttatttctttttaaatttgcctttttcttagcagttttgcttattagattactgtgatttattgtatacttatatccatggaaagactttctcattcacacatggagaaattctgtgataatgatgccttttgcattactgtatgtcttctgcctccacacttgcttgcccagagatatggtggggaaatgaatcctccctgcactgttcagtgtctcctttgacagtccctgcttctagcgcacgcttgttcataaaatgggatttgttctctctctcgtgttctttcttccttataaacttaattaaatgttactaatggaacattaaagtacatggaattaaactaatggaatactaaaat

SEQ ID NO: 12059 - protein, 166 aa, Homo sapiens
MTIKGSKVQVSFCAPGAPGRSTLAALIAAQRVMHSNQKGLLPEPNPVQIMKSLNNPAMLQVLLQPQLCGRAVKPAVLGTPHSLPHLMKPSISPAFLHLNKAHQNLSHIPLAQQQLMKFENIHTNNKPGLLGEPPAVVLQTALGIGSVLPLKKELGHHHGEAHKSCL

SEQ ID NO: 12060 - DNA, 2697 bp, Homo sapiens
  CDS (172)..(531)
agtagtggtggtacgggtccgactgaggggtactcgccaccggctgcgtccacccgagcggctgcgagagccaaggcccgagggggtgggcgtggcggccgccgaaacacaaccccctctgttccctctcttcgcggagcggcgccgcgtagcttccatccgccagctgccatgagcgagcgcctccgtcccaggaaaaggagaaggaatggcaacgaagaagacaaccatcttcccccccagaccaaaagaagtagcagaaaccctgtctttcaggattcctgggacacagagtcttcaggcagtgacagtggtgggagcagcagcagcagcagcagcagcatcaatagcccggacagggccagcgggccggaaggcagcttgagccagaccatggccggatccagccctaacacgcctcagcccgtgcccgagcagtccgcgctgtgccaaggcctctacttccacatcaaccagaccctgagggaggcccacttccacagcctacagcaccgagggcggcctctgacatgatgtgccggcagtttcttgccttctgtgaagggacagcgctgtgcagatttgatatttcaacttacaacttgttttaaaagaaaaattgcacacgaaaaatgcctgttggcttttcagtctatatttgaaataacaggttaacaggcagttgtttacttgtggttttgctgcactattgcaatttcaaaggggctttgaagcaattttttataggattcttttgagggagggtatcaaatctatgtcaaggtagtggtttgaggaaaactcattctgtgtgttgaatccatagtatgtcccattcagactgatttccaaatctgtcaactagaaactctactttatgtaaagggccttttaaaaatgcgggatcttcaattttttttattcaataaactagtaaagagtatctagtttccatgaaaaaacataagtttttttccaaaatataggaagcttgattcagtcttgcactgaaattaactgccatactacctctcagtatgtagatgttctattgaaagtactctctcctgtgtaacaggagaacaatcagatccaattcagactgtcagtgaagcacactccctaataatagtctctactctttgttatatatttgtatttccagagagaatgtcttttagattcttgtatacccagataacttctgtgtcactattccaccagagtctgcacctcagactttagtaggaaacatggcacagttctgcaagtaaagtaatatgtaatgactttttgtcctacaaacttggtcagtcagcagcttacatgatctcattgacaattccaccttgtagtgtcaacaattaaggtgttgttgaacgctgataaaatgtaagctacctgaactgatgtctaaagcaacaagtattgtgaaattttgggacaaggattaacttgatgcttaaagtaacccccaacagtaactagggggccacattccatcagtgaaactggaaagattggtgtggctgagaatcagatgagcagaggcacctttagaagaaataatgtggtagtatttatttagggagagacagatgtgttgccatgttacttagtcatactagagagccagccaagtttgaataatgaaggtgcagacgtgttgtcttcttcactgacaagctgtctgaacaaggagccaggaactgtcgggtcaccagctgtggagcgtgccggggggacaacctgccattggatgtagagaaaagtgccttagagttggcctgagccctcctgcccactcgccctccgcgcgacgccactcggagtccacacggcacacacaagcggagctgagaagcacgatggctctagtcagaggactttgctgtcggtccagatttgaagaggacacggaacagcatgagcctttgtgacaaaactagaatttggaaatgaggactgtcttgggaaaagggtagacacaggcacttctctccacagcctgctaacctaatgtgggcagaactgaaagatcactgcagtggaaactgttctggaagaggctgcaacatagcccatgcttagggactggatggtttttgcaagagctttttttttttttaaactaccatctcccaacttttaaagccagattcttgacaaggattttagatcttaatgggttcgatggtagggaatacggaaaggatacactgctaatattgtgtctaacaataaagcaaacaactcgatgctgtaagaagacaagctgtttgagctttcaaacacacatgcacacagcacaattcagaaatacccaggaggattcctgcaggcttaacagttggcatcgtactgaaatgaaacgtgtattaacaagaaaatgtcaaacttttggggaaacaaattttctgttacttcccacccaactaaaagggaagataaaaccatcatcaccagaacaaaacagattttctccaaacaagtacaatgatagtgccgggttggcagttaactctttcaccctactaaattcaagagctcatctccaccctgtcctgtatattttctacatttctattaagaggctacttggtagtgtcagcgggcaccttttacaccttctagtagctcaagctagtaaaaccttgtacttctctattgcgccgccattaaaagcagcattagtgc

SEQ ID NO: 12061 - protein, 120 aa, Homo sapiens
MSERLRPRKRRRNGNEEDNHLPPQTKRSSRNPVFQDSWDTESSGSDSGGSSSSSSSSINSPDRASGPEGSLSQTMAGSSPNTPQPVPEQSALCQGLYFHINQTLREAHFHSLQHRGRPLT

SEQ ID NO: 12062 - DNA, 4149 bp, Homo sapiens
  CDS (264)..(2525)
gtggtaccaaagacctgtccatcgctgcagtggggaagtacgggactctgcaggaattttctttctttgacaaggtccgccgggtgctgaagagccaggaggtgtatgaaaacttcctccgctgcatcgcactcttcaaccaggagctggtgtctggctctgagctcctgcagctcgtcagcccatttctggggaaatttccagaactctttgcacagttcaagtccttcctgggggtaaaagagctgtccttcgcgccacccatgagcgacagatccggggacgggataagccgggaaattgattatgcatcctgcaagcgcataggatccagctaccgggcactccccaaaacctaccagcagcccaagtgcagtgggaggacagccatctgcaaggaggtactgaacgacacctgggtctccttcccttcctggtctgaggactccacgttcgtcagctccaagaagacaccgtacgaggagcagcttcaccgctgtgaggacgagcgcttcgagttagacgttgtcctggagacgaacctggccacaatccgtgtgttggaaagtgtgcagaagaagctgtcccggatggcgccggaagaccaggagaagttccggctggacgactccctgggaggcacgtcggaggtgatccagcgccgtgccatttatcgcatctatggcgacaaggccccggagatcatcgagagcctcaagaagaaccctgtcaccgctgtccccgttgtcctgaaaagactgaaggccaaggaagaggagtggcgggaggcccagcagggcttcaacaagatctggcgggagcagtatgagaaggcgtacctcaagtcccttgaccaccaggctgtgaacttcaagcagaacgacaccaaggccctgcgctccaagagcttgctcaacgagatcgagagcgtctacgacgagcaccaggagcagcactcggagggccgcagtgccccctctagcgagccgcacctcatctttgtgtacgaggaccggcagatcctggaggacgcagcagcgctcatcagctactacgtgaagcggcagccggccatccagaaggaggaccagggcaccatccaccagctgctgcaccagttcgtgcccagcctctttttctctcagcagctggacctgggcgcctccgaggagtcagctgatgaggaccgggacagcccccaggggcagaccacagaccccagtgagcggaagaagccggcgccaggaccccacagtagccccccagaggagaagggggccttcggggatgccccggccactgagcagccacccctgccgcccccagccccgcacaagcccctggacgatgtctacagcctattttttgccaacaacaactggtacttcttcctgcgcctgcaccagaccctgtgctccaggctgctgaagatctaccgccaggcgcagaagcagcttctggagtatcggaccgagaaggagcgggagaagctgctgtgtgagggccgcagggagaagggcagcgaccccgccatggagctgcggctgaagcagcccagtgaagtggagctggaggagtactacccggccttcctggacatggtgcggagcctgctggagggcagcatcgaccccacgcagtacgaggacaccctacgcgagatgttcaccatccatgcctacgtgggcttcaccatggacaagctggtgcagaacattgcgcggcagctgcaccacctcgtgagcgatgacgtctgcctgaaggtggtggagctctacctgaacgagaagaagcggggtgccgctggtgggaacctgtcctcccgctgcgtccgcgctgctagggagaccagctaccagtggaaggctgagcgctgcatggccgacgagaactgcttcaaggtgatgttcttgcagcgcaaagggcaggtgatcatgaccatcgagctcctggacaccgaggaggcccagacggaggaccctgtggaggtccagcacctggctcggtacgtggagcagtatgtggggaccgagggcgcgtccagctcgcccactgagggcttcctcctgaaacctgtgttcctgcagaggaacctcaagaagttccgccgccggtggcagagcgagcaggcgcgggccctgcgcggtgaggccaggagctcctggaagcggctggtgggcgtggagagcgcctgcgacgtggactgccgcttcaagctcagcactcacaagatggtgttcatcgtgaactccgaggactacatgtaccgtcgcgggaccctctgccgggccaagcaggtgcagcccctggtcctgctccgccaccacctgcactttgaggagtggcacagccgctggctggaggacaatgtgacggtggaggcggctagcctggtgcaggactggctgatgggtgaggaggacgaggacatggtaccctgcaagacgctgtgtgagacagtgcacgtgcacggcctgcccgtgacccgctaccgcgtgcagtacagccgccgcccggcctcgccctgacccgccctcatgggcaccgggcaggcgcctcacagagcacagacgtgccctcggccttggtcgtgtcggggccgttttcttgaacgacgtgagaggcatctcccagcccctctgctgccggacagcgcactccagggcaggacgccgcccccgtggctcccggtctcctgtgggcctgctgtgtgccaaacctgagctacctgcacccgagccctggggctcagccccaccacaggggcgggtggacgtgctggccgaggaacaagcaatcatgtttgcgtccccgtccgtcacatgcgccaaatccctggcaggcagatggctcctgccccatattcttgccgtgtcttggaaaagtcacaggtgacagccctcctgaggcccacactttggagggggtccatgtccaagagaccctgacaaggaaggagttgagccctgggtaggcttgcttgaaaagtgagtccttccagaatattctcagagctgccagaaacatcatctgagggtttgggcatcagctctgcctggctggtgttcaggccctcagtcactttggaagtgagaagaacccttcagccaaacctttgggatcccattttgaagtccagagctggagcaggcgggcagtgccctgggagaccccgctctggataagacacccaaccccaactccagcagctggactctgggcccacaaggggagggaccccagccagtattccctcagagccggcacgaccctgctgtggggcggcgggcccagtcgtgttcctgcagtgggcaccctaggcgtatgtgtatacatgcacagatatttattcctttcgcttttagtggttgttatttctgtagcagccaagtcctgcggctccctggggctgagatctccctttgtggaactccgagagccgccctgacagtcccagccgccacccaaggagccccatccgcccacccaccctgggacccacgcggccactccagggatcattgttgtccttttgtgaggggctgaggcgactgtcccatggaggcatccaaggctttctgtgccaagaatcccaagtgactggggctggggaccacttctccaggcctctctccccgaccatgagagcccctggccctggcccctgcacaccagtaggcccagaataaccgccacccttgccatcctgcaacagctggactcaagtttccaggaagtggagatgtgtttctagaagtttcctgtggaacctggaggctcctgatgcctttgactccaggctgggcgattccgatgctgacccgtcctcctgggctccccacccccgctccccaagtgtcacacaggcactttgtacacatcctggttttctaagaagggaacttgccatcaagattcctgtaccaggcccacggccgtctcgggcagagccacctgggccccgggtgcagccggagaccccgccgagcccctcctcccagtactcccatccccgcatgcttctagggagcgcctcttttccgttcttgaggaatttctgttctggggcttgtccttcctttgcagctgttttgaatgtagttttccttttctatttatttgcacattaaagttaataattgaatattg

SEQ ID NO: 12063 - protein, 754 aa, Homo sapiens
MSDRSGDGISREIDYASCKRIGSSYRALPKTYQQPKCSGRTAICKEVLNDTWVSFPSWSEDSTFVSSKKTPYEEQLHRCEDERFELDVVLETNLATIRVLESVQKKLSRMAPEDQEKFRLDDSLGGTSEVIQRRAIYRIYGDKAPEIIESLKKNPVTAVPVVLKRLKAKEEEWREAQQGFNKIWREQYEKAYLKSLDHQAVNFKQNDTKALRSKSLLNEIESVYDEHQEQHSEGRSAPSSEPHLIFVYEDRQILEDAAALISYYVKRQPAIQKEDQGTIHQLLHQFVPSLFFSQQLDLGASEESADEDRDSPQGQTTDPSERKKPAPGPHSSPPEEKGAFGDAPATEQPPLPPPAPHKPLDDVYSLFFANNNWYFFLRLHQTLCSRLLKIYRQAQKQLLEYRTEKEREKLLCEGRREKGSDPAMELRLKQPSEVELEEYYPAFLDMVRSLLEGSIDPTQYEDTLREMFTIHAYVGFTMDKLVQNIARQLHHLVSDDVCLKVVELYLNEKKRGAAGGNLSSRCVRAARETSYQWKAERCMADENCFKVMFLQRKGQVIMTIELLDTEEAQTEDPVEVQHLARYVEQYVGTEGASSSPTEGFLLKPVFLQRNLKKFRRRWQSEQARALRGEARSSWKRLVGVESACDVDCRFKLSTHKMVFIVNSEDYMYRRGTLCRAKQVQPLVLLRHHLHFEEWHSRWLEDNVTVEAASLVQDWLMGEEDEDMVPCKTLCETVHVHGLPVTRYRVQYSRRPASP

SEQ ID NO: 12064 - DNA, 3018 bp, Homo sapiens
  CDS (27)..(836)
tcaattttcctttttccggaggggagatggattccctggaatggaactgggctctggtgtatgagctcagtggagagcaccatgacgaagagtggtcagtgaagacttaccaggaagtagctcagaagtttgtggaaactcaccctgagtttattggaatcaaaatcatttattcggatcacagatccaaagatgtggctgtcatcgcagaatccatccgaatggccatggggctccgaatcaagttccccacggtggtggcagggtttgacctggtggggcatgaggacactggccactccttgcatgactacaaggaagctctgatgatccccgccaaggatggcgttaagctgccttacttcttccacgccggagaaacagactggcagggtacttccatagacaggaacattctggatgctctgatgctgaacactaccagaatcggccatggatttgctttgagcaaacaccccgcagtcaggacttactcctggaaaaaggacatccccatagaagtctgtcccatctctaaccaggtgctgaaactggtgtctgacttgaggaaccaccctgtggccactctgatggccactgggcaccccatggtgatcagctctgatgacccagctatgtttggtgccaaaggcttgtcctacgatttctatgaggtcttcatgggcattggggggatgaaggctgacctgaggaccctcaaacagctggccatgaactctatcaagtacagtaccctgttggagagtgagaaaaatactttcatggaaatctggaagaagagatgggataagttcatagcagatgtggctacaaagtgaggagaagctagccagccctctacaagctgtcttcttgcacacgctgtcacttcctctcactcgttcttgaatcagctccatgtgcccatgaaatcaatggcctctgtatggagcgaccctgtgagaagcacttggctggctgagcaaattcatcctctggaaatattctctctcagccacagtgacattgaccctcttggttttctcctctctctggccatttcttccagtttccctatttcagagtcttctcctctctctgatctctgtgctgtttcctcaggactcagtcctgggctctcttctattctggtctctttatttttttatttttgtattttttcgagatggagttttgctcttgttgcccaggctggagtacaatggtgcgatctcagctcagtgcaacctccgccacccgggttcaggcaattctcatgcatcagcctcccgagtagttggaattataggcatgtgccaccacacccagctgatttttgcatttttagtagagacaggttttcaccatgttggcgaggctggtatccaactcttgacctcaggtgatccactcgccccttagctcccaaagtactggaattacaggcgttagccaccatgcctggcctattctggtctctttaactctctcctctttatttctcttctctctctgtacacttttcctgggtggtctcatccattcctttgctttttcataccatttatttgttaatgattcccacatttatttatgcacttggagagctcacaggaatctcagaaactgatgaggtacaattctgaaccctcagtctcttccctttaaacctttctttttctctactttaatttttctaaagagtgtcttgctatgttgcccaggctggtctccaactcaagtgatcctcctgccgcagtctcccgaagtgctgggattactgacatgagccaccacactcagccctttaaacctttccctggcctttcccatagctggtgaaggacacctccatccattccacccagttgctcaaagcagaaattttcagtgcaagtcttgatgctgcgccgtcccccactccctacatcagaacgcatccctcatctggactccagcggtggcttcttgatgctgcgcggtcccccactccctacatcagaatgcatcccgcatccagactccagcggtggcgctctacctgcacgctgttgccaagtccaagctaccatactcctgcctgagctatgacaacagcctcctcactgatctcccctttcttccctttgcctcctccagctcatttttcacagtgtagaatgacattttgtttgtttgttttgttttgtttgagatggagtctcgctctgttgcccagggtggagtgcagcggtgcgatctcggctcactgcaacctccacctcccgggttcaagcggattctcgtgcctcagcctcctgagtagctgggattacaggcatgcaccaccatgcccggataatttttgtatttttagtagagatggggtttcactatgttggccaggctggtctcgaacacctgacctcgtggtccacccgcctcggcctcccaaagcactgggattacaggcgtgagccacccggcctggcctagaatgacttttaaaagatcaaattaaatcaggtcactcctttgcttacaacgcagtgcgtttagaggtacaccccatgtctccacagggcacacagcatccgatttaatctggatccattccggcgccttcctctcccagtcacccagagggccccaaccccggcggccctttcttcctcagatgtcctcggctctataccgtgcctgggtcttttctctttctctctgcctggaacattccttctttccccttttgtcttgcccactcctgtttacccttcaagtttcaagttcatgtcactgtctcagagaggttttcctgtgctcgccctgtttctctcaggaagccttgctcttttccatcatgcctctaatcacagcttataatcggatatttatttctgtgtctacagtcttgccctgccagactgtaagccccatgtgggcaggcgctcatgattgtttctgattgtttcacgcatgctgctaacccagagcctgggcccaaagctagttagtactcaataaacaatgcattgaatg

SEQ ID NO: 12065 - protein, 270 aa, Homo sapiens
MDSLEWNWALVYELSGEHHDEEWSVKTYQEVAQKFVETHPEFIGIKIIYSDHRSKDVAVIAESIRMAMGLRIKFPTVVAGFDLVGHEDTGHSLHDYKEALMIPAKDGVKLPYFFHAGETDWQGTSIDRNILDALMLNTTRIGHGFALSKHPAVRTYSWKKDIPIEVCPISNQVLKLVSDLRNHPVATLMATGHPMVISSDDPAMFGAKGLSYDFYEVFMGIGGMKADLRTLKQLAMNSIKYSTLLESEKNTFMEIWKKRWDKFIADVATK

SEQ ID NO: 12066 - DNA, 1961 bp, Homo sapiens
  CDS (40)..(1242)
cttccttcgtcccttccttccttcctttcgccgggcgcgatggagccggggcgccggggggccgcggcgctgctagcgctgctgtgcgtggcctgcgcgctgcgcgccgggcgcgcccaatacgaacgctacagcttccgcagcttcccacgggacgagctgatgccgctcgagtcggcctaccggcacgcgctgggcaagtacagcggcgagcactgggccgagagcgtgggctacctggagatcagcctgcggctgcaccgcttgctgcgcgacagcgaggccttctgccaccgcaactgcagcgccgcgccgcagcccgagcccgccgccggcctcgccagctatcccgagctgcgcctcttcgggggcctgctgcgccgcgcgcactgcctcaagcgctgcaagcagggcctgccagccttccgccagtcccagcccagccgcgaggtgctggcggacttccagcgccgcgagccctacaagttcctgcagttcgcttacttcaaggcaaataatctccccaaagccatcgccgctgctcacacctttctactgaagcatcctgatgacgaaatgatgaagaggaacatggcatattataagagcctgcctggtgccgaggactacattaaagacctggaaaccaagtcatatgaaagcctgttcatccgagcagtgcgggcatacaacggtgagaactggagaacatccatcacagacatggagctggcccttcccgacttcttcaaagccttttacgagtgtctcgcagcctgcgagggttccagggagatcaaggacttcaaggatttctacctttccatagcagatcattatgtagaagttctggaatgcaaaatacagtgtgaagagaacctcaccccagttataggaggctatccggttgagaaatttgtggctaccatgtatcattacttgcagtttgcctattataagttgaacgacctgaagaatgcagccccctgtgcagtcagctatctgctctttgatcagaatgacaaggtcatgcagcagaacctggtgtattaccagtaccacagggacacgtggggcctctcagatgagcacttccagcccagacctgaagcagttcagttctttaatgtgaccacactccagaaggagctgtatgactttgctaaggaaaatataatggatgatgatgagggagaagttgtggaatatgtggatgacctcttggaactggaggagaccagctagcccacagcaaccaaagagacttcctcttggcgttcaggaaacacagattctttgtccttttcccaacagcccaggctgttgatacctcagagccttctctttactctccaaagtgaaagggaagcccccgtctctctaactgcatgtcatcaggggtgagcctgcctttcctatcttcacacctgccacctcatgttcacacctatctttctcaccttttttttgagatggagtctcgctctcttgcccaggctggagtgcaatggcacgttctcagctcactgcaacctccgcctcttgggttcaagcaattctgctgcatcagcctcccgagtacctgggattacaggcatgtgccaccacgcccggctaattttgtatttttagtagagacggggttttgccatgttggccaggctggtctcgaactcttgacttcagatgatccatctgccttggcctcccacagtgctgggattacaggcgtgagccaccatgcccggcctctttctcacctttacacctgtcttcttatcctcacatctgttttcacaccttcatccctgtcttcctcatgttcacacttgtcttccccatgttcatagctgcctttcttaccattttggtttgaagggcagtcttctctggcttgtttttttgtttttcccagaaaatcagtattattttttaaataagaaaaacattcctagaagatg

SEQ ID NO: 12067 - protein, 401 aa, Homo sapiens [sequence omitted]

SEQ ID NO: 12068 - DNA, 2943 bp, Homo sapiens
  CDS (77)..(643)
ccctaatcaagtaccccctcctcctccaccacctcctgccccacccctccctgcatctggattctttttggcatccatgtcagaagacaatcgccctttaactggacttgcagctgcaattgccggagcaaaacttaggaaagtgtcacggatggaggatacctctttcccaagtggagggaatgctattggtgtgaactccgcctcatctaaaacagatacaggccgtggaaatggaccccttcctttagggggtagtggtttaatggaagaaatgagtgccctgctggccaggaggagaagaattgctgaaaagggatcaacaatagaaacagaacaaaaagaggacaaaggtgaagattcagagcctgtaacttctaaggcctcttcaacaagtacacctgaaccaacaagaaaaccttgggaaagaacaaatacaatgaatggcagcaagtcacctgttatctccagaccaaaatccacacccttatcacagcccagtgccaatggagtccagacggaaggacttgactatgacaggctgaagcaggacattttagatgaaatgagaaaagaattaacaaagctaaaagaagagctcattgatgcaatcaggcaggaactgagcaagtcaaatactgcatagaggaacagactaaggagagataggactttaatctggaggaaaaatatcctacaaacaacaactgttcacaacagcaaacccctacatttatgagctgtaagaagaaaatggagacaaacagaaggagggaaaaaccaacctactctgaaagccttcagacattatgactctggtgataagctctttccctctccgtttgctgcttttttctggcctttacaacagaatggaagagaatcatttaagagttcctgtaacagttatgcagaaaatactaaaacccatcaggcaagatcaccacgcattgaaatattttcatatcaagataaagtcgcacattttccacaatacattgctaaaataaagaggagaaaggcttaggaagtttttctgcagagagtgctggtaaagaattgagcaagtttgctattgtattgtaatgtttctctcaggtttgttcttcctatcatgtttgatattccatgaataattgagatcagccctatgtaagttaagatcataatatgtggaacaaatggaattgtaagtgctttcaaagggtaatatttataagaaagtgtccgaaaaatgtttcttcagcttgagaaattttagaatgataggaagtttctcgagttagccttcatgcaattttgtagattaaaacataaaatttgtccagaacttaaagatttagatgccttcctaaattgttacaatgctttaccaaatctatgacttctacataacacaaaccagtggtcaaatgtaaacactatattgtagatttactgtaggttttcaaccttttttagatttatgcatgtggacatttttataatgtaattacaatcaccacaaggttagcttttttaattgcagacagtaatgcatgtcacactaatatgtagtggccttttcaaggcctagtcccagggaaaacattttgtagagtataggggagtgggaggaaggggaggaataattttttatttaaagttgatttctgcactatctttttctcagttacctgcatgaataaataatgagaaatattttgtgactttaattggtaaatatgttacaaaaccaagtacttaatcttttacatcatgtcttcagctatttgtattttaaccagtaatttcaatggtctgaaacatgattctgagcttcacataatatcttaactgtggaactcaaaagtttgatcactgaatttggcagttattattacctaggtacccccgctgttacacaggtgtttagatacgtgttcctgaatgaagctgcttttgaattttgttatgttgaaatgcaagaaataacaatgatggcagcaattaaggtcacagaaatcattaggtaaaggaaaaccaatgaggagttctgcagttttcttttaataagtaaagtgagacttgggtggtgggaagaaggaaggtgggaagaaggaattagacactctgcctgccactctgcgtgtgtgtgctctcgcgcacgtgctgtctatatggaagccactcccttttctttcctttgaaactggtaaggttaaaataggggagaaatcctacatgttggaatgatagctttttggaaaatttaagaaactctccaggctctccatcttgatttatgcttgagttgttatgtgccatatttgctttgaactctgattatcagaagttttactaaaactttgaaataattcactttcatctgctttctagattttgtacatctcagtccataaagcaaagcttgttgatagtgtagttttctaaacgctgcaaatttgcagcctttaccactacaaagaagtttggatgagggattttttttttctttgtcaaaatagttcctgtttctgtagaaatttcatttttagattaaactgtgatggatgggctatcataattcaagtatacatttcttttttctatcagatattcattgtcatgcagtagtagtaaaaacatcaaagatgcagcaagcttattaagtattattttctaaaagaaataggaggcattttcatctttattattgtacttttggttatgcaaacactttgataatataaacagttatgtcccctataaatctggtcagcaacctcttttgattttgttgggtaagttaaatagtctgtagtaggtagagtactgggtacaagtggtccaaactaagataagagactaaaataaaatgctaaatcttaaaagaaactgggtttatgcactaaacgttttgtgccttggtctaatattaacatgatgtatgtgtaaactgac

SEQ ID NO: 12069 - protein, 189 aa, Homo sapiens
MSEDNRPLTGLAAAIAGAKLRKVSRMEDTSFPSGGNAIGVNSASSKTDTGRGNGPLPLGGSGLMEEMSALLARRRRIAEKGSTIETEQKEDKGEDSEPVTSKASSTSTPEPTRKPWERTNTMNGSKSPVISRPKSTPLSQPSANGVQTEGLDYDRLKQDILDEMRKELTKLKEELIDAIRQELSKSNTA

SEQ ID NO: 12070 - DNA, 1228 bp, Homo sapiens
  CDS (40)..(600)
ctctttgccctcgcgacgccgccacctccggaacaagccatggtggcggcgacggtggcagcggcgtggctgctcctgtgggctgcggcctgcgcgcagcaggagcaggacttctacgacttcaaggcggtcaacatccggggcaaactggtgtcgctggagaagtaccgcggatcggtgtccctggtggtgaatgtggccagcgagtgcggcttcacagaccagcactaccgagccctgcagcagctgcagcgagacctgggcccccaccactttaacgtgctcgccttcccctgcaaccagtttggccaacaggagcctgacagcaacaaggagattgagagctttgcccgccgcacctacagtgtctcattccccatgtttagcaagattgcagtcaccggtactggtgcccatcctgccttcaagtacctggcccagacttctgggaaggagcccacctggaacttctggaagtacctagtagccccagatggaaaggtggtaggggcttgggacccaactgtgtcagtggaggaggtcagaccccagatcacagcgctcgtgaggaagctcatcctactgaagcgagaagacttataaccaccgcgtctcctcctccaccacctcatcccgcccacctgtgtggggctgaccaatgcaaactcaaatggtgcttcaaagggagagacccactgactctccttcctttactcttatgccattggtcccatcattcttgtgggggaaaaattctagtattttgattatttgaatcttacagcaacaaataggaactcctggccaatgagagctcttgaccagtgaatcaccagccgatacgaacgtcttgccaacaaaaatgtgtggcaaatagaagtatatcaagcaataatctcccacccaaggcttctgtaaactgggaccaatgattacctcatagggctgttgtgaggattaggatgaaatacctgtgaaagtgcctaggcagtgccagccaaataggaggcattcaatgaacattttttgcatataaaccaaaaaataacttgttatcaataaaaacttgcatccaacatgaatttccagccgatgataatccaggccaaaggtttagttgttgttatttcctctgtattattttcttcattacaaaagaaatgcaagttcattgtaacaatccaaacaatacctcacgatataaaataaaaatgaaagtatcctcctc

SEQ ID NO: 12071 - protein, 187 aa, Homo sapiens
MVAATVAAAWLLLWAAACAQQEQDFYDFKAVNIRGKLVSLEKYRGSVSLVVNVASECGFTDQHYRALQQLQRDLGPHHFNVLAFPCNQFGQQEPDSNKEIESFARRTYSVSFPMFSKIAVTGTGAHPAFKYLAQTSGKEPTWNFWKYLVAPDGKVVGAWDPTVSVEEVRPQITALVRKLILLKREDL

SEQ ID NO: 12072 - DNA, 3133 bp, Homo sapiens
  CDS (100)..(3132)
tgtgccttctctttcggagttgttccgtgctcccacgtgcttccccttctccactggctgggatcccccgggctcggggcgcagtaataatttttcaccatgcatcggaaaaaggtggataaccgaatccggattctcattgagaatggagtagctgagcggcaaagatctctccttgttgtagttggggatcgaggaaaagatcaggtggtaatacttcatcacatgttatccaaagcaactgtgaaggctcggccttcagtgctgtggtgttataagaaagagctggggtttagcagtcaccggaagaaaagaatgcgacagctgcagaagaaaataaagaatggaacactgaacataaagcaggacgacccctttgaactcttcatagcagccacaaacattcgctactgctactacaacgagacccacaagatcctgggcaataccttcggcatgtgtgtgctgcaggattttgaagccttaactccaaacttgctggccaggactgtagaaacagtggaaggtggtgggctagtggtcatcctcctacggaccatgaactcactcaagcaattgtacacagtgactatggatgtgcattccaggtacagaactgaggcccatcaggatgtggtgggaagatttaatgaaaggtttattctgtctctggcctcttgtaagaagtgtctcgtcattgatgaccagctcaacatcctgcccatctcctcccacgttgccaccatggaggccctgcctccccagactccggatgagagtcttggtccttctgatctggagctgagggagttgaaggagagcttgcaggacacccagcctgtgggtgtgttggtggactgctgtaagactctagaccaggccaaagctgtcttgaaatttatcgagggcatctctgaaaagaccctgaggagtactgttgcactcacagctgctcgaggacggggaaaatctgcagccctgggattggcgattgctggggcggtggcatttgggtactccaatatctttgttacctccccaagccctgataacctccatactctgtttgaatttgtatttaaaggatttgatgctctgcaatatcaggaacatctggattatgagattatccagtctctaaatcctgaatttaacaaagcagtgatcagagtgaatgtatttcgagaacacaggcagactattcagtatatacatcctgcagatgctgtgaagctgggccaggctgaactagttgtgattgatgaagctgccgccatccccctccccttggtgaagagcctacttggcccctaccttgttttcatggcatccaccatcaatggctatgagggcactggccggtcactgtccctcaagctaattcagcagctccgtcaacagagcgcccagagccaggtcagcaccactgctgagaataagaccacgacgacagccagattggcatcagcgcggacactgcatgaggtttccctccaggagtcaatccgatacgcccctggggatgcagtggagaagtggctgaatgacttgctgtgcctggattgcctcaacatcactcggatagtctcaggctgccccttgcctgaagcttgtgaactgtactatgttaatagagataccctcttttgctaccacaaggcctctgaagttttcctccaacggcttatggccctctacgtggcttctcactacaagaactctcccaatgatctccagatgctctccgatgcacctgctcaccatctcttctgccttctgcctcctgtgccccccacccagaatgcccttccagaagtgcttgctgttatccaggtgtgccttgaaggggagatttctcgccagtccatcttgaacagtctgtctcgaggcaagaaggcttcaggggacctgattccatggacagtgtcagaacagttccaagatccagactttggtggtctgtctggtggaagggtcgttcgcattgctgttcacccagattatcaagggatgggctatggcagccgtgctctgcagctgctgcagatgtactatgaaggcaggtttccttgtctggaggaaaaggtccttgagacaccacaggaaattcacaccgtaagcagcgaggctgtcagcttgttggaagaggtcatcactccccggaaggacctgcctcctttactcctcaaattgaatgagaggcctgccgaacgcctggattacctgggtgtttcctatggcttgacccccaggctcctcaagttctggaaacgagctggatttgttcctgtttatctgagacagaccccgaatgacctgaccggagagcactcgtgcatcatgctgaagacgctcactgatgaggatgaggctgaccagggaggctggcttgcagccttctggaaagatttccgacggcggttcctagccttgctctcctaccagttcagtaccttctctccttccctggctctgaacatcattcagaacaggaacatggggaagccagcccagcctgccctgagccgggaggagctggaagcactcttcctcccctatgacctgaagcggctggagatgtattcacggaatatggtggactatcacctcatcatggacatgatcccggccatctctcgcatctatttcctgaaccagctgggggacctggccctgtctgcggctcagtcggctcttctcttggggattggcctgcagcataagtctgtggaccagctggaaaaggagattgagctgccctcgggccagttgatgggacttttcaaccggatcatccgcaaagttgtgaagctatttaatgaagttcaggaaaaggccattgaggagcagatggtggcagcgaaggatgtggtcatggagcccacgatgaagaccctcagtgacgacctagatgaagcagcaaaggaatttcaggagaaacacaagaaggaagtagggaagctgaagagcatggacctctctgaatacataatccgtggggacgatgaagagtggaatgaagttttgaacaaagctgggccgaacgcctcgatcatcagcctgaaaagtgacaagaaaaggaagttagaggccaaacaagaacccaaacagagcaagaagttgaagaacagag

SEQ ID NO: 12073 - protein, 1011 aa, Homo sapiens
MHRKKVDNRIRILIENGVAERQRSLLVVVGDRGKDQVVILHHMLSKATVKARPSVLWCYKKELGFSSHRKKRMRQLQKKIKNGTLNIKQDDPFELFIAATNIRYCYYNETHKILGNTFGMCVLQDFEALTPNLLARTVETVEGGGLVVILLRTMNSLKQLYTVTMDVHSRYRTEAHQDVVGRFNERFILSLASCKKCLVIDDQLNILPISSHVATMEALPPQTPDESLGPSDLELRELKESLQDTQPVGVLVDCCKTLDQAKAVLKFIEGISEKTLRSTVALTAARGRGKSAALGLAIAGAVAFGYSNIFVTSPSPDNLHTLFEFVFKGFDALQYQEHLDYEIIQSLNPEFNKAVIRVNVFREHRQTIQYIHPADAVKLGQAELVVIDEAAAIPLPLVKSLLGPYLVFMASTINGYEGTGRSLSLKLIQQLRQQSAQSQVSTTAENKTTTTARLASARTLHEVSLQESIRYAPGDAVEKWLNDLLCLDCLNITRIVSGCPLPEACELYYVNRDTLFCYHKASEVFLQRLMALYVASHYKNSPNDLQMLSDAPAHHLFCLLPPVPPTQNALPEVLAVIQVCLEGEISRQSILNSLSRGKKASGDLIPWTVSEQFQDPDFGGLSGGRVVRIAVHPDYQGMGYGSRALQLLQMYYEGRFPCLEEKVLETPQEIHTVSSEAVSLLEEVITPRKDLPPLLLKLNERPAERLDYLGVSYGLTPRLLKFWKRAGFVPVYLRQTPNDLTGEHSCIMLKTLTDEDEADQGGWLAAFWKDFRRRFLALLSYQFSTFSPSLALNIIQNRNMGKPAQPALSREELEALFLPYDLKRLEMYSRNMVDYHLIMDMIPAISRIYFLNQLGDLALSAAQSALLLGIGLQHKSVDQLEKEIELPSGQLMGLFNRIIRKVVKLFNEVQEKAIEEQMVAAKDVVMEPTMKTLSDDLDEAAKEFQEKHKKEVGKLKSMDLSEYIIRGDDEEWNEVLNKAGPNASIISLKSDKKRKLEAKQEPKQSKKLKNR

SEQ ID NO: 12074 - DNA, 2620 bp, Homo sapiens
  CDS (225)..(773)
ggtggcggtgcaaccgtcatgtggagagcatcgacaagcgccactgctcgctggtctacgtccccgaggagatctaccgctatgcccggagcctggaggagctgctgctggacgccaaccagctccgcgagctgcccgagcaatttttccagctagtcaaattacgaaagcttggacttagtgataatgaaattcagcggctccctccagaaatagcaaacttcatgcagctggtggaactagatgtgtctcgaaatgagattcctgaaattccagaaagcatttcattctgtaaagcactgcaggtagctgacttcagcggaaacccactgactaggttgccagaaagctttcctgaattacagaatttaacatgtctttctgtaaatgacatctcactacagtctctacctgaaaatattggcaatctttataacctggcttcactggaactgagagagaatcttcttacatatcttcctgactctcttacccagctgcgaagactagaagaacttgatttaggaaacaatgaaatatataatttgccagaatcaattggagccctcttacatctaaaagatctctggttggatggaaatcaactgtcagaattacctcaggaaataggaaatctgaagaacctgctgtgtttagatgtctctgaaaacaggttggaaagacttcctgaagaaatcagtggcctgacttcattaacggatttagtcatttcccagaacttattagaaacgattccggatggattggaaaactaaagaaactgtcaatcttgaaggtggatcagaatagactcacacagttgcctgaagcagttggggaatgtgaaagtctcactgagttagttcttacagaaaatcagctcctgaccctgcctaaaagcattggaaaactaaagaagttgagcaacttgaatgcagacagaaataaattagtgtccttaccaaaagagatcggcgggtgctgcagcctcactgtgttctgtgtacgtgacaacagactaactcggatacctgcagaggtgtcacaggcaacagaacttcatgtcctggatgtggcagggaacaggttgctgcatctacctttatccctgactgccttgaagttgaaggctctgtggctatctgacaaccagtcccagcccctgcttacattccagacagacacagactacaccacaggagagaagattttaacctgtgtcttacttcctcagctgccttctgaacctacttgtcaagagaatctgcctcgctgtggtgcactggagaacttggtaaatgatgtctctgatgaagcctggaacgagcgtgctgtcaacagagtcagtgcgatccgatttgtggaggatgagaaagatgaagaagacaatgagacgagaacacttctaaggcgagccactccacacccaggggagttaaagcacatgaaaaagacagtggagaatttacggaatgacatgaatgctgctaaaggactggactcaaacaaaaacgaggtcaatcatgccattgaccgagtgaccacttctgtgtagagtttcacctccaagttttacctcctgtgtcttcctctgctgtcgagacgttcctgtctgcttcccgggagcctcacgtgctccttgtcctaaccagcccccgcgcgccatcttcccgtggagtgtggggaagctgctgtctcccaggaagtgccttactcatcccgcaaccagtcagcgcaccagtggtctcccggtgtgattttttttttttttaatttcagttgtttgtaataagtagaatacactactgtaaacatacgacctttgtttttgtcttatgttggggtaaaggaaagcaggaaggggaatttttatcctcctcccttccgtaaagtgctgggatattttgaatcccccaagttcccttggacctactgatgagagatagttttatgtatggggaaaaatggatactttttaaaccttttttggcagctcagatggtgtaaattttaaaattttgtataggtatttcataacaaaaatatgtatttcttttttgttattttatcttgaaaacggtacatattttagtatttgtgcagaaaaacaagtcctaaagtatttgtttttatttgtaccgtccacttgtgccttactgtatcctgtgtcatgtccaatcagttgtaaacaatggcatctttgaacagtgtgatgagaataggaatgtggtgttttaaagcagtgttgcattttaatcagtaatctacctggtggatttgtttttaaccaaaaagatgaattatcaatgatttgtaattatatcggttgatcttttttgaaaagatgaaccaaaggatttgactgctaatattttattccttacactttttttctgaataagtctctcataatgagtgcagtgtcagactgtgcctactctgatggtatgtgccatttgtaaaataaaatagagcagaaaaacacaaaaagagaacactggttcagacattcagtgggcaagtaaattatggactgcaaaataatgatttttattcaagaaagctttaaaagttttatatccagatatacaaccacaataaagcaaaataacctactatc

SEQ ID NO: 12075 - protein, 183 aa, Homo sapiens
MQLVELDVSRNEIPEIPESISFCKALQVADFSGNPLTRLPESFPELQNLTCLSVNDISLQSLPENIGNLYNLASLELRENLLTYLPDSLTQLRRLEELDLGNNEIYNLPESIGALLHLKDLWLDGNQLSELPQEIGNLKNLLCLDVSENRLERLPEEISGLTSLTDLVISQNLLETIPDGLEN

SEQ ID NO: 12076 - DNA, 3251 bp, Homo sapiens
  CDS (747)..(1292)
gtgcagaacctttgcctcctggccagagggacccttctgcaggctgattccagcagtgcccgatggtgggacccacaccagaccaagccttcgcctcccagaggcctcctggccctcctgtcatggcctgtgagagccacacccctaggccccgtctcctagtctgcaggccgcaggaccagctgcccacggccccagggggcaagggctgtagatgagggtctcagaggtggtgggagcaccccccccacccacagttcctgggcatttctttagagctttaaaatggcacctggagaccaccaggcgcggcgatcagatcgggtggtgtggtgcctcctgggactgaccacttcttgctctccgaccaggcaggggcgagtggcctgggaggttcccggaccctcagggcgcctgtgtctctgggcaccgcagctccgccccactccttcctccagaacattccccactcgggctagagaattgcgtctgctccaggaatgcatcctagcgtgtgtacgatcgcgcctgggtgtcctgttctcatgagcaagcggttttaaccagcagcataatttatactcatagacaggactgggggaagggctgttcctgaggctggggtgcagtgccttggaaagcacccctgaaacagtggaccttgtatttttagtgtcccctgcaaccatcctctgacttagagcaagaatttccgctgctgctacccccgagatgggcttcaccagatgttaataacgtgcttattttctctaagtgctattttggcaccagcgttagttgcaatttatattctgcagcatttgatgctgggaaaagaacccaccctaatggtccccaattggcagagctcggctgttaagcagcagaccatatgctgcctgctggaggagcgtggtcagcacttgtccccgtgcctgcgtgcgtgtgcctgcgtgcacgtgtgcctgcgggtacctgtgccctgtgtgtgcacatgtgcctgcatgcgtgtgcctgcgtgcacgtgtgcctgtgtgtacatgtgcctgcgtgtacctgtgccctgtgtgtgcacgtgtgccttcgtgtacctgtgccctgtgtgtgcaagcgtgtgtgagtcacgtcttccgtgtgtgtatgtgagggagagactgtggggttggagggagggaggaggggaaagggtatgtatccctttgttctttaaaagggagagccccaacctctctggctgccccctcctgcctgtgctcccagctcaccccacacctagctgctatttattctcctgacccccttcccggccctgcagccccgtgtcccgcagcctccgccccgcctcctgctccacgtcaccaggcaacactcggctccaccaggcttccgaaggtggcccagagcaggcacttgagcctgatgacccagagcaaagctgcctttctgggccttgagtactcctttctgctatggaaggcttttcttgttttcaacggcccgtccagcccaggggggctgggtgagggccgcttccttctgcagcagagggggcgggctctatccttgccatctgctgcccccagaggccctgccaggacatgggcctgagcggtttcttctccaagaggccctcctgggacctgtctgtgcacagggcgggaagacacttgctgcttcgacccaggacggcagccaggacgggctgagctcctcttgcgctgcaaacacacaagggttgcctgccagctcagcagcgccctccctcaaccacaccctgggtccggacccagagccacaggccgttggacccaggggaccggggctgggctcaggcgtgggcctggagggcttgtggaggggccagacctagagccgtagggctccaacagctgagggctgggcccctgccggccaatgaagctccagaccagtgctccggccttggcggtgccagcagtgctcctgcagggatggagggtgctggaggcctggatgcggggaccttgatcccccagcaggcagcgctgtggtcccagccactcaggaggctgaggcgggggaatggcatgaacctgggaggcggagcttgcagtgagctgagatcgcaccactgcattccagcctgggcgacagagtgagactccgtctcaaaaaaaaaaaaaacaaaagaagtttctagatctactgggcatgatgaacacaaaccccacagacactgaggaacccagtggtggcagtgactcgggctcctctgctctctaaagctcctttgagaaacatgggaggggccgggcgtggtggttcacgcctgtcatcccagcactttgggaggctggggcaggaggatcgcttgagcccaggagttcgagaccagcctgggcaacatagtgagactgtatcgctacataaaataaaaaaaaaagttagctgggcattgtacatgtgcctgtggtcccagctactcaggaggctgaggcaggaggattgcttgagcccaggagttggatgttgcagtgagccaagatcgcaccattgccctccactctgggccacggagcaataccctgtctcagaaaacaaacaacaaaaagcagaaacgctgaaggggtcggtttacgggaaaaccgcctgtcagaacacttggctactcctaccccagatcagtggacctgggaatgagggttggtcccgggaggcttttctccaagctgttgccaccagacccgccatgggaaccctggccacagaagcctcccggggagtgagccagagcctggaccgctgtgctgatgtgtctggggtggagggagggtggggagtgtgcaagggtgtgtgtgtgcccggggggtgttcatgggcaagcatgtgcgtgcctgtgtgtgtgcgtgcccctcccctgcagccgtcggtggtatctccctccagccccttcgccaccttctgagcattgcctgtccacgtgagactgcccagagacagcagagctccacgtggttttaaggggagacctttccctggacctgggggtctcgccgtatctcatgaccaggtgctaaatgacccgacatgcatcacctgcctttcgatgaccaacctccctgtccccgtcccgctgacctgcccccgtggcgtctcacggtgatgcctgctcctgacattggtgttcactgtagcaaactacattctggatgggaattttcatgtacatgtgtggcatgtggaaaatttcaaataaaatggacttgatttag

SEQ ID NO: 12077 - protein, 182 aa, Homo sapiens [sequence omitted]

SEQ ID NO: 12078 - DNA, 2437 bp, Homo sapiens
  CDS (16)..(1608)
ctttttccctctgtgatggttgtagtagaacaaattaaaagtcaaaagattcatggttgtcaaatcctggaaacagtctacaaacacagctgtggggggttgcctcctgttcgaagtgcactggaaaaaatcctggccgtttgtcatggggtcatgtataaacagctctcagcctggatgctccatggactcctcttggaccagcatgaagaattctttatcaaacaggggccatcttctggtaatgtcagtgcccagccagaagaggacgaggaggatctgggcattgggggactgacaggaaaacaactgagagaactgcaggacttgcgcctgattgaggaagagaacatgctggcaccatctctgaagcagttttccctacgagtggagattttgccatcctacattccagtgagggttgctgaaaaaatcctatttgttggagaatctgtccagatgtttgagaatcaaaatgtgaacctgactagaaaaggatccattttgaaaaaccaggaagacacttttgctgcagagctgcaccgtctcaagcagcagccactcttcagcttggtggactttgaacaggtggtggatcgcattcgcagcactgtggctgagcatctctggaagttgatggtagaagaatccgatttactgggtcagctgaagatcattaaagacttttaccttctgggacgtggagaactgtttcaggccttcattgacacagctcaacacatgttgaaaacaccacccactgcagtaactgagcatgatgtgaatgtggcctttcaacagtcagcacacaaggtattgctagatgatgacaaccttctccctctgttgcacttgacaatcgagtatcacggaaaggagcacaaagcagatgctactcaggcaagagaagggccttctcgggaaacttctccccgggaagcccctgcatctggctgggcagccctaggtctttcctacaaagtacagtggccactacatattctcttcaccccagctgtcctggaaaagtacaatgttgtttttaagtacttactgagtgtgcgccgggtgcaagctgagctgcagcactgctgggccctacaaatgcagcgcaagcacctcaagtcgaaccagactgatgcaatcaagtggcgcctaagaaatcacatggcatttttggtggataatcttcagtactatctccaggtagatgtgttggagtctcagttctcccagctgcttcatcagatcaattctacccgagactttgaaagcatccgattggctcatgaccacttcctgagcaatttgctggctcaatcctttatcctattgaaacctgtgtttcactgcctgaatgaaatcctagatctctgtcacagtttttgttcgctggtcagtcagaacctaggcccactggatgagcgtggagccgcccagctgagcattctcgtgaagggctttagccgccagtcttcactcctgttcaagattctctccagtgttcggaatcatcagatcaactcagatttggctcaactactgttacgactagattataacaaatactatacccaggctggtggaactctgggcagtttcgggatgtgaaaatttctggctcataaattgaaataacagccacgttcccaaggttgtaacagaagattcaaaacatcccattctagccacacacaaataaatatctgcggcttagtgataggactctaccttttctcctagaagcagttactgaacatccaggagtacaactccttcccatcattcccatgtggaagggtctctcccatcaaggagaacatgtggcatctctgatcctttacattgagaacatttgttggatatgttcatttattcaatagtcatttattgagcacctactacgtaccttggtactgttcaagctgtgggagatacagcggtagacaaacaatatagagcagaaagttaaatattttatggttcatatgtgaaaaagtaattatgtttataaatagactaactgctggatgttaccaccaagtaagaaagcaacaggtaagataggctttctctctccctataccaagtaatttatacctacacagattgggcaattctagctaatgaaaatatacttaaaagtatttcttaggccgggcatggtggctcacacctgtaatcccagcactttgggaggccgaggcgggcggatcacctgaagtcaggagtttgagaccagcctgaccaacatgatgaaacctcgattctactaaaaatacaaaaattagccaggtgtggtggcatgtgcctgtaatcccagctactcaggaggctgagacaggagaattgcttgaacctgggaagcagacgctgcagtgagctgagattgtgccattgcattccagcccgggcaacaagagcgaaattccgtctc

SEQ ID NO: 12079 - protein, 531 aa, Homo sapiens
MVVVEQIKSQKIHGCQILETVYKHSCGGLPPVRSALEKILAVCHGVMYKQLSAWMLHGLLLDQHEEFFIKQGPSSGNVSAQPEEDEEDLGIGGLTGKQLRELQDLRLIEEENMLAPSLKQFSLRVEILPSYIPVRVAEKILFVGESVQMFENQNVNLTRKGSILKNQEDTFAAELHRLKQQPLFSLVDFEQVVDRIRSTVAEHLWKLMVEESDLLGQLKIIKDFYLLGRGELFQAFIDTAQHMLKTPPTAVTEHDVNVAFQQSAHKVLLDDDNLLPLLHLTIEYHGKEHKADATQAREGPSRETSPREAPASGWAALGLSYKVQWPLHILFTPAVLEKYNVVFKYLLSVRRVQAELQHCWALQMQRKHLKSNQTDAIKWRLRNHMAFLVDNLQYYLQVDVLESQFSQLLHQINSTRDFESIRLAHDHFLSNLLAQSFILLKPVFHCLNEILDLCHSFCSLVSQNLGPLDERGAAQLSILVKGFSRQSSLLFKILSSVRNHQINSDLAQLLLRLDYNKYYTQAGGTLGSFGM

SEQ ID NO: 12080 - DNA, 4147 bp, Homo sapiens
  CDS (327)..(2972)
gtagtttcgagcccgctgccctttgcctcctgggcggagaagctgcttcctcctgggaacaaccgcctcccgctcctagcaggttgctactgccccgaacccgcgctgcagggaacagcggggcaaacagtgagtggggttcagcgtagactctggaccaggagaggcccgcggtgaccgaggcctgggccccggaaaccaatagagccatggcgactccctctgctgccttcgaggcccttatgaatggtgtgacaagctaggatgtacccgaagatgctgttccatgtgaactgcttcttattggagaggcttcatttcctgtgatggtgaatgacatgggccaggtcctcattgctgcctcctcctatggccgtggccgcctggtggtcgtgtcccatgaggactacttggtggaagcccagctcacgccctttctcctgaacgcagtggggtggctttgctcttcccctggggctcccattggtgtacacccatccctggcacctttggccaaaatcctcgagggctctggagtggatgcaaaggttgagccagaagtgaaagactccctgggggtttactgtattgatgcctacaatgaaaccatgacagaaaagctggtcaagttcatgaaatgtggtggcggcttgctcataggaggacaagcctggggttgggccaaccagggggaggatgaaagggttctgttcacgttccctgggaacctcgtgaccagtgtggctggcatttactttactgacaacaaaggggacacgagtttctttaaagtctccaagaagatgcccaagatcccagtgttggttagttgtgaagatgacctctccgacgacagagaagagcttctgcatgggatttcagagctggacatcagcaactcggattgtttcccatcccagctgctagtgcatggggctttagcctttcctctagggttagattcctaccatggctgtgttatagcggctgcccgctatggccggggccgggtggttgtgactggccataaggtattattcactgttggtaaactgggcccctttctgctcaatgctgtccgctggctggatgggggccgcagaggcaagattgtggtgcagacagagctgagaaccctgagtggcctcctcgcagtggggggcatagacaccagcatcgagcccaatctgaccagtgatgcaagtgtctactgctttgaacccgtgagtgaagtgggggtcaaggaactgcaggagtttgtagcagagggtggcgggctatttgttggagcccaagcctggtggtgggccttcaagaaccccggagtgtcccctttggctcgattcccaggaaacctcctcctcaacccctttggcatcagcattacaagccaaagcctcaatccagggccctttcgtactcctaaagcagggataaggacctatcacttccgctccaccttggccgagttccaggttataatgggcaggaagagaggaaatgtggaaaagggctggttggcaaagctgggaccagatggtgcagctttcctgcagattcccgcagaagagatccctgcctacatgtctgtgcatcgactcctgaggaagctgctaagtcgatatcggcttccagtagcaacccgagagaaccctgttatcaatgactgctgcagaggtgctatgctttccctggccacagggctggcccactctggaagcgacctctctctgttagtcccagaaattgaagatatgtacagcagcccctatctgcgcccctcagaatctcctatcaccgtcgaggtcaactgcaccaatccaggcaccagatattgctggatgagtactgggctctacatacctggaaggcaaattatagaagtctcactgcctgaagctgctgcctctgccgacctgaagatacagattggctgccacacagatgacctgaccagggccagcaagcttttccgaggcccactcgtaattaaccggtgctgcttggacaaacccacaaaatcgatcacgtgcctctggggtggactcctctatataattgtgcctcagaacagcaaactgggttctgtgcctgtcaccgtgaagggggctgtgcatgctccatactacaagctgggggagaccaccctggaggagtggaagaggcgtatccaggagaatccagggccctggggagagctggccacggacaacatcattctgaccgtgccgaccgcaaatcttcgtactctggagaaccctgagccgctgctccgcctctgggatgaggtgatgcaggctgtggcgcgactgggagctgagcccttccctttgcgcctgcctcagaggattgttgccgacgtgcagatctcagtgggctggatgcatgcagggtaccccatcatgtgccatctggagtcagtgcaggagctcatcaacgagaagctcatcagaaccaaggggctgtggggccccgtccatgagctgggccgcaaccagcagcggcaggagtgggagttcccaccacacaccaccgaggccacctgcaacctgtggtgtgtgtatgtgcatgagacggtcttgggcattcctcgaagccgtgccaatattgctctgtggcccccagttcgggagaagagagtcagaatctacctgagcaagggtcccaatgtgaaaaactggaatgcatggaccgcactggaaacgtatttacagctccaggaagcctttggttgggagccattcatccgtctcttcaccgagtacaggaaccagaccaacttgcccacagaaaatgttgacaaaatgaatctgtgggtcaagatgttctcccaccaagtgcagaagaacctggctccgttctttgaggcctgggcctggcccatccagaaggaagtgcctaccagcctggcctatctgcctgaatggaaggaaaatattatgaaattgtacctcctcacacagatgccccactgaaattgaagtcaagaaatgcaaaaaggaactgacacatctcagcaaagaaaactgaagggatttggttataagtggagaggatctcagcatatttctggaagatagaaagtggatgaagcatgataatgaaagagtgaagaacctttcagataaaatgtaagctgatctgaacaacataaccccaaagagacttgcgcacctgaaaagcttgtctactgaagaattactccagttgtaagattgagccctctcctactctcccccaactcttatgcacagaacacaggcagtctccactattgataccagttaaaaatttcttgttattgttgctgttgtttgtataaaggaattgaacaggctgcttgcagagagataagagttggtgcccctgaaaaaaatttctcttctagtggaaataagtgcccctacccccagccggtcagctaattctctactgacagctgagacctcctactcaagtgcctgttgccttcaggtatagaagaggtttcctgaagaaacagacctaactgtacaacagcagaggaaacccatgccaactgttatacaagttaacagttatgttgattcttaaatgggaatggtgagttagaaattcccagacatgggcgatggggagggaagaggaataagaaaagtcacgaggtagaattaggggccttgaaaatatgacaaactctgagggaaacaaagacaatgtggaaagaataacttaattttaattccatctccagagagatttgaggtgtatttaagatgaaaaacaggatactacaaagaaacggaaaactcaggagttcaagaccagcctaggcaagatggcaacatcccgtctctacaaaataatttttaaaaattagccaagcatggtggcatgtgcctgtggtcctagctacttgggaggctgaagtgggaagatcacttgagcccaggagttcaaggcttcagtgagccatgatggtgccactgcactccagcctgggggacagagtgagaccctgtctcttaaaaagcaagaaaagaaagagaagactgagaataagaagatctctttgaaaataaaataagactgctaaaagtatttggtatacagtctggaaaataaagttgagggaatctctccagataaagagcaaaaagaaatagat

SEQ ID NO: 12081 - protein, 882 aa, Homo sapiens
MVNDMGQVLIAASSYGRGRLVVVSHEDYLVEAQLTPFLLNAVGWLCSSPGAPIGVHPSLAPLAKILEGSGVDAKVEPEVKDSLGVYCIDAYNETMTEKLVKFMKCGGGLLIGGQAWGWANQGEDERVLFTFPGNLVTSVAGIYFTDNKGDTSFFKVSKKMPKIPVLVSCEDDLSDDREELLHGISELDISNSDCFPSQLLVHGALAFPLGLDSYHGCVIAAARYGRGRVVVTGHKVLFTVGKLGPFLLNAVRWLDGGRRGKIVVQTELRTLSGLLAVGGIDTSIEPNLTSDASVYCFEPVSEVGVKELQEFVAEGGGLFVGAQAWWWAFKNPGVSPLARFPGNLLLNPFGISITSQSLNPGPFRTPKAGIRTYHFRSTLAEFQVIMGRKRGNVEKGWLAKLGPDGAAFLQIPAEEIPAYMSVHRLLRKLLSRYRLPVATRENPVINDCCRGAMLSLATGLAHSGSDLSLLVPEIEDMYSSPYLRPSESPITVEVNCTNPGTRYCWMSTGLYIPGRQIIEVSLPEAAASADLKIQIGCHTDDLTRASKLFRGPLVINRCCLDKPTKSITCLWGGLLYIIVPQNSKLGSVPVTVKGAVHAPYYKLGETTLEEWKRRIQENPGPWGELATDNIILTVPTANLRTLENPEPLLRLWDEVMQAVARLGAEPFPLRLPQRIVADVQISVGWMHAGYPIMCHLESVQELINEKLIRTKGLWGPVHELGRNQQRQEWEFPPHTTEATCNLWCVYVHETVLGIPRSRANIALWPPVREKRVRIYLSKGPNVKNWNAWTALETYLQLQEAFGWEPFIRLFTEYRNQTNLPTENVDKMNLWVKMFSHQVQKNLAPFFEAWAWPIQKEVPTSLAYLPEWKENIMKLYLLTQMPH

SEQ ID NO: 12082 - DNA, 4788 bp, Homo sapiens
  CDS (309)..(4304)
agtgctgcggctgcctagttgacgcacccattgagtcgctggcttctttgcagcgcttcagcgttttcccctggagggcgcctccatccttggaggcctagtgccgtcggagagagagcgggagccgcggacagagacgcgtgcgcaattcggagccgactctgggtgcggactgtgggagctgactctgggtagccggctgcgcgtggctggggaggcgaggccggacgcacctctgtttgggggtcctcagagattaatgattcatcaagggatagttgtacttgtctcgtgggaatcacttcatcatgcgaaatctgaaattatttcggaccctggagttcagggatattcaaggtccagggaatcctcagtgcttctctctccgaactgaacaggggacggtgctcattggttcagaacatggcctgatagaagtagaccctgtctcaagagaagtgaaaaatgaagtttctttggtggcagaaggttttctcccagaggatggaagtggccgcattgttggtgttcaggacttgctggatcaggagtcagtgtgtgtggccacagcctctggagacgtcatactctgcagtctcagcacacaacagctggagtgtgttgggagtgtagccagtggtatctctgttatgagttggagtcctgaccaagagctggtgcttcttgccacaggtcaacagaccctgattatgatgacaaaagattttgagccaatcctggagcagcaaatccatcaggatgattttggtgaaagcaagtttatcactgttggatggggtaggaaggagacacagttccatggatcagaaggcagacaagcagcttttcagatgcaaatgcatgagtctgctttgccctgggatgaccatagaccacaagttacctggcggggggatggacagttttttgctgtgagtgttgtttgcccagaaacaggggctcggaaggtcagagtgtggaaccgagagtttgctttgcagtcaaccagtgagcctgtggcaggactgggaccagccctggcttggaaaccctcaggcagtttgattgcatctacacaagataaacccaaccagcaggatattgtgttttttgagaaaaatggactccttcatggacactttacacttcccttccttaaagatgaggttaaggtaaatgacttgctctggaatgcagattcctctgtgcttgcagtctggctggaagaccttcagagagaagaaagctccattccgaaaacctgtgttcagctctggactgttggaaactatcactggtatctcaagcaaagtttatccttcagcacctgtgggaagagcaagattgtgtctctgatgtgggaccctgtgaccccataccggctgcatgttctctgtcagggctggcattacctcgcctatgattggcactggacgactgaccggagcgtgggagataattcaagtgacttgtccaatgtggctgtcattgatggaaacagggtgttggtgacagtcttccggcagactgtggttccgcctcccatgtgcacctaccaactgctgttcccacaccctgtgaatcaagtcacattcttagcacaccctcaaaagagtaatgaccttgctgttctagatgccagtaaccagatttctgtttataaatgtggtgattgtccaagtgctgaccctacagtgaaactgggagctgtgggtggaagtggatttaaagtttgccttagaactcctcatttggaaaagagatacaaaatccagtttgagaataatgaagatcaagatgtaaacccgctgaaactaggccttctcacttggattgaagaagacgtcttcctggctgtaagccacagtgagttcagcccccggtctgtcattcaccatttgactgcagcttcttctgagatggatgaagagcatggacagctcaatgtcagttcatctgcagcggtggatggggtcataatcagtctatgttgcaattccaagaccaagtcagtagtattacagctggctgatggccagatatttaagtacctttgggagtcaccttctctggctattaaaccatggaagaactctggtggatttcctgttcggtttccttatccatgcacccagaccgaattggccatgattggagaagaggaatgtgtccttggtctgactgacaggtgtcgctttttcatcaatgacattgaggttgcgtcaaatatcacgtcatttgcagtatatgatgagtttttattgttgacaacccattcccatacctgccagtgtttttgcctgagggatgcttcatttaaaacattacaggccggcctgagcagcaatcatgtgtcccatggggaagttctgcggaaagtggagaggggttcacggattgtcactgttgtgccccaggacacaaagcttgtattacagatgccaaggggaaacttagaagttgttcatcatcgagccctggttttagctcagattcggaagtggttggacaaacttatgtttaaagaggcatttgaatgcatgagaaagctgagaatcaatctcaatctgatttatgatcataaccctaaggtgtttcttggaaatgtggaaaccttcattaaacagatagattctgtgaatcatattaacttgttttttacagaattgaaagaagaagatgtcacgaagaccatgtaccctgcaccagttaccagcagtgtctacctgtccagggatcctgacgggaataaaatagaccttgtctgcgatgctatgagagcagtcatggagagcataaatcctcataaatactgcctatccatacttacatctcatgtaaagaagacaaccccagaactggaaattgtactgcaaaaagtacacgagcttcaaggaaatgctccctctgatcctgatgctgtgagtgctgaagaggccttgaaatatttgctgcatctggtagatgttaatgaattatatgatcattctcttggcacctatgactttgatttggtcctcatggtagctgagaagtcacagaaggatcccaaagaatatcttccatttcttaatacacttaagaaaatggaaactaattatcagcggtttactatagacaaatacttgaaacgatatgaaaaagccattggccacctcagcaaatgtggacctgagtacttcccagaatgcttaaacttgataaaagataaaaacttgtataacgaagctctgaagttatattcaccaagctcacaacagtaccaggatatcagcattgcttatggggagcacctgatgcaggagcacatgtatgagccagcggggctcatgtttgcccgttgcggtgcccacgagaaagctctctcagcctttctgacatgtggcaactggaagcaagccctctgtgtggcagcccagcttaactttaccaaagaccagctggtgggcctcggcagaactctggcaggaaagctggttgagcagaggaagcacattgatgcggccatggttttggaagagtgtgcccaggattatgaagaagctgtgctcttgctgttagaaggagctgcctgggaagaagctttgaggctggtatacaaatataacagactggatattatagaaaccaacgtaaagccttccattttagaagcccagaaaaattatatggcatttctggactctcagacagccacattcagtcgccacaagaaacgtttattggtagttcgagagctcaaggagcaagcccagcaggcaggtctggatgatgaggtaccccacgggcaagagtcagacctcttctctgaaactagcagtgtcgtgagtggcagtgagatgagtggcaaatactcccatagtaactccaggatatcagcgagatcatccaagaatcgccgaaaagcggagcggaagaagcacagcctcaaagaaggcagtccgctggaggacctggccctcctggaggcactgagtgaagtggtgcagaacactgaaaacctgaaagatgaagtataccatattttaaaggtactctttctctttgagtttgatgaacaaggaagggaattacagaaggcctttgaagatacgctgcagttgatggaaaggtcacttccagaaatttggactcttacttaccagcagaattcagctaccccggttctaggtcccaattctactgcaaatagtatcatggcatcttatcagcaacagaagacttcggttcctgttcttgatgctgagctttttataccaccaaagatcaacagaagaacccagtggaagctgagcctgctagactgagtgactgcagttaggagggatccgacagagaagaccatttccactcattcctgttgtcctaccaccccttgctctttgagggctggctattgagaactggaaagagtaaaatgataacttaccttagcattgccaagaacttcagcagacaacaagcaattctatttattttatgttgtgtatacatcttgatcattagcaagacattaagctttaaccattatggcaccattttgtgagaatgattgttctttcacttgggctgtttgagagcataattatggtaatcatgagattaatgtttcatgatttctacctccaaagtgtgaagacaagtaaaacaatgtttctaaattgtcttattttgttggcggagaagattacaatggctattagtgctacatttggtcaaatgtaatcacttaaatagcttcttgtcaccttaaactaaagcagaataaaaagtatcctttgaaattat

SEQ ID NO: 12083 - protein, 1332 aa, Homo sapiens
MRNLKLFRTLEFRDIQGPGNPQCFSLRTEQGTVLIGSEHGLIEVDPVSREVKNEVSLVAEGFLPEDGSGRIVGVQDLLDQESVCVATASGDVILCSLSTQQLECVGSVASGISVMSWSPDQELVLLATGQQTLIMMTKDFEPILEQQIHQDDFGESKFITVGWGRKETQFHGSEGRQAAFQMQMHESALPWDDHRPQVTWRGDGQFFAVSVVCPETGARKVRVWNREFALQSTSEPVAGLGPALAWKPSGSLIASTQDKPNQQDIVFFEKNGLLHGHFTLPFLKDEVKVNDLLWNADSSVLAVWLEDLQREESSIPKTCVQLWTVGNYHWYLKQSLSFSTCGKSKIVSLMWDPVTPYRLHVLCQGWHYLAYDWHWTTDRSVGDNSSDLSNVAVIDGNRVLVTVFRQTVVPPPMCTYQLLFPHPVNQVTFLAHPQKSNDLAVLDASNQISVYKCGDCPSADPTVKLGAVGGSGFKVCLRTPHLEKRYKIQFENNEDQDVNPLKLGLLTWIEEDVFLAVSHSEFSPRSVIHHLTAASSEMDEEHGQLNVSSSAAVDGVIISLCCNSKTKSVVLQLADGQIFKYLWESPSLAIKPWKNSGGFPVRFPYPCTQTELAMIGEEECVLGLTDRCRFFINDIEVASNITSFAVYDEFLLLTTHSHTCQCFCLRDASFKTLQAGLSSNHVSHGEVLRKVERGSRIVTVVPQDTKLVLQMPRGNLEVVHHRALVLAQIRKWLDKLMFKEAFECMRKLRINLNLIYDHNPKVFLGNVETFIKQIDSVNHINLFFTELKEEDVTKTMYPAPVTSSVYLSRDPDGNKIDLVCDAMRAVMESINPHKYCLSILTSHVKKTTPELEIVLQKVHELQGNAPSDPDAVSAEEALKYLLHLVDVNELYDHSLGTYDFDLVLMVAEKSQKDPKEYLPFLNTLKKMETNYQRFTIDKYLKRYEKAIGHLSKCGPEYFPECLNLIKDKNLYNEALKLYSPSSQQYQDISIAYGEHLMQEHMYEPAGLMFARCGAHEKALSAFLTCGNWKQALCVAAQLNFTKDQLVGLGRTLAGKLVEQRKHIDAAMVLEECAQDYEEAVLLLLEGAAWEEALRLVYKYNRLDIIETNVKPSILEAQKNYMAFLDSQTATFSRHKKRLLVVRELKEQAQQAGLDDEVPHGQESDLFSETSSVVSGSEMSGKYSHSNSRISARSSKNRRKAERKKHSLKEGSPLEDLALLEALSEVVQNTENLKDEVYHILKVLFLFEFDEQGRELQKAFEDTLQLMERSLPEIWTLTYQQNSATPVLGPNSTANSIMASYQQQKTSVPVLDAELFIPPKINRRTQWKLSLLD

SEQ ID NO: 12084 - DNA, 2480 bp, Homo sapiens
  CDS (402)..(1115)
atgcggtcccgggttctgtggggcgccgcccggtggctctggccccgccgggccgttggcccagcccgccggcccctgagctccggtagcccgccgctggaggagctgttcgcccggggcgggcccttgcggaccttcctcgagcgccaggcggggtctgaagcccatttgaaggtcaggaggcccgagttgctggcggtgatcaaactgctgaacgagaaggagcaggagctgcgggagactgagcacttgctgcacgatgagaatgaagatttaaggaaacttgcagagaatgaaatcactttgtgtcaaaaagaaataactcagctgaagcatcagaagaaacagatgaaaatgatttgatcctggaagtaactgcaggagttggaggtcaggaggcaatgttgtttacatcagagatatttgatatgtatcagcaatatgctgcatttaaaagatggcattttgaaaccctggaatattttccaagtgaactaggtggccttagacatgcatctgccagcattgggggttcagaagcctataggcacatgaaatttgaaggaggtgttcacagagtacaaagagtgccaaagacagaaaagcaaggccgcgtccatactagcaccatgactgtagcaatattaccccagcctactgagattaatctggtgattaatccgaaagatttgagaattgacactaagcgagccagtggagctggggggcagcatgtaaataccacggacagtgctgtccggatagttcatcttccaacaggtgttgtttctgaatgtcaacaagagagatctcagctgaaaaataaagagctggctatgacaaagttacgtgcaaaactgtacagcatgcatctagaagaagaaataaataaaagacagaatgctagaaaaattcagattggaagtaaaggaagatcagagaaaataagaacatataattttccacagaaccgggtcacagatcacagaataaacaagacgctgcatgatcttgaaacttttatgcaaggagattatctactggatgaacttgtacagtcattgaaggaatacgccgattatgaatctttagtagaaattatttcccaaaaagtttaagttgatttgttatttatagactttcgtagcttagaaaaattctacagtacatccacatagggtgaaagtacccttactctcttgaaaaacgttgagttaacacagttggaggtaatatgcatattctgaagtcatagataatttacacagatctctctcaatgcattagcaaaaatcatacaatatacagatggtcctcgatttacattgtggttaattcccaataaacccatcataagttaaaaatgcatataacgttagcaacacagcagtctcctaattaatgacagcttgacttaacaattttccaactttaccatggtgtgaaagaggtatgattcctaagccctaaggagctcctcagcttgaaatggggctgcatccctataaacccatcataaagtcaaaaaatcctaaaacataagttggtgaccatctgtaatcatgatgtggtggtaaatcttggacgctaccttacaataactagacaaaggaaaatcatcctttgtcctgttctgtgtaaatatttaatgaatgatcaaaacttcagtttaaatattatgaaaaactttaaacataaagtagtagaaataagacagtaaatactgtatcctaatatccagtcgggatacagaaaccataccattaacttgaacagggataattttaatataaaaaactgttaactgataatggtactaacttttaagagggatgaaagagagctatgatgtcctaggactgagagtaccccaggaaagaatacccttgaaagggtctccccttccccatggtgaagtcaggcctaatggagagagtggctacagcctactcagtgattgggaaattccctgtcttgccctgggccagagctggtgtaccgctggtggatcaggtcttacaagcaaagaacctcacactcccaactggtaagccagaagcctcttgctagggtgtgagcaaaacttggacaggaactctcagtagatgtttgtgtttgtcaagattctccagacaaacttccttaaaaggattggcttgtgttgttattattaagtctaacaagtccaaaagctggagtgtgaggcaggaggctggaaacccaggaaagctgatggtgcaaggtccagtccaaaggtatctgttggaggattctcttgttctgggaagaggacggtctttttttctcttcagaccttcacctgactggatcaagcccactaacatcgaggaggacagtctgcattactcagagttcactgattgatttaaatgtcaatctcatataaaacaccctcacagaaacacctagaataatgtttgaccttataattggaaaatcagagcaaaagttaaatctct

SEQ ID NO: 12085 - protein, 238 aa, Homo sapiens
MLFTSEIFDMYQQYAAFKRWHFETLEYFPSELGGLRHASASIGGSEAYRHMKFEGGVHRVQRVPKTEKQGRVHTSTMTVAILPQPTEINLVINPKDLRIDTKRASGAGGQHVNTTDSAVRIVHLPTGVVSECQQERSQLKNKELAMTKLRAKLYSMHLEEEINKRQNARKIQIGSKGRSEKIRTYNFPQNRVTDHRINKTLHDLETFMQGDYLLDELVQSLKEYADYESLVEIISQKV

SEQ ID NO: 12086 - DNA, 2683 bp, Homo sapiens
  CDS (129)..(2513)
ctcttccggtctccggccgccccttacctgcaggctcttctcccgccgcggcccggcgctctccgagtcgcccctgcggactggtctcgcacagtgcctgggcaccgggcgccagacagacactggccatgacgagcggcgcaaccaggtaccggctgagctgctcgctccggggccacgagctggacgtacggggcctggtgtgctgcgcctatccgccgggagcctttgtgtccgtgtcccgagaccgcaccacccgcctctgggccccagacagtccaaacaggagctttacagaaatgcactgtatgagtggccattccaattttgtatcttgtgtatgcatcataccctcaagtgacatctaccctcatggcctaattgccaccggtggaaatgaccacaatatatgcattttctcactggacagtccaatgccactttatattctaaaaggccacaaaaatactgtttgtagtctatcatctggaaaatttgggacattacttagtggttcatgggacaccactgctaaagtctggctgaatgacaagtgcatgatgaccttgcagggtcatacagctgcagtgtgggcggtaaagatcttacctgaacagggcttaatgttgactggatcagcaggcaagactgttaaactgtggaaggctggaagatgtgagaggactttttcagggcatgaagactgtgtaagaggtttggcaattttgagtgaaacagaatttctttcctgtgcaaatgatgctagtattagaaggtggcaaatcactggcgagtgtcttgaagtatattatggacatacaaattatatttatagcatatccgtttttccaaattgtagagactttgtgacaacagcagaggacagatctctgagaatctggaaacatggggaatgtgctcaaactatccgacttccagctcagtctatatggtgctgctgtgtgctcgacaatggtgacattgtggttggtgcgagtgatggcattattagagtgtttacagaatcagaagatcgaacagcaagtgctgaagaaatcaaggcttttgaaaaagaactgtctcacgcaaccattgattctaaaactggcgatttaggggacatcaatgctgagcagcttcctgggagggaacatcttaatgaacctggtactagagaaggacagactcgtctaatcagagatggggagaaagtcgaagcctatcagtggagtgttagtgaagggaggtggataaaaattggtgatgttgttggctcatctggtgctaatcagcaaacatctggaaaagttttatatgaagggaaagaatttgattatgttttctcaattgatgtcaatgaaggtggaccatcatataaattgccatataataccagtgatgacccttggttaactgcatacaacttcttacagaagaatgatttgaatcctatgtttctggatcaagtagctaaatttattattgataacacaaaaggtcaaatgttgggacttgggaatcccagcttttcagatccatttacaggtggtggtcggtatgttccgggctcttcgggatcttctaacacactacccacagcagatccttttacaggtgctggtcgttatgtaccaggttctgcaagtatgggaactaccatggccggagttgatccatttacagggaatagtgcctaccgatcagctgcatctaaaacaatgaatatttatttccctaaaaaagaggctgtcacatttgaccaagcaaaccctacacaaatattaggtaaactgaaggaacttaatggaactgcacctgaagagaagaagttaactgaggatgacttgatacttcttgagaagatactgtctctaatatgtaatagttcttcagaaaaacccacagtccagcaacttcagattttgtggaaagctattaactgtcctgaagatattgtctttcctgcacttgacattcttcggttgtcaattaaacaccccagtgtgaatgagaacttctgcaatgaaaaggaaggggctcagttcagcagtcatcttatcaatcttctgaaccctaaaggaaagccagcaaaccagctgcttgctctcaggactttttgcaattgttttgttggccaggcaggacaaaaactcatgatgtcccagagggaatcactgatgtcccatgcaatagaactgaaatcagggagcaataagaacattcacattgctctggctacattggccctgaactattctgtttgttttcataaagaccataacattgaagggaaagcccaatgtttgtcactaattagcacaatcttggaagtagtacaagacctagaagccacttttagacttcttgtggctcttggaacacttatcagtgatgattcaaatgctgtacaattagccaagtctttaggtgttgattctcaaataaaaaagtattcctcagtatcagaaccagctaaagtaagtgaatgctgtagatttatcctaaatttgctgtagcagtggggaagagggacggatatttttaattgattagtgtttttttcctcacatttgacatgactgataacagataattaaaaaaagagaatacggtggattaagtaaaattttacatcttgtaaagtggtggggaggggaaacagaaataaaatttttgcactgct

SEQ ID NO: 12087 - protein, 795 aa, Homo sapiens [sequence omitted]

SEQ ID NO: 12088 - DNA, 2719 bp, Homo sapiens
  CDS (169)..(642)
gagcctaccaaacctttggttcgcagggctggagctaagtctcgctccaggagaaagaagcagaagaagaactccaggcaggaagcagtgccctggaaaaaacccaaaggcatcaattccaacagcacagctaacttggaggatcctgaggtgggtgatgctgaaagcatggcgatctcagagccgatcaagggcagcagaaagccctgtgtgaataaggaggagttggctttgaagaagcccatggcgaaatgtgcctggaagggtcccagagagccacctcaggatgcccgggcagaagccgagagcccaggaggcgcctctgagtcagaccaagatggtggccatgaaagcccaccaaagaagaaggccgtggcctgggtgtctgccaagaaccccgctcccatgaggaagaagaagaaggtgagcttgggccctgtctcctacgtcttggttgactcagaagatggcaggaagaagccggtgatgccaaagaaagggccaggctcaagaagggaggcatcagatcagaaggcccctcggggccagcagcctgccgaggcaacagcctcaacctctaggggtccgaaggccaagccagaaggctctcctcggcgtgccaccaatgaatccagaaaggtttgatctgggggaccacccatactgaggagttgaaagaacaaggaagacgtaccaagtcaaccaagttctctcttgtcactgaataagactttggactctcttagggcccctgttgatagagatctggccctgaggtaaacgataggtgaggtcttgggtgggagggagttggggaagggaggtggatctctatgcccttttctctaccaggcctgccgtttcaccgccttctctactcaccttctcttcggaggcaggagagttggtaagaggattgggaaaattctagaacattcattcccctttatgcatgagcagggtcactgttacactcatccatgttcagcttttctcccccacgccttgctccctcctcggaatggtcagcgacctctgcaggccctggcatttggaagagctgggtggccctgccatattcttcctcccgccttcctcttgtgtaaccagcggggtaagttaagccaggaccttcgctgcaaacctggttttattgctccttcagtctccagcttccatcctccagttatctagccaggaggtcccaagagttagttttagggaaaaagaatgtctgcctagacctcaaagtctttgagttttagagtctgttagtaaaaatggcactttgattcccatttgggatgagccctctcaggaatcctgtggggaaggggggtgattatagggaaggacgcaggcattcctaggtccccagctctaattccatccatctacccaactgtcaccatctttgcaccaaactgtcaccatctttgcagcagaaggtcactactcacattatagtaagaggggaaaaaaatcttttaaaacttggctgttggccgggcacggtggctcacgcctgtaatcccagcactttgggaggctgaggcaggtcgatcacgaggtcaggcgtttaagaccagcttgaccaacatggtgaaaccccatctctacaaaaattagctgggcgtggtggcgcgcgcctgtaatcccagctactcaggaggctgaggcggatgaattgcttgaatccaggaggcagaggttgcaatgagccaagattgtgccacggcactccagcctgggcagcagagtgagactctctctcaaaaaaacaaaacttggctgttaatgtctgccctctgaattcagacacactatattagaccagaccaccatgtgtcattgtgtgtgtgtgtgtgtgtgtgtgtgtttgcgtgcgcatgtgtagaggagagagcagggtccctgagataatggtttccaaactgtatcgtagccgtccacaaagatgtaatccaaatctatttttctcacgtgtttaaaaaactgaaaagtgactactcagatatgttggaagtcacatcgaagactatcagaatattaccttgtgttcataggttaacttgtttttgtacacgtcttagttatttcaggcatctctttgcttaaaattgagtttcttgtaaatgtgactgatgagcgaggttagaagtggaagaaattcctgtgcatgttctataatctgacaccctgaaagcaagtttcctttcgtcattcacatgctcttgttctgccgtgactgttcaggtgtatggtagtaagtaaatgtattaacatggtgaacagtagtaatattctatcatagagtattagcccttgcaagttttcagggcgtcttttccgacttcagtttttgtgataaagaatgtgaacagttgttagatgttctcagtgattcaactttaaaacaaatttctcgtgatgattcatttcaaaatcctgagtgagtctgactgaaaaatacgagagaaaagagagtggtttccgtttgcagctacacagctgtgtgcatcgacgttctcctggggtgtgtgccaagcgaaacccaggggtgaattggattcttgaagagaccaaagcctgtaactgtccagcttctaatttcaaaacgggtccattagggcttcgttgtgttaacaagttgacaccatgactagtaaatgtaaacgtgtatgtataaaataaagtttagcaaattaagtgtcctgtt

SEQ ID NO: 12089 - protein, 158 aa, Homo sapiens
MAISEPIKGSRKPCVNKEELALKKPMAKCAWKGPREPPQDARAEAESPGGASESDQDGGHESPPKKKAVAWVSAKNPAPMRKKKKVSLGPVSYVLVDSEDGRKKPVMPKKGPGSRREASDQKAPRGQQPAEATASTSRGPKAKPEGSPRRATNESRKV

SEQ ID NO: 12090 - DNA, 2643 bp, Homo sapiens
  CDS (83)..(1336)
ctcggctttgtgcggcggtggagctctacccttctccaaaagaagagccaagagaaggtccttttctacaaatatcagagccatggctcaggagtcagtgatgttcagtgatgtgtccgtagacttctctcaggaggagtgggaatgcctgaatgatgatcagagagatttatacagagatgtgatgttggagaattacagcaacctggtttcaatggggcattctatttctaaaccaaatgtgatctcctacttggagcaagggaaggagccctggttggctgacagagagctaacaagaggccagtggccagtcctggaatcaagatgtgagaccaagaaattatttctgaagaaagaaatttatgaaatagaatcaacccagtgggaaataatggaaaaactcacaagacgtgattttcagtgctccagtttcagagatgattgggaatgtaataggcagtttaagaaagaactcggctctcaggggggacatttcaatcaattggtattcactcatgaagatctgcccactttgagtcaccatccatccttcacattacagcaaatcattaacagtaaaaagaaattctgtgcatctaaagaatataggaaaacctttagacatggctcacagtttgctacacatgagataattcataccattgagaagccttatgaatgtaaggaatgtggaaagtcctttagacatccctcaagactcactcatcatcagaaaattcatactggcaagaaaccctttgaatgtaaggaatgtggaaaaacctttatttgtggctcagaccttactcgacatcacagaattcacactggtgagaaaccctatgaatgtaaggaatgtgggaaagcctttagtagtggttcaaacttcactcgacatcagagaattcacacaggtgagaagccttatgaatgcaaagaatgcgggaaggcctttagtagtggctcaaactttactcaacatcagagaattcatactggggaaaaaccctatgaatgtaaggaatgtggcaatgcctttagtcagagctcacaacttattaaacatcaaagaatccatacaggtgagaaaccttacgaatgtaaggaatgtgaaaaggcttttcgttctggctcagaccttactagacatcagagaattcatactggggagaaaccctatgaatgtaagatatgtgggaaggcttattctcagagttcacagcttattagtcatcatagaattcatactagtgagaaaccctatgaatatagggaatgtggaaagaactttaattatgacccacaacttattcagcatcaaaatttgtactggtgatgaaacagaatatatgaaatgtgtagggaggcttttaattatggctcaaaacagaatttatcttgttaataattcctctagatagaataatgtagaaacattttatttgtggactacagcttattcagcctgggaaaaataatgttggagaaatactctatgaatagaatatactttggaagcccttaactaaacgcttacttctcttgacatcagataattcagtctagcaatatgatagataattcagtctgtcatactgaaaatgacagcacttttaacacctttctaaccttcttaacgtcaaagaatttttgtagaaatgtagtcctgtgattgtcattttttcccctaatttctctaattgttacattcttagtattttaatccatattaaatttatatggctataaatttcatctgtttacatcctgatttgtatactattttaaaaatacctttagtacctgggagaagtgacctctttatttttgaagatggcttattcttttgttctttataacattaaggctttcttattgtaaaaatgttcatgaacgacattttactcaatagagattcttcattatcttcatggtgttttgttgtgttactgtaatatcacttatgaaatcctattggtggatatcgtagtctcctctagatattttgccataatacatgccaaaatacaagtccctgctggacattctccctaagcacatctttgtatcatatcttttaattgcagaagtaatgtgtgaatatattttccttataaaagatgcaaacattacaaaaaggcaaatgtaccctttgaccatatcccaaaggatagtctttatcagttcattatttattgctgatcatttttctgttcatatatacatgcgtgtctcagtaaaaattataaaatgggggataattataatacctacctcataatgctttgtgaggattaaatgaattaagatcgataaagtgcttagaattgtgcctgacatgataaatacatactcactgaatgttagtcatcgttattatattcatcatcatcagtattattatttgtagaaaggctttttaacttctgcagaacttagtcaccattaggcagggtgtttgactgaagaaagaccctttgaaggtaacaagttaagaaaatttcccatcatcatgtacttactattgaacatgaaataatcctaggtgttgggggggaaagtactgtgaataatgtgtgtgaaggactttattccgactaatactctttttgtcgcattttatacccagtaaaaaaaaat

SEQ ID NO: 12091 - protein, 418 aa, Homo sapiens
MAQESVMFSDVSVDFSQEEWECLNDDQRDLYRDVMLENYSNLVSMGHSISKPNVISYLEQGKEPWLADRELTRGQWPVLESRCETKKLFLKKEIYEIESTQWEIMEKLTRRDFQCSSFRDDWECNRQFKKELGSQGGHFNQLVFTHEDLPTLSHHPSFTLQQIINSKKKFCASKEYRKTFRHGSQFATHEIIHTIEKPYECKECGKSFRHPSRLTHHQKIHTGKKPFECKECGKTFICGSDLTRHHRIHTGEKPYECKECGKAFSSGSNFTRHQRIHTGEKPYECKECGKAFSSGSNFTQHQRIHTGEKPYECKECGNAFSQSSQLIKHQRIHTGEKPYECKECEKAFRSGSDLTRHQRIHTGEKPYECKICGKAYSQSSQLISHHRIHTSEKPYEYRECGKNFNYDPQLIQHQNLYW

SEQ ID NO: 12092 - DNA, 2642 bp, Homo sapiens
  CDS (10)..(2328)
actttcaaaatggcggagtgtggagcgagcggcagcgggagcagcggggacagtctggacaagagcatcacgctgccccccgacgagatcttccgcaacctggagaacgccaagcgcttcgccatcgacataggcgggtcgttaaccaagctggcctactattcaacggtacagcacaaagtcgccaaggtgcggtctttcgaccactccggaaaggacacagaacgtgaacatgagccgccctatgagatttcagttcaagaagagatcactgctcgactgcacttcattaagtttgagaatacctacatcgaagcctgcctggacttcatcaaagaccatctcgtcaacacagagaccaaggtcatccaggcgaccgggggcggggcctacaagttcaaggacctcatcgaagagaagctgcggctgaaagtcgacaaggaggacgtgatgacgtgcctgattaaggggtgcaacttcgtgctcaagaacatcccccatgaggccttcgtgtaccagaaggattccgaccctgagttccggttccagaccaaccacccccacattttcccctatcttcttgtcaatatcggctctggagtctccatcgtgaaggtggagacggaggacaggttcgagtgggtcggcggcagctccattggaggcggcaccttctgggggcttggcgctctgctcaccaaaacgaagaagtttgacgagctcctgcacctggcctcgaggggccagcacagcaatgtggacatgctggtgcgggacgtctacggcggcgcccaccagactctcgggctgagcgggaacctcatcgccagcagcttcgggaagtcggccaccgccgaccaagagttctccaaagaagacatggcgaagagcctgctgcacatgatcagcaacgacattgggcagctggcctgcctccacgcacggctgcacagcctggaccgcgtgtactttggaggcttctttatccggggccaccccgtgaccatgcgcaccatcacctatagcatcaacttcttctccaagggggaagtgcaggcgctgtttctgaggcacgaaggctacctgggagccatcggagcgttcctgaaaggagctgagcaggacaatcctaaccagtacagctggggagagaactatgcaggcagctccgggctgatgagtgcatcacccgagctcggcccggcgcagcgggcgcggagtggcacttttgacttgctggaaatggaccggctggagaggccactggttgacctgccgctcctcctggacccgccctcctacgtgcccgacacggtggacctcaccgatgacgctctggcccgaaaatactggctcacctgctttgaggaggccctggacggggtagtgaagcgcgcagtggcgagccagccagactctgtggatgcagccgagagggcggagaagttccggcagaagtactggaacaagcttcagaccctgaggcagcagcccttcgcctatgggaccctgaccgtgcgcagcctgctggacaccagggagcactgtctgaacgagttcaacttcccggatccctactccaaagtgaagcagcgggagaatggcgtggcgctgaggtgcttccccggggtcgtgcgctccctggacgcgctgggctgggaggaacggcagctggcgctggtgaaaggcctcctggcggggaatgtcttcgactggggggccaaagccgtgtctgctgtccttgaatccgacccctactttgggtttgaagaagcaaagaggaagttacaagaaagaccctggctcgtggattcctacagcgagtggcttcagagattaaaggggccccctcataaatgtgccttaattttcgcagataacagtggaatagacatcattttgggagtcttcccctttgtcagggagctactccttagagggacagaggtcatcctggcgtgcaactcaggccccgccctgaacgacgtgacccacagcgagtccctcatcgtggcagagcgtattgcgggcatggaccctgtcgtgcactctgcgctccaggaagagaggctgctgctggtgcagacgggctccagctccccgtgcctcgacctcagccgcctggataaggggctggccgcactggtgcgggagcgtggcgcggatctggtggtcatcgagggcatgggccgtgctgtccacacaaactaccacgcagccctgcgctgcgagagcctcaagctggccgtcatcaagaacgcgtggctggccgagcggctgggcggccggctcttcagcgtcatcttcaagtacgaggtcccagccgagtgaggcgctgcagctgccggactcttctgcttgtcacttgtcaggaatgtgtttttaccaccacagggaaactgcgttcaaatcaacgtatttatatggtactgctgtgacgcggcacatacaccccagccgcacagatgcgtgtgacccagaggcgagacgcagctttgtcctgggagacgttcatattggaatctatttaactgctaaagaaccttttatatatatatatatataaatagagagatctatacaggtatgtctgacgggacgcagcaccgtgggcacgcaccaaatagagtttttaaaagagg

SEQ ID NO: 12093 - protein, 773 aa, Homo sapiens
MAECGASGSGSSGDSLDKSITLPPDEIFRNLENAKRFAIDIGGSLTKLAYYSTVQHKVAKVRSFDHSGKDTEREHEPPYEISVQEEITARLHFIKFENTYIEACLDFIKDHLVNTETKVIQATGGGAYKFKDLIEEKLRLKVDKEDVMTCLIKGCNFVLKNIPHEAFVYQKDSDPEFRFQTNHPHIFPYLLVNIGSGVSIVKVETEDRFEWVGGSSIGGGTFWGLGALLTKTKKFDELLHLASRGQHSNVDMLVRDVYGGAHQTLGLSGNLIASSFGKSATADQEFSKEDMAKSLLHMISNDIGQLACLHARLHSLDRVYFGGFFIRGHPVTMRTITYSINFFSKGEVQALFLRHEGYLGAIGAFLKGAEQDNPNQYSWGENYAGSSGLMSASPELGPAQRARSGTFDLLEMDRLERPLVDLPLLLDPPSYVPDTVDLTDDALARKYWLTCFEEALDGVVKRAVASQPDSVDAAERAEKFRQKYWNKLQTLRQQPFAYGTLTVRSLLDTREHCLNEFNFPDPYSKVKQRENGVALRCFPGVVRSLDALGWEERQLALVKGLLAGNVFDWGAKAVSAVLESDPYFGFEEAKRKLQERPWLVDSYSEWLQRLKGPPHKCALIFADNSGIDIILGVFPFVRELLLRGTEVILACNSGPALNDVTHSESLIVAERIAGMDPVVHSALQEERLLLVQTGSSSPCLDLSRLDKGLAALVRERGADLVVIEGMGRAVHTNYHAALRCESLKLAVIKNAWLAERLGGRLFSVIFKYEVPAE

SEQ ID NO: 12094 - DNA, 1885 bp, Homo sapiens
  CDS (83)..(1816)
ggaagaacccgcagcagctcccaggatgaactggttgcagtggctgctgctgctgcgggggcgctgagaggacacgagctctatgcctttccggctgctcatcccgctcggcctcctgtgcgcgctgctgcctcagcaccatggtgcgccaggtcccgacggctccgcgccagatcccgcccactacagggagcgagtcaaggccatgttctaccacgcctacgacagctacctggagaatgcctttcccttcgatgagctgcgacctctcacctgtgacgggcacgacacctggggcagtttctctctgactctaattgatgcactggacaccttgctgattttggggaatgtctcagaattccaaagagtggttgaagtgctccaggacagcgtggactttgatattgatgtgaacgcctctgtgtttgaaacaaacattcgagtggtaggaggactcctgtctgctcatctgctctccaagaaggctggggtggaagtagaggctggatggccctgttccgggcctctcctgagaatggctgaggaggcggcccgaaaactcctcccagcctttcagacccccactggcatgccatatggaacagtgaacttacttcatggcgtgaacccaggagagacccctgtcacctgtacggcagggattgggaccttcattgttgaatttgccaccctgagcagcctcactggtgacccggtgttcgaagatgtggccagagtggctttgatgcgcctctgggagagccggtcagatatcgggctggtcggcaaccacattgatgtgctcactggcaagtgggtggcccaggacgcaggcatcggggctggcgtggactcctactttgagtacttggtgaaaggagccatcctgcttcaggataagaagctcatggccatgttcctagagtataacaaagccatccggaactacacccgcttcgatgactggtacctgtgggttcagatgtacaaggggactgtgtccatgccagtcttccagtccttggaggcctactggcctggtcttcagagcctcattggagacattgacaatgccatgaggaccttcctcaactactacactgtatggaagcagtttggggggctcccggaattctacaacattcctcagggatacacagtggagaagcgagagggctacccacttcggccagaacttattgaaagcgcaatgtacctctaccgtgccacgggggatcccaccctcctagaactcggaagagatgctgtggaatccattgaaaaaatcagcaaggtggagtgcggatttgcaacaatcaaagatctgcgagaccacaagctggacaaccgcatggagtcgttcttcctggccgagactgtgaaatacctctacctcctgtttgacccaaccaacttcatccacaacaatgggtccaccttcgacacggtgatcaccccctatggggagtgcatcctgggggctggggggtacatcttcaacacagaagctcaccccatcgaccctgccgccctgcactgctgccagaggctgaaggaagagcagtgggaggtggaggacttgatgagggaattctactctctcaaacggtgcaggtcgaaatttcagaaaaacactgttagttcggggccatgggaacctccagcaaggccaggaacactcttctcaccagaaaaccatgaccaggcaagggagaggaagcctgccaaacagaaggtcccacttctcagctgccccagtcagcccttcacctccaagttggcattactgggacaggttttcctagactcctcataaccactggataatttttttatttttatttttttgaggctaaactataataaattgcttttggctatc

SEQ ID NO: 12095 - protein, 578 aa, Homo sapiens
MPFRLLIPLGLLCALLPQHHGAPGPDGSAPDPAHYRERVKAMFYHAYDSYLENAFPFDELRPLTCDGHDTWGSFSLTLIDALDTLLILGNVSEFQRVVEVLQDSVDFDIDVNASVFETNIRVVGGLLSAHLLSKKAGVEVEAGWPCSGPLLRMAEEAARKLLPAFQTPTGMPYGTVNLLHGVNPGETPVTCTAGIGTFIVEFATLSSLTGDPVFEDVARVALMRLWESRSDIGLVGNHIDVLTGKWVAQDAGIGAGVDSYFEYLVKGAILLQDKKLMAMFLEYNKAIRNYTRFDDWYLWVQMYKGTVSMPVFQSLEAYWPGLQSLIGDIDNAMRTFLNYYTVWKQFGGLPEFYNIPQGYTVEKREGYPLRPELIESAMYLYRATGDPTLLELGRDAVESIEKISKVECGFATIKDLRDHKLDNRMESFFLAETVKYLYLLFDPTNFIHNNGSTFDTVITPYGECILGAGGYIFNTEAHPIDPAALHCCQRLKEEQWEVEDLMREFYSLKRCRSKFQKNTVSSGPWEPPARPGTLFSPENHDQARERKPAKQKVPLLSCPSQPFTSKLALLGQVFLDSS

SEQ ID NO: 12096 - DNA, 3992 bp, Homo sapiens
acttactgagaacattaaagggaaatgataaactcgtggtggggatatggcagacaggtgcttgtttgtttgagagaagtagcagaagagataaaatacaaagtgctatatgtttcagctggagaggaaagagagagaatttattagattatatacttgtcccatggcataccacgtatatgtttaaatagggacacatctccctatgtttaactatacttataaacaactttgatacacattgcgtcttttattctgtcacctgatattttagtgtatctcaagttacagattacatgtgtccttaaactatttctgaatttggacttagttccatatacagaaagaactttagaaaattcattaatttggatcttctattgatagccataaatattatgtttatgtattctaaaacctctttgtttagttagtactgttcatgaatgtaacaagcttcaatttctcatttgtgagtagtacatttgctttttgtttgtttgtttgtttgtttttgagatggagtctcacgctgtcaccaggctggagtgcagtggcgcgatttcagctcactgcaacctccacctcccaggtgcaagtgatgcccctgcctcagcctcccgagtagctgggactacagacacccgccaccacacctggctaatttttgtatttttagtagagacggggtttcaccatgttggctaggctggtctcaaactcttgacctcgtgatttgcccgcctctgcctccccaaagtgctgggattacaggcgtgagccaccacgcccagccgtacatttactttttaaagcagcagactaggtacactaattctcactcaaatattttcatgggaatgtagttatcaccaagtcctaaagtattatttatgccaaaaaaaatttcattttaaggactacaaaaatgattctaattaaacattttataatcaatagtaggttgggtctttagccattatatgtgtatatatacagacacatatgtatacacttacattttgacagggtcttcattgagtcttgatgcactttaaacccagctggctaccagagatgcgaaggtgggctctttgaagattagcaaaatggacgtttctgtcacttgagaaaaggaaagttctttgcctttaaattacacagttttcatcatgcccacaatctatattattggctggttaaacagcactgccctattagcaatgttaataaaaatgaaattatttattggcggttatagattatctaattcaggaaatttctgagctcaacttttacagcaactgttatgccttctaatttagcaattgagttatgagtaagttttgtgcttaactcctagaccctattgttgataaccagatcaaatatagtctgtacagaggaaaacactgggaacatttagtatttctaaagcctcctttggagttactactgattgtaatttggaactgataataggtagagattgctaacactgttttttttcctggatcttttttatgccagaaattaaacaggttctgctaactcttttttttctcttggttatcaccagaatgaaaatatttaaagtgatgactctagaaaagccatctgtgcctggttaacattgagtttgagtctcttcaatatatattgatcatgtattgattaatctttattttttcatattttggctagacaaattcagatctatataatggaataccccttcttgagtgaactatactactaatctacatgattacatagtaaggaaaaaagaagaaataactgtaataggcatagtgtttgttgttggttgtcttgtcattcatgtgatactactcatttccaaaattcacacaaacttacatgaggtggattatttgttttgttcattatttagttcctatatgttttttctttagaaacagagtctcattctgtcacccaggctggagtccaatggggcggtcatagttcactgcagccttgaactctttggctcatgtgatcctcccatctcagcctcccacagcaggtgagactacaggtacatgccactgtgcctgactttttaatttttctgtagagacgaggtttcagtttgttgcccaagctgatcttgaactcctggtttcaagcgatcctcccacctcggcctcccaaagtagtgggatttcaggcatgaccacctggcctagttcctatacttttcttaattcttcagacttctcacatttagtatagtgcattcatttcatcttgctgtttattagcaccctttgtggccaagggaaataaaaggtggtaaaattcagttttcagtttagttcttgaaagctctgggaaatggaggaaacacaaaactatgaattaaactagggctgttgatttctgaacccccagataaatcagttgacccacattttcattttaggtgttaggtccaaattagcataatgtcttgcattattattaggttcagtgtgaaactttacagtgctgcatttgaagtttagtaactggttattattaatcatttgggaaaaatgaaaatgtgttgggactttctatgactaggcatttgttgattatttttcatgattgctttttgttttctcattgtgtaggatttgtgaacttgtatattacaggaaacaagatactttgtaaaatttactggggaaaatccatttggagtgcatgacatttgccaggataagaaagcagtaatatgtttgtattataaaattacaccctgccagaaaactttctttcctagtaaggtaaatgtagaagggacttttacagcatagtaagttgattaggagccaaaattttattccagtttttttttgaactaagaatgttttaaattctgtaatgaacttttatgtttacccattactcatgcattctttcacaatatgtttaatagcctgaggaaataggaaagctgtgaagctactaccattctttacttttaataagaataataggaaagaaaagtcaggtcagtaatccaaatccaaatatgtatactgcaaatgctcaagaagtcacattttttgataaattgtattgagtacagaagaacttatatgaatttattatctgttaataacttagttttgacaacagaataacatttggaaattgtgagaataatcaagctgtttttccattaacagtgtaaattcataacatgtccttcaaaaggtgatattctaagctgtcttaattgtctacggttgataacttttaaataaagtacaggactttctgaaagtgtttggcatgttatgctgccaaaaacaatctgtgttttgaaataccaattaatcagttaatttctgaagactttgtataggacttgatatatgagtcagaatctgtctgtactcattctgtacattgtaactttgaacacttatgaaaaactgtatctgttggtgtgttttgattagttagtgtagatttgtttgcgtatttgaattccgattttagtttaggaagactaaaagtagccatttttgtaaagttcatatgctatttttttaatgtcatttttgtttttaatatttatacaatagtgatgttactagtaaaaaatgtttatagataacacgtagagctattaactgttcaaaagcctacatgataggcatattttgtatttcgtgttgcactcgttctgtttcatattggactttttacatcccttttttagcaaaaaaaagagacacatttgaattctctttagcataaagctgtgcattggaaactatctgactgtatccatacggttagcaaaatactctttgccaccaaaggtaaatgaaactgtaaaatacctctggatatttgtgccaatgaacttttcttagcatattaggattaaagcaaaaataatcttttcagtatgtttcatctaggacttacaataaatgtttaaaccatgaaaacttaaaaaaaaaaaaaac

SEQ ID NO: 12097 - DNA, 3142 bp, Homo sapiens
  CDS (329)..(1351)
tgatattgaatatttcagaaaagatccaagaccattcttcaagtttgcaaaggaaatatatcctggacaattccagccatctctctgtcacaaattcatagccttgtcagataaggaaggaaaactacttcgcaactatacccagaacatagacacgctggaacaggttgcgggaatccaaaggataattcagtgtcatggttcctttgcaacagcatcttgcctgatttgtaaatacaaagttgactgtgaagctgtacgaggagatatttttaatcaggtagttcctcgatgtcctaggtgcccagctgatgaaccgcttgctatcatgaaaccagagattgtgttttttggtgaaaatttaccagaacagtttcatagagccatgaagtatgacaaagatgaagttgacctcctcattgttattgggtcttccctcaaagtaagaccagtagcactaattccaagttccataccccatgaagtgcctcagatattaattaatagagaacctttgcctcatctgcattttgatgtagagcttcttggagactgtgatgtcataattaatgaattgtgtcataggttaggtggtgaatatgccaaactttgctgtaaccctgtaaagctttcagaaattactgaaaaacctccacgaacacaaaaagaattggcttatttgtcagagttgccacccacacctcttcatgtttcagaagactcaagttcaccagaaagaacttcaccaccagattcttcagtgattgtcacacttttagaccaagcagctaagagtaatgatgatttagatgtgtctgaatcaaaaggttgtatggaagaaaaaccacaggaagtacaaacttctaggaatgttgaaagtattgctgaacagatggaaaatccggatttgaagaatgttggttctagtactggggagaaaaatgaaagaacttcagtggctggaacagtgggaaaatgctggcctaatagagtggcaaaggagcagattagtaggcggcttgatggtaatcagtatctgtttttgccaccaaatcgttacattttccatggcgctgaggtatattcagactctgaagatgacgtcttatcctctagttcttgtggcagtaacagtgatagtgggacatgccagagtccaagtttagaagaacccatggaggatgaaagtgaaattgaagaattctacaatggcttagaagatgagcctgatgttccagagagagctggaggagctggatttgggactgatggagatgatcaagaggcaattaatgaagctatatctgtgaaacaggaagtaacagacatgaactatccatcaaacaaatcatagtgtaataattgtgcaggtacaggaattgttccaccagcattaggaactttagcatgtcaaaatgaatgtttacttgtgaactcgatagagcaaggaaaccagaaaggtgtaatatttataggttggtaaaatagattgtttttcatggataatttttaacttcattatttctgtacttgtacaaactcaacactaactttttttttttttaaaaaaaaaaaggtactaagtatcttcaatcagctgttggtcaagactaacttttaaaggttcatttgtatgataaattcatatgtgtatatataattttttttgttttgtctagtgagtttcaacatttttaaagttttcaaaaagccatcggaatgttaaattaatgtaaagggaacagctaatctagaccaaagaatggtattttcacttttctttgtaacattgaatggtttgaagtactcaaaatctgttacgctaaacttttgattctttaacacaattatttttaaacactggcattttccaaaactgtggcagctaactttttaaaatctcaaatgacatgcagtgtgagtagaaggaagtcaacaatatgtggggagagcactcggttgtctttacttttaaaagtaatacttggtgctaagaatttcaggattattgtatttacgttcaaatgaagatggcttttgtacttcctgtggacatgtagtaatgtctatattggctcataaaactaacctgaaaaacaaataaatgctttggaaatgtttcagttgctttagaaacattagtgcctgcctggatccccttagttttgaaatatttgccattgttgtttaaatacctatcactgtggtagagcttgcattgatcttttccacaagtattaaactgccaaaatgtgaatatgcaaagcctttctgaatctataataatggtacttctactggggagagtgtaatattttggactgctgttttccattaatgaggagagcaacaggcccctgattatacagttccaaagtaataagatgttaattgtaattcagccagaaagtacatgtctcccattgggaggatttggtgttaaataccaaactgctagccctagtattatggagatgaacatgatgatgtaacttgtaatagcagaatagttaatgaatgaaactagttcttataatttatctttgtttaaaagcttagcctgccttaaaactagagatcaactttctcagctgcaaaagcttctagtctttcaagaagttcatactttatgaaattgcacagtaagcatttatttttcagaccatttttgaacatcactcctaaattaataaagtattcctctgttgctttagtatttattacaataaaaagggtttgaaatatagctgttctttatgcataaaacacccagctaggaccattactgccagagaaaaaaatcgtattgaatggccatttccctacttataagatgtctcaatctgaatttatttggctacactaaagaatgcagtatatttagttttccatttgcatgatgtttgtgtgctatagatgatattttaaattgaaaagtttgttttaaattatttttacagtgaagactgttttcagctctttttatattgtacatagtcttttatgtaatttactggcatatgttttgtagactgtttaatgactggatatcttccttcaacttttgaaatacaaaaccagtgttttttacttgtacactgttttaaagtctattaaaattgtcatttgacttttttctgtt

SEQ ID NO: 12098 - protein, 341 aa, Homo sapiens [sequence omitted]

SEQ ID NO: 12099 - DNA, 2639 bp, Homo sapiens
  CDS (79)..(2034)
gggagccgcaatgtctcttgacagcggcggcggcgcagccggttccgggttcggcgcggggcggggatgtgaatcccgatggagcggcccgaggaaggcaagcagtcgccgccgccgcagccctggggacggctcctgcgtctgggcgcggaggagggcgagccgcacgtcctcctgaggaagcgggagtggaccatcgggcggagacgaggttgcgacctttccttccccagcaataaactggtctctggagatcactgtagaattgtagtggatgaaaaatcaggtcaggtgacactggaagataccagcaccagtggaacagtgattaacaagctgaaggttgttaagaagcagacatgccctttacagactggggatgtcatctacttggtgtacaggaagaatgaaccggaacacaacgtggcatacctctatgaatctttaagtgaaaagcaaggcatgacacaagaatcctttgatacctcaggtgcaggtgcagggcgaggggccgatccccgggtccctccgtcgtcgcccgccactcaggtgtgctttgaggaaccacagccatcaacatcgacgtcagacctcttccccacagcctcggcctcttccacggagccttctcctgcagggcgagagcgttcctccagttgtgggtctgggggtggtggcatctcccctaaaggaagtggtccctctgtggcaagtgatgaagtctccagctttgcctcagctctcccagacagaaagactgcgtccttttcgtcgttggaaccccaggatcaggaggatttggagcccgtgaagaagaaaatgagaggagatggggaccttgacctgaacgggcagttgttggtcgcacaaccgcgtagaaatgcccaaaccgtccacgaggacgtcagagcagcggctgggaagccagacaagatggaggagacgctgacatgcatcatctgccaggacctgctgcacgactgcgtgagtttgcagccctgcatgcacacgttctgcgcggcttgctactcgggctggatggagcgctcgtccctgtgtcctacctgccgctgtcccgtggagcggatctgtaaaaaccacatcctcaacaacctcgtggaagcatacctcatccagcatccagacaagagtcgcagtgaagaagatgtgcaaagtatggatgccaggaataaaatcactcaagacatgctgcagcccaaagtcaggcggtctttttctgatgaagaagggagttcagaggacctgctggagctgtcagacgttgacagtgagtcctcagacattagccagccatacgtcgtgtgccggcagtgtcctgagtacagaaggcaggcggcgcagcctccccactgcccagcacccgagggcgagccaggagccccacaggccctgggggatgcaccctccacgtccgtcagcctgacgacagcagtccaggattacgtgtgccctctgcaaggaagccacgccctgtgcacctgctgcttccagcccatgcccgaccggagagcggagcgcgagcaggacccgcgtgtcgcccctcagcagtgtgcggtctgcctgcagcctttctgccacctgtactggggctgcacccggaccggctgctacggctgcctggccccgttttgtgagctcaacctgggtgacaagtgtctggacggcgtgctgaacaacaacagctacgagtcagacatcctgaagaattacctggcaaccagaggtttgacatggaaaaacatgttgaccgagagcctcgtggctctccagcggggagtgtttctgctgtctgattacagagtcacgggagacaccgttctgtgttactgctgtggcctgcgcagcttccgtgagctgacctatcagtatcggcagaacattcctgcttccgagttgccagtggccgtaacatcccgtcctgactgctactggggccgtaactgccgcactcaggtgaaagctcaccacgccatgaaattcaatcatatctgtgaacagacaaggttcaaaaactaagcatccagaggccctgagcagctttcagcactggaggtgaagagagcgtgtttttaaaatacagagacaagcacgtcaaggtgttttcacagccccctgagggaagggacgcagggtctccgacaggtgctctggggtgactcttctgtggagctttttaccctctgagtgagaccctccccagagccccgggggccgcagcccgccctcctggtgagcgctgggcagggctcgtggtggcatcagcagcagagacgaagcctttctgtaacatgcggccgtcccgccgagaggggcagttttgctcttttgtacattttccgaaactacagttaaagcagaagtctgttttcaggaaaagtttcaagggagaagggcaagtttatcaaaaacattgtttcaggagaagggagcataagtttacagcctacaggacgtacacaatatcctgctgctgggaaaaccacagcattttatctattttttattttaataggtttggtgcttatcttctaataagatttaaatgtcacaaactgtagcacaaataatataatttataatttacaaattgactaaaattgggtatagtatggtatttg

SEQ ID NO: 12100 - protein, 652 aa, Homo sapiens
MERPEEGKQSPPPQPWGRLLRLGAEEGEPHVLLRKREWTIGRRRGCDLSFPSNKLVSGDHCRIVVDEKSGQVTLEDTSTSGTVINKLKVVKKQTCPLQTGDVIYLVYRKNEPEHNVAYLYESLSEKQGMTQESFDTSGAGAGRGADPRVPPSSPATQVCFEEPQPSTSTSDLFPTASASSTEPSPAGRERSSSCGSGGGGISPKGSGPSVASDEVSSFASALPDRKTASFSSLEPQDQEDLEPVKKKMRGDGDLDLNGQLLVAQPRRNAQTVHEDVRAAAGKPDKMEETLTCIICQDLLHDCVSLQPCMHTFCAACYSGWMERSSLCPTCRCPVERICKNHILNNLVEAYLIQHPDKSRSEEDVQSMDARNKITQDMLQPKVRRSFSDEEGSSEDLLELSDVDSESSDISQPYVVCRQCPEYRRQAAQPPHCPAPEGEPGAPQALGDAPSTSVSLTTAVQDYVCPLQGSHALCTCCFQPMPDRRAEREQDPRVAPQQCAVCLQPFCHLYWGCTRTGCYGCLAPFCELNLGDKCLDGVLNNNSYESDILKNYLATRGLTWKNMLTESLVALQRGVFLLSDYRVTGDTVLCYCCGLRSFRELTYQYRQNIPASELPVAVTSRPDCYWGRNCRTQVKAHHAMKFNHICEQTRFKN

SEQ ID NO: 12101 - DNA, 3424 bp, Homo sapiens
  CDS (383)..(3424)
gtttggggacctgtttgaagaggagtattccactgtgtctaataatcagtatggaaaagggaagaaattaaagactaaagctttggagccacctgctcctagagaattcaccaatttaagcggaatcagaaatcagggtggaacctgttacctcaattcccttcttcagactcttcatttcacacctgaattcagagaagctctattttctcttggcccagaagagcttggtttgtttgaagataaggataaacccgatgcaaaggttcgaatcatccctttacagttacagcgcttgtttgctcagcttctgctcttagaccaggaagctgcatccacagcagacctcactgacagctttgggtggaccagtaatgaggaaatgaggcaacatgatgtgcaggaactgaatcgaatcctcttcagcgctttggaaacttctttagttgggacctccggtcatgacctcatctatcgtctgtaccatggaaccattgttaaccagattgtttgtaaagaatgtaagaacgttagcgagaggcaggaagacttcttagatctaacagtagcagtcaaaaatgtatccggtttggaagatgctctctggaacatgtatgtagaagaggaagtttttgattgtgacaacttgtaccactgtggaacttgtgacaggctggttaaagcagcaaagtcggccaaattacgtaagctgcctccttttcttactgtttcattactaagatttaattttgattttgtgaaatgcgaacgctacaaggaaactagctgttatacattccctctccggattaatctcaagcccttttgtgaacagagtgaattggatgacttagaatatatatatgacctcttctcagttattatacacaaaggtggctgctacggaggccattaccatgtatatattaaagatgttgatcatttgggaaactggcagtttcaagaggaaaaaagtaaaccagatgtgaatctgaaagatctccagagtgaagaagagattgatcatccactgatgattctaaaagcaatcttattagaggagaataatctaattcctgttgatcagctgggccagaaacttttgaaaaagataggaatatcttggaacaagaagtacagaaaacagcatggaccattgcggaagttcttacagctccattctcagatatttctactcagttcagatgaaagtacagttcgtctcttgaagaatagttctctccaggctgagtctgatttccaaaggaatgaccagcaaattttcaagatgcttcctccagaatccccaggtttaaacaatagcatctcctgtccccactggtttgatataaatgattctaaagtccagccaatcagggaaaaggatattgaacagcaatttcagggtaaagaaagtgcctacatgttgttttatcggaaatcccagttgcagagaccccctgaagctcgagctaatccaagatatggggttccatgtcatttactgaatgaaatggatgcagctaacattgaactgcaaaccaaaagggcagaatgtgattctgcaaacaatacttttgaattgcatcttcacctgggccctcagtatcatttcttcaatggggctctgcacccagtagtctctcaaacagaaagcgtgtgggatttgacctttgataaaagaaaaactttaggagatctccggcagtcaatatttcagctgttagaattttgggaaggagacatggttcttagtgttgcaaagcttgtaccagcaggacttcacatttaccagtcacttggcggggatgaactgacactgtgtgaaactgaaattgctgatggggaagacatctttgtgtggaatggggtggaggttggtggagtccacattcaaactggtattgactgcgaacctctacttttaaatgttcttcatctagacacaagcagtgatggagaaaagtgttgtcaggtgatagaatctccacatgtctttccagctaatgcagaagtgggcactgtcctcacagccttagcaatcccagcaggtgtcatcttcatcaacagtgctggatgtccaggtggggagggttggacggccatccccaaggaagacatgaggaagacgttcagggagcaagggctcagaaatggaagctcaattttaattcaggattctcatgatgataacagcttgttgaccaaggaagagaaatgggtcactagtatgaatgagattgactggctccacgttaaaaatttatgccagttagaatctgaagagaagcaagttaaaatatcagcaactgttaacacaatggtgtttgatattcgaattaaagccataaaggaattaaaattaatgaaggaactagctgacaacagctgtttgagacctattgatagaaatgggaagcttctttgtccagtgccggacagctatactttgaaggaagcagaattgaagatgggaagttcattgggactgtgtcttggaaaagcaccaagttcgtctcagttgttcctgttttttgcaatggggagtgacgttcaacctgggacagaaatggaaatcgtagtagaagaaacaatatctgtgagagattgtttaaagttaatgctgaagaaatctggcctacaaggagatgcctggcatttacgaaaaatggattggtgctatgaagctggagagcctttatgtgaagaagatgcaacactgaaagaacttctgatatgttctggagatactttgcttttaattgaaggacaacttcctcctctgggtttcctgaaggtgcccatctggtggtaccagcttcagggtccctcaggacactgggagagtcatcaggaccagaccaactgtacttcgtcttggggcagagtttggagagccacttccagccaaggtgcttctgggaacgagcctgcgcaagtttctctcctctacttgggagacatagagatctcagaagatgccacgctggcggagctgaagtctcaggccatgaccttgcctcctttcctggagttcggtgtcccgtccccagcccacctcagagcctggacggtggagaggaagcgcccaggcaggcttttacgaactgaccggcagccactcagggaatataaactaggacggagaattgagatctgcttagagccccttcagaaaggcgaaaacttgggcccccaggacgtgctgctgaggacacaggtgcgcatccctggtgagaggacctatgcccctgccctggacctggtgtggaacgcggcccagggtgggactgccggctccctgaggcagagagttgccgatttctatcgtcttcccgtggagaagattgaaattgccaaatactttcccgaaaagttcgagtggcttccgatatctagctggaaccaacaaataaccaagagg

SEQ ID NO: 12102 - protein, 1014 aa, Homo sapiens
MRQHDVQELNRILFSALETSLVGTSGHDLIYRLYHGTIVNQIVCKECKNVSERQEDFLDLTVAVKNVSGLEDALWNMYVEEEVFDCDNLYHCGTCDRLVKAAKSAKLRKLPPFLTVSLLRFNFDFVKCERYKETSCYTFPLRINLKPFCEQSELDDLEYIYDLFSVIIHKGGCYGGHYHVYIKDVDHLGNWQFQEEKSKPDVNLKDLQSEEEIDHPLMILKAILLEENNLIPVDQLGQKLLKKIGISWNKKYRKQHGPLRKFLQLHSQIFLLSSDESTVRLLKNSSLQAESDFQRNDQQIFKMLPPESPGLNNSISCPHWFDINDSKVQPIREKDIEQQFQGKESAYMLFYRKSQLQRPPEARANPRYGVPCHLLNEMDAANIELQTKRAECDSANNTFELHLHLGPQYHFFNGALHPVVSQTESVWDLTFDKRKTLGDLRQSIFQLLEFWEGDMVLSVAKLVPAGLHIYQSLGGDELTLCETEIADGEDIFVWNGVEVGGVHIQTGIDCEPLLLNVLHLDTSSDGEKCCQVIESPHVFPANAEVGTVLTALAIPAGVIFINSAGCPGGEGWTAIPKEDMRKTFREQGLRNGSSILIQDSHDDNSLLTKEEKWVTSMNEIDWLHVKNLCQLESEEKQVKISATVNTMVFDIRIKAIKELKLMKELADNSCLRPIDRNGKLLCPVPDSYTLKEAELKMGSSLGLCLGKAPSSSQLFLFFAMGSDVQPGTEMEIVVEETISVRDCLKLMLKKSGLQGDAWHLRKMDWCYEAGEPLCEEDATLKELLICSGDTLLLIEGQLPPLGFLKVPIWWYQLQGPSGHWESHQDQTNCTSSWGRVWRATSSQGASGNEPAQVSLLYLGDIEISEDATLAELKSQAMTLPPFLEFGVPSPAHLRAWTVERKRPGRLLRTDRQPLREYKLGRRIEICLEPLQKGENLGPQDVLLRTQVRIPGERTYAPALDLVWNAAQGGTAGSLRQRVADFYRLPVEKIEIAKYFPEKFEWLPISSWNQQITKR

SEQ ID NO: 12103 - DNA, 2884 bp, Homo sapiens
  CDS (49)..(2595)
agtaacccctcggctttctgttcctggacggtggcggccgccggctctatgatggagcccccgaagcccgagcctgagctccagcggttttaccaccggctgctgcgtccgctgtcgctcttccccactaggacgacgtccccagagcctcagaagcgccccccgcaggagggccggattctgcagtccttccctctggcgaagctgacggtggcgtcgctgtgcagccaggtggccaagctgctggccggcagcgggatagcagcgggagtgcctcctgaggcccgactacgtctcatcaaggtcatcctggacgagctgaagtgcagctggcgggagccgcccgccgaacttagtctgagccacaaaaacaaccagaagctgcggaagcggctcgaggcctacgtgctgctgagcagcgagcagctcttcttgcgctacctgcacctgctggtgaccatgtcgactcccaggggggtcttcactgaatcagccaccctcacccggttggccgccagcctcgccagggactgcacactcttccttactagtcccaacgtctaccgtggcctgcttgccgacttccaggccctgctgagggcagagcaggcctctggggatgtggacaagctgcaccctgtctgccccgctgggacgttcaagctgtgccctatcccctggcctcacagcactggcttcgcccaagtgcagtgctctaacctcaacctgaactacctcatccaactcagccgtccaccagagtttctcaatgagccaggaaggatggatccagtgaaggaattgaagtccatccctcggttgaagaggaaaaagcctttccactggctgccctccataggaaagaagagagaaatcgacatcagttcctcacagatggtgtcgctgcccagctatcctgtggcccccaccagcagggcttccccctcgcctttctgccctgagctccggagaggccaatccatgccctccctgcgtgagggctggaggctggcagatgagttgggccttcctccactcccatctcgccccttaaccccgctggtcttggctacagagagcaaaccagagctgactgggctcatcgtggctgaggatctgaagcagttgataaagaagatgaagttggaggggactcgctacccaccactggactcaggcctgcctcctctcctgggggttgtgacccgtcacccagctgcagggcatcgcctggaggagctggagaagatgttgaggaacctccaggaggaagaagcctctgggcagtgggacccccagccccccaaatcctttccacttcacccacagccagtgaccattactttgaagcttagaaatgaggtcgtggtccaggcggctgccgtacgggtctctgatagaaacttcttagactctttccacattgagggggccggagccctgtataaccatctggctggtgaactggatcccaaagccattgaaaaaatggatattgataactttgttggcagtactaccagggaggtctacaaggagttgatgagccatgtctcttctgaccacttacattttgatcaagggcccctagttgagcctgcagcagataaagactggtcgaccttcctgtcctcagcctttctacgtcaagaaaaacagcctcaaatcatcaaccctgagctggttggactttactcccagagagcaaacactttacagtccaatactaagaagatgccctccctcccatcactccaagctaccaaaagctgggagaagtggtcaaacaaggcctccttgatgaactcatggaaaaccaccttgtctgtggatgactacttcaagtacctcaccaaccatgaaacagatttccttcatgtcatctttcaaatgcatgaagaagaggttcctgtggagattgtggcccctgccagagagtccctagagattcagcaccctcccccattgctagaagatgaagaaccagactttgtgccaggagagtgggattggaacactgtgctagagcacaggctaggagctgggaagacaccccacctgggagaaccccacaaaattctgagcctgcagaagcatctggaacaactgtggtctgtgcttgaggtccctgacaaggaccaggtggacatgaccattaaatatagctccaaagcccgcctgaggcagctgccttcattggtgaatgcctgggagcgggccctgaagcccattcagctgcgggaggcattgctggcgagacgagagtggtttgagggacaagcttccaatcccaaccgcttcttcaaaaagaccaacttgagctccagtcacttcctggaggagaatcaggtccgaagccatctccacaggaagctcaacttaatggagtcttctttggtttccctcctagaggagatagagttaatctttggcgagccagtgatcttcaaggggcggccctacctggacaagatgaagagtgacaaagtggagatgctctattggctgcaacagcagcggcgggttcgccacctggtctcggccctgagggatccccaccagtcaaccctgttcaggagctcagcagccagcctttagtagctcctgggaatacccctattactccttgaccaggcccagtgccctcaaatgcctccctcacccctaaatggccagcagctcatctagacctctttactgctttggaagaagaaatatttgtctatatctgggagtggagggttcaggaacattatgcttccaactatgaagggattgagactaaaactattgttttcttagtgaaattctcatgaaagaatccccaagcctagtagtcccattatgtcaagccttgcacaatacaagccaaatctcctatatc

SEQ ID NO: 12104 - protein, 849 aa, Homo sapiens
MMEPPKPEPELQRFYHRLLRPLSLFPTRTTSPEPQKRPPQEGRILQSFPLAKLTVASLCSQVAKLLAGSGIAAGVPPEARLRLIKVILDELKCSWREPPAELSLSHKNNQKLRKRLEAYVLLSSEQLFLRYLHLLVTMSTPRGVFTESATLTRLAASLARDCTLFLTSPNVYRGLLADFQALLRAEQASGDVDKLHPVCPAGTFKLCPIPWPHSTGFAQVQCSNLNLNYLIQLSRPPEFLNEPGRMDPVKELKSIPRLKRKKPFHWLPSIGKKREIDISSSQMVSLPSYPVAPTSRASPSPFCPELRRGQSMPSLREGWRLADELGLPPLPSRPLTPLVLATESKPELTGLIVAEDLKQLIKKMKLEGTRYPPLDSGLPPLLGVVTRHPAAGHRLEELEKMLRNLQEEEASGQWDPQPPKSFPLHPQPVTITLKLRNEVVVQAAAVRVSDRNFLDSFHIEGAGALYNHLAGELDPKAIEKMDIDNFVGSTTREVYKELMSHVSSDHLHFDQGPLVEPAADKDWSTFLSSAFLRQEKQPQIINPELVGLYSQRANTLQSNTKKMPSLPSLQATKSWEKWSNKASLMNSWKTTLSVDDYFKYLTNHETDFLHVIFQMHEEEVPVEIVAPARESLEIQHPPPLLEDEEPDFVPGEWDWNTVLEHRLGAGKTPHLGEPHKILSLQKHLEQLWSVLEVPDKDQVDMTIKYSSKARLRQLPSLVNAWERALKPIQLREALLARREWFEGQASNPNRFFKKTNLSSSHFLEENQVRSHLHRKLNLMESSLVSLLEEIELIFGEPVIFKGRPYLDKMKSDKVEMLYWLQQQRRVRHLVSALRDPHQSTLFRSSAASL

SEQ ID NO: 12105 - DNA, 3689 bp, Homo sapiens
  CDS (169)..(3687)
actccctccccgcggggcgcgcagctcgcgggtctttggacaccaccggtcctgagtccgcggactgccattttcattaagaactgccacttagaggtaccaaaataaagggtatttgctacctttaatacttgccagttcaggttggaggcacaggcagcagcaagaatggaaagaaatgttcttacaacattttcacaggaaatgtcccagttaattttgaatgaaatgccaaaagctgaatattccagtttattcaatgattttgttgaatctgaattttttttgattgatggggattcattacttatcacatgtatctgtgagatatcatttaagcctgggcagaacctccatttcttctatctggttgaacgctatcttgtggatcttattagcaaaggaggacaattcaccatagttttcttcaaggatgccgagtatgcgtatttcaacttccctgaacttctttctttgagaactgctttaatccttcatcttcagaagaataccaccattgatgttcgaacaacattttcgagatgcttatcaaaagagtggggaagtttcttggaagagagttacccatatttcctgatagttgcagacgaaggcctgaacgatctacaaacacagcttttcaactttttaatcattcattcttgggcaaggaaggtcaacgttgtactttcctcagggcaagaatctgatgttctttgcctttatgcataccttcttccaagcatgtacagacaccagattttttcctggaagaataagcagaacattaaagatgcttatacaaccctgcttaaccagttggaaagatttaagctttcagcattagcacctctttttggaagtttaaaatggaataatattacggaagaggcacacaagactgtatctctgcttacacaagtctggccagaaggatctgacattcggcgtgtcttttgtgttacttcatgctcattatctttgagaatgtaccatcgctttttaggaaacagagagccctcctctggtcaggaaactgagatccaacaggtgaacagtaattgcttaaccctgcaggagatggaagatttgtgtaaactgcattgtctcactgtggtttttctactccatctgcctctttctcaaagagcttgtgctagagtcatcacttcccattgggctgaggacatgaagcctttattacaaatgaaaaagtggtgtgaatatttcatcttaagaaatatacatacttttgaattttggaatctgaatttaattcacctttctgacttaaatgatgagcttttgttgaagaatattgctttttactatgaaaatgaaaatgtaaaaggcctacatttgaatttgggagataccattatgaaagattatgaatatctctggaataccatatcaaagttggtcagagactttgaggttggacagccatttcctctgagaacaacaaaagtttgttttcttgaaaagaaaccatcaccaatcaaagacagctccaatgaaatggtgcccaatttgggttttattccaacgtcatcttttgtggttgataaatttgctggagatattttgaaagatttgccttttctaaagagtgatgatcctattgttacttcactggttaaacaaaaggaatttgatgaacttgtgcactggcattctcataaacccctgagtgatgattatgacaggtccaggtgtcagtttgatgaaaaatctagagaccctcgtgttcttagatctgtgcaaaagtatcatgttttccaacggttttatgggaattcattagaaacagtctcttcgaaaatcatcgtgactcaaactattaagtcaaagaaggattttagtgggcccaagagcaaaaaggcacacgagaccaaggctgaaataattgctagagagaataagaaaaggttatttgccagggaagaacaaaaggaagagcaaaagtggaatgctttgtcattttctattgaagagcaattgaaagaaaatttacactctggaataaagagcctggaagattttttgaaatcctgtaaaagtagctgtgtgaaacttcaggttgaaatggtggggttaactgcttgcttgaaagcctggaaagaacattgccgaagtgaagaaggtaaaaccacgaaagatttaagtatagctgttcaggtgatgaaaaggatccactccttgatggaaaaatactcagaacttttacaagaagatgatcggcaactcatagccagatgccttaagtatttaggatttgatgagttggcaagttctttacatccagcccaggatgcagaaaatgatgtaaaagtgaagaaaaggaataaatattcagttggcattgggccagctcggttccaactgcaatacatgggccattatttgatacgagatgagagaaaagacccagatcccagggtccaggattttattcccgacacatggcagcgagagctccttgatgttgtggataagaatgagtcagcagtgattgttgccccaacgtcctcaggcaaaacctatgcctcctactactgtatggagaaagtgctgaaggagagcgacgacggggtggtcgtgtacgttgcacccacaaaggcccttgttaatcaagtggcagcaactgttcagaatcgttttacgaaaaatctgccaagtggtgaagttctctgtggtgttttcaccagggagtatcgtcatgatgccttaaactgtcaggtacttattacagtgcctgcctgctttgaaattctgctgcttgctcctcatcgccaaaactgggtgaaaaagatcagatatgttatatttgatgaggttcattgtcttggtggagaaattggagcagaaatctgggaacatctccttgtcatgatccgatgtccctttttggctctttcagctaccataagtaatcctgaacatctcaccgagtggctacaatcggtaaaatggtactggaaacaagaagacaaaataattgaaaataataccgcttctaaaagacatgtgggtcgtcaggccggctttcccaaagactacttgcaagtaaaacaatcgtataaagttagacttgtgctctatggagagaggtataatgatctagagaagcatgtatgttcaataaaacatggtgacattcattttgatcattttcacccatgtgctgcactaacaacagatcatattgaaaggtatggattccctcctgatcttaccctttcacctcgagaaagcatccagctgtatgatgccatgtttcaaatttggaaaagttggcctcgggcccaggaactgtgcccagaaaacttcattcattttaacaataaattagtcattaaaaagatggatgctaggaaatatgaagagagtctaaaggcagaattaacaagttggattaaaaatggcaacgtagagcaggccagaatggtacttcagaatcttagtcctgaagcagatttgagtccagaaaacatgatcaccatgtttccacttctagttgaaaaactaaggaaaatggagaagttacctgcactattttttttattcaagttaggagctgtagaaaacgcagctgaaagtgtgagcactttcctaaagaaaaagcaggagacaaaaaggcctcccaaagctgataaagaagcccatgtcatggctaacaaacttcg

SEQ ID NO: 12106 - protein, 1173 aa, Homo sapiens
MERNVLTTFSQEMSQLILNEMPKAEYSSLFNDFVESEFFLIDGDSLLITCICEISFKPGQNLHFFYLVERYLVDLISKGGQFTIVFFKDAEYAYFNFPELLSLRTALILHLQKNTTIDVRTTFSRCLSKEWGSFLEESYPYFLIVADEGLNDLQTQLFNFLIIHSWARKVNVVLSSGQESDVLCLYAYLLPSMYRHQIFSWKNKQNIKDAYTTLLNQLERFKLSALAPLFGSLKWNNITEEAHKTVSLLTQVWPEGSDIRRVFCVTSCSLSLRMYHRFLGNREPSSGQETEIQQVNSNCLTLQEMEDLCKLHCLTVVFLLHLPLSQRACARVITSHWAEDMKPLLQMKKWCEYFILRNIHTFEFWNLNLIHLSDLNDELLLKNIAFYYENENVKGLHLNLGDTIMKDYEYLWNTISKLVRDFEVGQPFPLRTTKVCFLEKKPSPIKDSSNEMVPNLGFIPTSSFVVDKFAGDILKDLPFLKSDDPIVTSLVKQKEFDELVHWHSHKPLSDDYDRSRCQFDEKSRDPRVLRSVQKYHVFQRFYGNSLETVSSKIIVTQTIKSKKDFSGPKSKKAHETKAEIIARENKKRLFAREEQKEEQKWNALSFSIEEQLKENLHSGIKSLEDFLKSCKSSCVKLQVEMVGLTACLKAWKEHCRSEEGKTTKDLSIAVQVMKRIHSLMEKYSELLQEDDRQLIARCLKYLGFDELASSLHPAQDAENDVKVKKRNKYSVGIGPARFQLQYMGHYLIRDERKDPDPRVQDFIPDTWQRELLDVVDKNESAVIVAPTSSGKTYASYYCMEKVLKESDDGVVVYVAPTKALVNQVAATVQNRFTKNLPSGEVLCGVFTREYRHDALNCQVLITVPACFEILLLAPHRQNWVKKIRYVIFDEVHCLGGEIGAEIWEHLLVMIRCPFLALSATISNPEHLTEWLQSVKWYWKQEDKIIENNTASKRHVGRQAGFPKDYLQVKQSYKVRLVLYGERYNDLEKHVCSIKHGDIHFDHFHPCAALTTDHIERYGFPPDLTLSPRESIQLYDAMFQIWKSWPRAQELCPENFIHFNNKLVIKKMDARKYEESLKAELTSWIKNGNVEQARMVLQNLSPEADLSPENMITMFPLLVEKLRKMEKLPALFFLFKLGAVENAAESVSTFLKKKQETKRPPKADKEAHVMANKL

SEQ ID NO: 12107 - DNA, 2543 bp, Homo sapiens
  CDS (184)..(831)
gaggcgggcaaggcgggcgccgaggtttgcaaaggctcgcagcggccagaaacccggctccgagcggcggcggcccggcttccgctgcccgtgagctaaggacggtccgctccctctagccagctccgaatcctgatccaggcgggggccaggggcccctcgcctcccctctgaggaccgaagatgagcttcctcttcagcagccgctcttctaaaacattcaaaccaaagaagaatatccctgaaggatctcatcagtatgaactcttaaaacatgcagaagcaactctaggaagtgggaatctgagacaagctgttatgttgcctgagggagaggatctcaatgaatggattgctgtgaacactgtggatttctttaaccagatcaacatgttatatggaactattacagaattctgcactgaagcaagctgtccagtcatgtctgcaggtccgagatatgaatatcactgggcagatggtactaatattaaaaagccaatcaaatgttctgcaccaaaatacattgactatttgatgacttgggttcaagatcagcttgatgatgaaactctttttccttctaagattggtgtcccatttcccaaaaactttatgtctgtggcaaagactattctaaagcgtctgttcagggtttatgcccatatttatcaccagcactttgattctgtgatgcagctgcaagagggggcccacctcaacacctcctttaagcactttattttctttgttcaggagtttaatctgattgataggcgtgagctggcacctcttcaagaattaatagagaaacttggatcaaaagacagataaatgtttcttctagaacacagttacccccttgcttcatctattgctagaactatctcattgctatctgttatagactagtgatacaaactttaagaaaacaggataaaaagatacccattgcctgtgtctactgataaaattatcccaaaggtaggttggtgtgatagtttccgagtaagaccttaaggacacagccaaatcttaagtactgtgtgaccactcttgttgttatcacatagtcatacttggttgtaatatgtgatggttaacctgtagcttataaatttacttattattcttttactcatttactcagtcatttctttacaagaaaatgattgaatctgttttaggtgacagcacaatggacattaagaatttccatcaataatttatgaataagtttccagaacaaatttcctaataacacaatcagattggttttattcttttattttacgaataaaaaatgtatttttcagtatccttgagatttagaacatctgtgtcacttcagataacattttagtttcaagtttgtatggtagtgtttttatagataagatacgtctattttttcaaaattcatgattgcagtttaaatcatcatatgacgtgtgggtgggagcaaccaaagttatttttacagggactttattttttgatctttatttgagattgttttcatatctatctaaattattaggagtgtgtgtatcagaagtaattttttaatgtcttctaaggatggtcttccaggcttttaaactgaaaagcttaattcagatagtagcttttggctgagaaaaggaatccaaaatattaataaatttagatctcaaaaccactatttttattatttcattatttttcagaggccttaaaattctggataagagaatggaggaaaatactcagagtacttgattattttatttccttttattaaaaaattacttctatgtttttattgtctcttgagccttagttaagagtagtgtagaaatgcatgaacttcatcctaataaggataaaacttaaggaaaaccacaataaaccatgaaggtgtacacatcctataacacagataaagttttggtgtgctacctattcttgagagagtgagtgagtgtatgtgtttaaaggaaacaaaatgggagaaataagttttaaaaaaatcctcattttgttaatattcaaaagatggactgagcttccacttgggttttatcttgttttaattgtttttgtatcaaaacttgaaattcctctatttctattgggatataaaagccttccccttcagtgaagaaaacatttattttttatttgattcctaggatttagtaaactctagctgtctatttaaaatgtactgaggcacaacaagtattatactggaagacttgccaaactggcaaagctttaagttcatcagcattctatgtggttcagagctgtgatttttgcaaagtattttaccaacctcctcgatggctttgataaaggttagatttgatgttttttttttagatttatttttcttactccactaaactataaagaaaataattacttagaaactccattttaaataatcatttcctagaaattcttaaatatatacagaattttaaagaaaacatttcatctgatttagttagcatccacatatcattgaggaattaaagtgtgggacagtcattatt

SEQ ID NO: 12108 - protein, 216 aa, Homo sapiens
MSFLFSSRSSKTFKPKKNIPEGSHQYELLKHAEATLGSGNLRQAVMLPEGEDLNEWIAVNTVDFFNQINMLYGTITEFCTEASCPVMSAGPRYEYHWADGTNIKKPIKCSAPKYIDYLMTWVQDQLDDETLFPSKIGVPFPKNFMSVAKTILKRLFRVYAHIYHQHFDSVMQLQEGAHLNTSFKHFIFFVQEFNLIDRRELAPLQELIEKLGSKDR

SEQ ID NO: 12109 - DNA, 2235 bp, Homo sapiens
  CDS (296)..(1702)
ctcgtagcgagcctagtggcgggtgtttgcattgaaacgtgagcgcgacccgaccttaaagagtggggagcaaagggaggacagagccctttaaaacgaggcgggtggtgcctgcccctttaagggcggggcgtccggacgactgtatctgagccccagactgccccgagtttctgtcgcaggctgcgaggaaaggcccctaggctgggtctgggtgcttggcggcggcggcttcctccccgctcgtcctccccgggcccagaggcacctcggcttcagtcatgctgagcagagtatggaagcacctgactacgaagtgctatccgcgcgagaacagctattccacgagaggatccgcgagtgtattatatcaacacttctgtttgcaacactgtacatcctctgccacatcttcctgacccgcttcaagaagcctgctgagttcaccacagtggatgatgaagatgccaccgtcaacaagattgcgctcgagctgtgcacctttaccctggcaattgccctgggtgctgtcctgctcctgcccttctccatcatcagcaatgaggtgctgctctccctgcctcggaactactacatccagtggctcaacggctccctcatccatggcctctggaaccttgtttttctcttctccaacctgtccctcatcttcctcatgccctttgcatatttcttcactgagtctgagggctttgctggctccagaaagggtgtcctgggccgggtctatgagacagtggtgatgttgatgctcctcactctgctggtgctaggtatggtgtgggtggcatcagccattgtggacaagaacaaggccaacagagagtcactctatgacttttgggagtactatctcccctacctctactcatgcatctccttccttggggttctgctgctcctggtgtgtactccactgggtctcgcccgcatgttctccgtcactgggaagctgctagtcaagccccggctgctggaagacctggaggagcagctgtactgctcagcctttgaggaggcagccctgacccgcaggatctgtaatcctacttcctgctggctgcctttagacatggagctgctacacagacaggtcctggctctgcagacacagagggtcctgctggagaagaggcggaaggcttcagcctggcaacggaacctgggctaccccctggctatgctgtgcttgctggtgctgacgggcctgtctgtgctcattgtggccatccacatcctggagctgctcatcgatgaggctgccatgccccgaggcatgcaggttgtactcatcttttacctaatggtgtcctcagttgtgggcttctatagctctccactcttccggagcctgcggcccagatggcacgacactgccatgacgcagataattgggaactgtgtctgtctcctggtcctaagctcagcacttcctgtcttctctcgaaccctggggctcactcgctttgacctgctgggtgactttggacgcttcaactggctgggcaatttctacattgtgttcctctacaacgcagcctttgcaggcctcaccacactctgtctggtgaagaccttcactgcagctgtgcgggcagagctgatccgggcctttgggctggacagactgccgctgcccgtctccggtttcccccaggcatctaggaagacccagcaccagtgacctccagctgggggtgggaaggaaaaaactggacactgccatctgctgcctaggcctggagggaagcccaaggctacttggacctcaggacctggaatctgagagggtgggtggcagaggggagcagagccatctgcactattgcataatctgagccagagtttgggaccaggacctcctgcttttccatacttaactgtggcctcagcatggggtagggctgggtgactgggtctagcccctgatcccaaatctgtttacacatcaatctgcctcactgctgttctgggccatccccatagccatgtttacatgatttgatgtgcaatagggtggggtaggggcagggaaaggactgggccagggcaggctcgggagatagattgtctcccttgcctctggcccagcagagcctaagcactgtgctatcctggaggggctttggaccacctgaaagaccaaggggatagggaggaggaggcttcagccatcagcaataaagttgatcccagggtttgctttgttttttt

SEQ ID NO: 12110 - protein, 469 aa, Homo sapiens [sequence omitted]

SEQ ID NO: 12111 - DNA, 3123 bp, Homo sapiens
  CDS (465)..(1937)
gaactgtggcgctttctgggtaaagatggacgtccacgatctctttcgccggctcggcgcgggggccaaattcgacacgagacgcttctcggcagacgcagctcgattccagataggaaaaaggaaatatgactttgattcttcggaggtgcttcagggactggacttttttggaaacaagaagtctgtcccaggtgtgtgtggagcatcacaaacacatcagaagccccaaaatggagagaaaaaagaagagagcctaactgaaaggaagagggagcagagcaagaaaaaaaggaagacgatgacttcagagacagggtttcaccatgttggccagtatggtctcgatctcctgacctcgtgattcacccaccttgggctcccaaagtgctgggattacagatgtgagccaccacgcccagccagaaattgcttcccaagaagaaggtgctactatacagtggatgtcatctgtagaagcaaagattgaagacaaaaaagttcagagagaaagtaaactaacttccggaaagttggagaatctcagaaaagaaaagataaacttcttgcggaataaacacaaaattcacgtccaaggaaccgatcttcctgacccaattgctacatttcagcaacttgaccaggaatataaaatcaattctcgactacttcagaacattctagatgcaggcttccaaatgcctacgccaatccaaatgcaagccatcccagttatgctgcatggtcgggaacttctggcttctgctccaactggatctggaaaaacattagcttttagcattcctattttaatgcagctgaaacaacccgcaaataaaggcttcagagccctgattatatcaccaacacgagaacttgccagccagattcacagagagttaataaaaatttctgagggaacaggattcagaatacacatgatccacaaagcagcagtggcagccaagaaatttggacctaaatcatctaaaaagtttgatattcttgtgactactccaaatcgactaatctatttattaaagcaagatccccccggaatcgacctagcaagtgttgagtggcttgtagtagacgaatcagataaactgtttgaagatggcaaaactgggttcagagaccagctggcttccattttcctggcctgcacatcccacaaggtccgaagagctatgttcagtgcaacttttgcatatgatgttgaacagtggtgcaaactcaacctggacaatgtcatcagtgtgtccattggagcaaggaattctgcagtagaaactgtagaacaagagcttctctttgttggatctgagaccggaaaacttctggccgtgagagaacttgttaaaaagggtttcaatccacctgttcttgtttttgttcagtccattgaaagggctaaagaactttttcatgagctcatatatgaaggtattaatgtggatgttattcatgcagagagaacacaacaacagagagataacacagtccacagtttcagagcaggaaaaatctgggttctgatttgtacagccttgctagcaagagggattgattttaaaggtgtgaacttggtgatcaactatgactttccaactagctcagtggaatatatccacaggataggtcgaactggaagagcagggaataagggaaaagcaattacatttttcactgaggatgataagccattattaagaagcgttgctaatgttatacagcaggctgggtgtcctgtaccagaatacataaaaggttttcagaaactactaagcaaacaaaagaaaaagatgattaagaaaccattggaaagggagagcattagtacaactccaaaatgtttcttagaaaaagctaaggataaacagagaaaggtcactggtcagaacagcaagaagaaagtagctcttgaagacaaaagttaaaaacagactttaaaaatactgtcccagaaatgtaattttatgatcccagcatgaatgttattttcatggaatacttgaagtcttacagtcacctgtaccaaacatttgaaatcaactacaagtacatgggactggtgataaatgatcctaaactatcaagtcagtttcaatttgtaggtgccttttttttttcctgtagagatgagggtcttgccatgttgtccaggctggtcttgaactcctgacctcacacaatcctcctgccttagcctcctgagtaactgagattacaggcacaagctgctgcacccagctctgtaggtgacttttaaatgattatacaatggaaataacattcattgacatttctgtggtttgaatccagggagatacttcttatagaaaaacaaatgtttatgctaaaaataacaccaaaatgtggtgaactcttaaggacttttcccttcaagtgtgaaggaaggtgtgatgaatgctgtggagaggcatctggaacagaaattcaaaataaagccttgacattaaataccccttccactgctcactttgtggatggtagcatgagctgtctaccaagaagaaacctgctgctctcttaattttaatatttcctaatttgttgatggccttttgtgttgtgaaccacaacaaagagaggcctcttttgtggctggttattccagttccctgggattttaaattctttggtctattaagtatccttgtattggatacgtaataccttagtgctgtcataatgttgcacaagatcatgatcagcttctccctttcttcattttctgtgatttaaccatgttctttcctgtctctttccatttaagatattttatttgaatactgataaacattttatcctgataaggaagaatgttcttgttacttgatatacctctgtcttcattctcttacagcttatctttccttaggttgatggtgcctcatttaataagtagatctctacttaagctaaaggattatgatcatatggtgttggagactattagctattagatttttctcaaaatatgagttttgtacaatggaatgaaaaagtgacttcatatacgtaagactggtgcctaagaatgacttgaatgttatcagtactaccacagaactataatatacattgccttttctcagc

SEQ ID NO: 12112 - protein, 491 aa, Homo sapiens
MSSVEAKIEDKKVQRESKLTSGKLENLRKEKINFLRNKHKIHVQGTDLPDPIATFQQLDQEYKINSRLLQNILDAGFQMPTPIQMQAIPVMLHGRELLASAPTGSGKTLAFSIPILMQLKQPANKGFRALIISPTRELASQIHRELIKISEGTGFRIHMIHKAAVAAKKFGPKSSKKFDILVTTPNRLIYLLKQDPPGIDLASVEWLVVDESDKLFEDGKTGFRDQLASIFLACTSHKVRRAMFSATFAYDVEQWCKLNLDNVISVSIGARNSAVETVEQELLFVGSETGKLLAVRELVKKGFNPPVLVFVQSIERAKELFHELIYEGINVDVIHAERTQQQRDNTVHSFRAGKIWVLICTALLARGIDFKGVNLVINYDFPTSSVEYIHRIGRTGRAGNKGKAITFFTEDDKPLLRSVANVIQQAGCPVPEYIKGFQKLLSKQKKKMIKKPLERESISTTPKCFLEKAKDKQRKVTGQNSKKKVALEDKS

SEQ ID NO: 12113 - DNA, 4184 bp, Homo sapiens
  CDS (30)..(2951)
ggagcctagcggctctccccgcgtccaagatggcggcagaagcagctggtgggaaatacagaagcacagtcagcaaaagcaaagacccctcggggctgctcatctctgtgatcaggactctgtctactagtgacgatgtcgaagacagggaaaatgaaaagggtcgccttgaagaagcctacgagaaatgtgaccgtgacctggatgaattgattgtacagcactacacagaattgacgacagccattcgcacataccagagcatcacagagcgcatcactaactcccgaaataaaataaagcaggtaaaagagaacctgctttcatgcaagatgctgctgcactgcaaacgggatgagcttcggaaactgtggattgaaggaattgagcataagcatgtcctgaacttgttggatgaaattgagaatatcaagcaagtgcctcaaaagctggaacagtgcatggccagcaagcactatctcagtgccactgacatgttggtgtcagcagttgagtctttggagggccccctgctccaggtggaaggactgagtgaccttcgactagagcttcacagcaagaagatgaaccttcacttggttctcatagatgaactacaccggcacctgtacatcaaatcgactagccgagttgtgcagcgtaacaaggaaaaagggaaaatcagctccctcgtgaaagatgcttctgttcctctgattgatgttacaaacctccctactcctcgaaaattccttgatacctctcactattctactgctggaagctcaagtgtgagggagataaatctgcaggacatcaaggaagatttagaattggatccagaggaaaacagcaccctgtttatgggtatcctcattaagggcttggcgaaactgaagaagatcccagaaacagttaaggcaatcatagagcgcttggagcaggagttgaagcaaattgtgaagaggtctacaacccaggtggcagacagtggctatcagcggggggagaacgttactgtggagaaccaaccaaggttgcttctagaactgctggagttactgtttgacaagtttaatgctgtagccgctgcacactctgtggtcctgggatacctgcaggacactgtagtgactccactgactcagcaggaagatatcaaactgtatgatatggcagatgtatgggtgaagatccaagatgttctacagatgctattaactgagtacttggatatgaaaaatactcgtacggcctctgaaccatcagctcaactaagctatgccagcactggacgagagtttgcagccttttttgccaagaagaaacctcaaaggccaaaaaattctcttttcaagttcgaatcgtcctcccatgccatcagtatgagcgcctatctgcgagaacagagaagggagctctatagtcggagtggagaactgcaagggggtcctgatgacaacttaattgaaggtggaggaacaaaatttgtctgcaaacctggagccagaaacattaccgtcatattccacccattactaagatttattcaggagattgagcatgctctgggtcttggcccagccaaacagtgtcctcttcgagagtttctcaccgtgtacatcaaaaacatctttctcaatcaagtcttggctgagatcaacaaggagattgaaggagtcactaaaacatctgaccctttgaagattctggccaacgcagacaccatgaaggtgctgggagtgcagcggcctctcctacagagcacaatcattgtggagaagacagttcaagacctcctgaacctgatgcatgacttgagtgcatattcagatcaattcctcaacatggtgtgcgtgaagctccaggagtacaaggacacctgcactgcagcttacaggggtattgtccagtcagaagaaaaacttgtcatcagtgcatcctgggcaaaagatgatgatatcagcagactcttgaaatctctaccaaactggatgaatatggctcaacccaaacagctgaggccaaaaagagaggaggaagaagatttcataagggcagcttttggcaaggagtctgaagttcttattgggaacctgggtgataaattaatccctccacaagacatccttcgtgacgtcagtgacctcaaagccttggccaacatgcatgaaagcctggaatggttggcaagtcgaacaaagtcagctttctccaatctttctacatcccagatgctttctcctgctcaagacagccacacgaacacggatctccccccagtgtcagagcagatcatgcagactctcagtgaacttgccaaatcgttccaggatatggctgaccgctgcttgcttgtcttacatctggaagtgagggttcactgtttccactatcttatccctcttgcaaaggaggggaactatgccattgtggctaatgtggaaagtatggattatgaccccctggtggtcaagctcaacaaagatatcagcgccattgaagaggccatgagcgccagccttcagcagcacaagttccagtatatcttcgaaggcctgggccacctgatctcctgcatcctcattaatggtgcccagtacttcaggcgcatcagtgagtctggcatcaagaaaatgtgtaggaacatttttgttcttcagcagaatttgaccaacatcaccatgtcgcgggaggcagacctggactttgcaaggcagtactacgagatgctttacaacacagctgacgagctcctgaacctggtggtggaccagggtgtgaagtacacggagctggagtacatccacgctctgaccctgctgcaccgcagccaaactggggtgggggaactgaccacccagaacacgaggctgcagaggctcaaagagatcatctgcgagcaggctgccatcaagcaagccaccaaggacaagaagataactaccgtttagcagggcgtactgcggttggtgacgggggtcccctcagtcacactcacttttttccttggtatgttattgagtatattctgagcttagttttctctacagtgatactttagtggagaggaggtgtaaggattctttctctctggttttggcttttcatataaatgctaaaggaaggcgacagtacagagtgttttggttgaacaactactttaatgcagtcaaatctaacgggaccagggtgggatagggaggaaggtggtatcaaattgttggactctgaaaaacaagtggatggattactaatatttgatttattactcaatatatatataattccagccttggaaagtaggaaagtaggctgctacctaacttttagtcccttccaaaaccatttagtagggttctattacataaacagtagggtttttcctctcctgaccttatccgtttacagttcaatgaaataagtgtatgtgcattgctgtctgtctctattgccaaaatcaaataaatggcttctcagctgctgtttacaacaaacttccctaaccaaaacagaacctctaatttagggctaggaatagaagtcttttgatcccagtccgtgggacagttttgtatgctgtatcttgtacacaggttgtaggttggtttattgccattttgttttatttctgctatataaaaaccaagagccagacaattagacaactatggaggaatgaaaggcaattcaaacatctgcttgattcccgccccgccacccctaatttctgagagaataatggttagagaacattgcatctcacttgaaacatcctttgggggtaaatgattcttaggtgctcacttggtctgagctcagctgaatgcagggaagatgggacagagtgacatttctcctctgtgcggcctccagctgagcctgtctctgaattgttccctcccccgcaatgtgggcacttaccatgttcctggcacactggacctcaccatgtcccccggtcaccagtcctcttgctgcccatggttcataggtcatagaaggcagcaatgcactgactgggccacatcttgaaaactcgtggaaagggaaaggggaggagatgggactttgaccacacacagtgatgcctcacaccctgaaggtgggggattttgtacctgtttgtacaactttggtcttgatgggaaaaatggagaattaaaaagtgttttgagaagctt

SEQ ID NO: 12114 - protein, 974 aa, Homo sapiens [sequence omitted]

SEQ ID NO: 12115 - DNA, 2397 bp, Homo sapiens
  CDS (44)..(1678)
agatttccagtgggttcaaggagatgtgtgtgaagttcagctgatggtatataacccaatgccgtttgaacttcgagttgaaaacatggggctgctcaccagcggagtggagttcgagtctctccctgcggcgctttctcttccggctgaatctggtctgtacccagtgacgctcgtcggggtcccgcagacgactggaacgattactgtgaacggttaccataccacggtcttcggtgagttcagtgactgtttgctggataacctgccgggaataaaaaccagtggctccacagtggaagtcattcccgcgttgccaagactgcagatcagcacctctctgcccagatctgcacattcattgcaaccttcttctggtgatgaaatatctactaatgtatctgtccagctttacaatggagaaagtcagcaactaatcattaaattggaaaatattggaatggaaccattggagaaactggaggtcacctcgaaagttctcaccactaaagaaaaattgtatggcgacttcttgagctggaagctagaggaaacccttgcccagttccctttgcagcctgggaaggtggccacgttcacaatcaacatcaaagtgaagctggatttctcctgccaggagaatctcctgcaggatctcagtgatgatggaatcagtgtgagtggctttcccctgtccagtccttttcggcaggtcgttcggccccgagtggagggcaaacctgtgaacccacccgagagcaacaaagcaggcgactacagccacgtgaagaccctggaagctgtcctgaacttcaaatactctggaggcccgggccacactgaaggatattacaggaatctctccctggggctgcatgtagaagtcgagccgtctgtatttttcacccgagtcagcaccctcccagcaaccagtacccggcagtgtcacctgctcctggatgtcttcaactccaccgagcatgagctgaccgtcagcaccaggagcagcgaggcactcatcctgcacgccggcgagtgccagcgaatggctattcaagtggacaagttcaactttgagagtttcccggagtcccctggggagaaggggcaatttgcaaaccccaagcagctggaggaagagcggcgggaagcccgaggcctggagatccacagcaagctgggcatctgctggagaatcccctccctgaagcgcagtggcgaggcgagtgtggaaggactcctgaaccagctcgtcctggagcacctgcagctggcgcctctgcagtgggatgtgctggtggacggacagccatgtgaccgcgaggctgtggcggcctgccaggtgggcgaccccgtgcgcctggaggtgcggctgaccaaccggagcccgcgcagcgtagggcccttcgccctcactgtggtccccttccaggaccaccagaacggcgtgcacaactacgacctgcacgacaccgtctccttcgtgggctccagcaccttctacctcgacgcggtgcagccgtccggccagtcggcctgcctcggggccctcctcttcctctacacgggagacttcttcctccacatccggttccacgaggacagcaccagcaaggagctgccaccctcttggttctgcctgcccagtgtgcacgtgtgtgccctggaggcgcaggcctgagcccgcctacttccgtccctctttctgcagggccagaggtgaccctgcctggcctcccacaccccctgcaatgagcaaggccttcactgcagccccatctcctcctcctcctccagacccctcccagccctctcctcctgttcctcctgtagcatctttgctgggctacgcagaagccccggacatggcagccccaccccatgccacgccccttcctacactgttccctggaccatacacaggctgaagcagaggaaatcccaaagcgggtgcccatccagcccaggtcccaggatccctgcacccatttctgtgacctggggccccagccgtgctgtgctgctcatcccagcagagggacctccctcgtccagcgacttccctttggccatagaaagaaatggtgagcatgagactgggcacagcctgagggcgtgggcagcttcccaccctccctgggccttggaatcccccaaggctggttttcttcctggagacccccatgggcaacttggcaggagagatggtgccgtaggaggtcgtggatggttgatgccaagagaggccctccacccgtggtgggcaaatgtccaggcctgggctggcagcccagggctgtttctgggtgctccctggccccagggtggcgtctggttaccatggctgtgtgtgtccatgtctgcaagcagttcttcaataaatggcctgcctccccc

SEQ ID NO: 12116 - protein, 545 aa, Homo sapiens [sequence omitted]

SEQ ID NO: 12117 - DNA, 1457 bp, Homo sapiens
  CDS (104)..(940)
aagtggcaggcaggcaggctggccccggggacttctctctggccctgctccctccgagcgctccgccgttgcccgcctggcccctacggagtccttagccaggatggaggctgttgtgaacttgtaccaagaggtgatgaagcacgcagatccccggatccagggctaccctctgatggggtcccccttgctaatgacctccattctcctgacctacgtgtacttcgttctctcacttgggcctcgcatcatggctaatcggaagcccttccagctccgtggcttcatgattgtctacaacttcccactggtggcactctccctctacattgtctatgagttcctgatgtcgggctggctgagcacctatacctggcgctgtgaccctgtggactattccaacagccctgaggcacttaggatggttcgggtggcctggctcttcctcttctccaagttcattgagctgatggacacagtgatctttattctccgaaagaaagacgggcaggtgaccttcctacatgtcttccatcactctgtgcttccctggagctggtggtggggggtaaagattgccccgggaggaatgggctctttccatgccatgataaactcttccgtgcatgtcataatgtacctgtactacggattatctgcctttggccctgtggcacaaccctacctttggtggaaaaagcacatgacagccattcagctgatccagtttgtcctggtctcactgcacatctcccagtactactttatgtccagctgtaactaccagtacccagtcattattcacctcatctggatgtatggcaccatcttcttcatgctgttctccaacttctggtatcactcttataccaagggcaagcggctgccccgtgcacttcagcaaaatggagctccaggtattgccaaggtcaaggccaactgagaagcatggcctagataggcgcccacctaagtgcctcaggactgcaccttagggcagtgtccgccagtgccctctccacctacacctgtgaccaaggcttatgtggtcaggactgagcaggggactggccctcccctccccacagctgctctacagggaccacggctttggttcctcacccacttcccccgggcagctccagggatgtggcctcattgctgtctgccactccagagctgggggctaaaagggctgtacagttatttccccctccctgccttaaaacttgggagaggagcactcagggctggccccacaaagggtctcgtggcctttttcctcacacagaagaggtcagcaataatgtcactgtggacccagtctcactcctccaccccacacactgaagcagtagcttctgggccaaaggtcagggtgggcgggggcctgggaatacagcctgtggaggctgcttactcaacttgtgtcttaattaaaagtgacagaggaaacc

SEQ ID NO: 12118 - protein, 279 aa, Homo sapiens [sequence omitted]

SEQ ID NO: 12119 - DNA, 2544 bp, Homo sapiens
  CDS (40)..(663)
tgcttggccgtgcttgccctgtcatcccacctgagaaccatgctcaccgaccctggggcagtacccaaaggaaacgctacgaaagaatacatggagagcttgcagctgaagcccggggaagtcatctacaagtgccccaagtgctgctgtattaaacccgagcgcgcccaccactgcagtatttgcaaaagatgtattcggaaaatggatcatcactgcccgtgggtgaacaattgtgtaggagaaaagaatcaaagattttttgtgctcttcactatgtatatagctctgtcttcagtccatgctctgatcctttgtggatttcagttcatctcctgtgtccgagggcagtggactgaatgcagtgatttttcacctccgataactgtaatcctgttgatcttcctgtgccttgagggtcttctgtttttcactttcactgcagttatgtttggcacccaaatccactccatatgcaacgacgagacggagatcgagcgattgaaaagtgagaagcccacatgggagcggaggctgcgatgggaagggatgaagtccgtctttggggggcccccctcactcctctggatgaatccctttgtgggcttccgatttaggcgactgcccacgagacccagaaaaggcggcccggagttctcagtgtgaggcgtggctcatcagactgaaacttgctcacagacttccagttatttatttggggtctgaaggatatcaacagctcatctgtgaccaacagggcaactggaacctacacaaaccaattgcttgcagcaagcagagttttatatatttatagtcacagatggcagaggaagaggctctcagtccctacctgtacaacaacggaaaggtgtgtggccacacgaagaagccaaacgccgtggcctcctgcagagctggggcttctgtggagaatacttcgggttattacatgggttattcaaatcctgggtcctgagctgctgtttccaatcatgaagaaaaacagtgaatccagtgaacagggattctccaagcagtcatttcagggggctcctgctgcccccgccactcagcagtgcactccccggatcacagcagggcgtttacatagaaagacgttttggtctcgattagctccgatgctttgcactgaagttgcaaaagatctgtgcactgaacagtgaaggtggcttccggcacactccccgctgccccggaagagacatcctttgaccctctcagcaagtctgtgtgtgtgcgtgtctgtgcgtgtgcgcgcgtgtgtgcatgtgtgtcaaaattgccagtgttgtttaggcagtgtaacatttaccggctgtgtacagcaaacaagctattttttagaaaccgacgtttcagggaagaggggagagagccgcggggtcctgcccgtggttactatgaatgtattgctgttggaggacatctcgatccaaagaacagccgttcctgtgcggcccttcgttgccctcctgctttcattttttaaagaaatcttgagtgcttgagggccttggaactgatttttttttttttgttccagccaaattagcagtgtataaatggcacctaggtaagagcagagctgcggctcggtgacttgatacttggggcagcccgatgctgtgtgtggggcaggggaggcatccttactggagaggcagggcccagccattgggcacctctgggaaggggaggggaccatgaggcagccagcccctggcaggggcgactgtgccaccgcaggcagcgctccagtcgggaatggccaggatggcgccctcttgttggagtttttggttagcttttacgttttcttctccacccacggcacaggtgataaaataggatccttggtgcggagcttaaaattatgccagaaagccaacagctcccctcgtggggccttgccttaaacttgcctggtttgtacattttttgccggatgcatcaagaagcaatctgtgacaaagtctgagggtcttcctttatgcttgccctccacactaagagaagttggcgtctccctcctgggaattgttttgcctttctgttcatctgtgaactgttttttgtttttaattactctgtaccccatccgaatcagggcttctaccactgctgatgcaaaaccacaaagggacctacctgagccaccgtcctagccaagcgagcaaacctgcagggggtttggaagtggacttggtcaccgcagaagcgtgtgcgccgttgggggaagagctgcgtcacagccagagggacaaagtgtgggtgatcctggagacgccagtttccgagattgttctgcatattcatttgcacattgttgtctgggttggacatgcgtgtgggcttcagtgtgaggcttttaatatgtatatcctgttatcaataaaacaattatccaagtggttgaatcctgtgagacttggcaagtgtgtgcaaatcaagtatacttgacttttcaacctcttctttcagtgtaacttttatatgaaataaagtaatcaattaacagtt

SEQ ID NO: 12120 - protein, 208 aa, Homo sapiens
MLTDPGAVPKGNATKEYMESLQLKPGEVIYKCPKCCCIKPERAHHCSICKRCIRKMDHHCPWVNNCVGEKNQRFFVLFTMYIALSSVHALILCGFQFISCVRGQWTECSDFSPPITVILLIFLCLEGLLFFTFTAVMFGTQIHSICNDETEIERLKSEKPTWERRLRWEGMKSVFGGPPSLLWMNPFVGFRFRRLPTRPRKGGPEFSV

SEQ ID NO: 12121 - DNA, 3106 bp, Homo sapiens
  CDS (50)..(1165)
cagcgccagctccgcgtcccgaccggcccgcggcagcctgcgccgcgccatggccacctccccgcagaagtcgccttctgtccccaagtctcccactcccaagtcgcccccgtcccgcaagaaagatgattccttcttggggaaactcggagggaccctggcccggaggaagaaagccaaggaggtgtccgagctgcaggaggagggaatgaacgccatcaacctgcccctcagcccaattccctttgagctggaccccgaggacacgatgctggaggagaatgaggtgcgaacaatggtggatccaaactcacgcagtgaccccaagcttcaagaactgatgaaggtattaattgactggattaatgatgtgttggttggagaaagaatcattgtgaaagacctagctgaagatttgtatgatggacaagtcctgcagaagcttttcgagaaactggagagtgagaagctaaatgtggctgaggtcacccagtcagagattgctcagaagcaaaaactgcagactgtcctggagaagatcaatgaaaccctgaaacttcctcccaggagcatcaagtggaatgtggattctgttcatgccaagagcctggtggccatcttacacctgctcgttgctctgtctcagtatttccgcgcaccaattcgactcccagaccatgtttccatccaagtggttgtggtccagaaacgagaaggaatcctccagtctcggcaaatccaagaggaaataactggtaacacagaggctctttccgggaggcatgaacgtgatgcctttgacaccttgttcgaccatgccccagacaagctgaatgtggtgaaaaagacactcatcactttcgtgaacaagcacctgaataaactgaacctggaggtcacagaactggaaacccagtttgcagatggggtgtacctggtgctgctcatggggctcctggagggctactttgtgcccctgcacagcttcttcctgaccccggacagctttgaacagaaggtcttgaatgtctcctttgcctttgagctcatgcaagatggagggttggaaaagccaaaaccgcggccagaagacatagtcaactgtgacctgaaatctacactacgagtgttgtacaacctcttcaccaagtaccgtaacgtggagtgaggggctgccctgggcccaccactgcccaagagttcttgctgttggcgtactggaccctcctccgaactgccttaccctgcttattcctgtctcttgcactgtgctctcccacaagtccagctgcaacccagagatagtggaaactgaaattaggaaggaaatcatcaataactcagtgggctgacccatccctcccaggcgctggggaccaacctagcaatgaaggttgggaaggttgttcccttcccggtgccaggtccagatttccctccatgatttgggaaccagcttaggcaaaagagtccccacaagatgaaaataaagatcctagttaccattcaaaggatgctaactgtgtgtcaggccccacactaagtgctctgctctgatatactcaaggccattaatcttcaggactcccattgacgtaggtgtttcattccccttttacagatgaggaaactaaggcttggaggttaaatgacttgccagaagttggaatttttttcctctttgaacataacctctcccttctccctaaaggtaaccactattctgagtccaatcatcaaggttttgcttttctttttagctaagtatgcattcctcaatagtagacagtacaacatgtttataacaagccaattacattatgttctttgcatgttctaaagttgtgtatgtgtgtgcacatctgagcacgtgcacatgtacacctgagccaaaaacacgagaacccactgatctcaccactggggcaagctaggtcagagcttagtgattcacactgaaattggcaaattggatttaacccaattaatagtgtgtgtgtggcaggagtcatgtccctcacatcctttgtacaaatgaaaattactcttaattccttcagatttataataactctgtactttggtttcagggtgacatttgggaaggattttgtttagaattaatggagtggcacattttgcagcctttttgcttgattgcatgtaatggaaatgccctatattttcctgcaaaataagtactaaattcattatcgttaagcaaatgtacaatatgctcaggcaccgcagagagctgggcacgggcccatgtgagcatcactttggaagtagggctcttcaacagggacccttgaactttaaagaaaggaacttctttttgccttctaattgatcatttagactattctggctaagtctgcccacatgtaattaccggctaattcaagcgaggaaaaatgtaagtcatttagaccaaagccaagcagtttctttgcgtgggttactcaagggcttgtggttacttgtatctcctctatgtgaacttgactttgaaagacagagctctagtgtgccagcctgctaagtcctgtaagaatagggaagggcggaggggggtgggcagtgactaggggacgagaagcatggggaaaatatttgcactctaaacatacagagatagaggtggggcttgtggtacttaacacttgtagccatcaactgactgagaccttgggctaaataatcaattgtgctgatattacatctcgttatggaatgttcctaaatatgccaggtagacaccagcccaagtaccctcctccagaagtctgtgactaccttgtcactactttaggcccattccacaaagcccatctctggtttgagaattcattttgatctgtatctacaccacccaaagttaggcctcctataatgtccaaaacattcctttcagcctttttatttcttactgtactgtctcttactgtactgtctatctgcagtaattgaggacccataaaatttagataactacatgtctttgctcttagaattgtcactcagcataatgagcatttaacatacaaaggcaatgtactgttttgtgttgatctatgtaaaagaatacaattcttttttacat

SEQ ID NO: 12122 - protein, 372 aa, Homo sapiens
MATSPQKSPSVPKSPTPKSPPSRKKDDSFLGKLGGTLARRKKAKEVSELQEEGMNAINLPLSPIPFELDPEDTMLEENEVRTMVDPNSRSDPKLQELMKVLIDWINDVLVGERIIVKDLAEDLYDGQVLQKLFEKLESEKLNVAEVTQSEIAQKQKLQTVLEKINETLKLPPRSIKWNVDSVHAKSLVAILHLLVALSQYFRAPIRLPDHVSIQVVVVQKREGILQSRQIQEEITGNTEALSGRHERDAFDTLFDHAPDKLNVVKKTLITFVNKHLNKLNLEVTELETQFADGVYLVLLMGLLEGYFVPLHSFFLTPDSFEQKVLNVSFAFELMQDGGLEKPKPRPEDIVNCDLKSTLRVLYNLFTKYRNVE

SEQ ID NO: 12123 - DNA, 2918 bp, Homo sapiens
  CDS (73)..(855)
gaggctcggccgcctgagccgcggacggtttgctgagcccgttagtgcgcccggccgagacacgccgccgccatgtcccgctacctgcgtccccccaacacgtctctgttcgtcaggaacgtggccgacgacaccaggtctgaagacttgcggcgtgaatttggtcgttatggtcctatagttgatgtgtatgttccacttgatttctacactcgccgtccaagaggatttgcttatgttcaatttgaggatgttcgtgatgctgaagacgctttacataatttggacagaaagtggatttgtggacggcagattgaaatacagtttgcccagggggatcgaaagacaccaaatcagatgaaagccaaggaagggaggaatgtgtacagttcttcacgctatgatgattatgacagatacagacgttctagaagccgaagttatgaaaggaggagatcaagaagtcggtcttttgattacaactatagaagatcgtatagtcctagaaatagaccgactggaagaccacggcgtagcagaagccattccgacaatgatagattcaaacaccgaaatcgatctttttcaagatctaaatccaattcaagatcacggtccaagtcccagcccaagaaagaaatgaaggctaaatcacgttctaggtctgcatctcacaccaaaactagaggcacctctaaaacagattccaaaacacattataagtctggctcaagatatgaaaaggaatcaaggaaaaaagaaccacctagatccaaatctcagtcaagatcacagtctaggtctaggtcaaaatctagatcaaggtcttggactagtcctaagtccagtggccactgatagtataaaccatggtcatttttaggcatgtatcattcatttactcatagtttggtttacttaaattatcaggaatacaatgttgcaatgatgcttaaaaaacacttgttagttttccctgtaccaggcaatggttataattaaaatgatatgctgttgagaagccactcttaagagtccagtttgtttaatgttatgggcagctaccaatttgtggtgtctctgtatatttttgtaaagattctcattttttatgcttgaagtatttggtgaaaagatgttggttgaccataatttgcaacattgtctcattaaaaataaactttcatattcatatttggtagaactgttaacctagaaatgtagcttgctaataagatagaatgatacaaaagtgaagtagtagccacagtacaacactgactgctcagacacatttaggttcagggtggacctttatgtcttgtcaagatgtctaggcccggctgggcgtggtggctcacacctgtaatcccagcactttgggaggccgaggcgggcggatcacgaggtcaggagttcgagaccagcctgaccaacacggtgaaaccccgtctctactaaaaatacaaaaattatccgggcatggtggcacatacctgtaatctcagctactcaggaggctgaggcaagagaatcgcttgaacctgggaggtagaagttgcagtgagccaaaatcacgccactgcactccagcctgggcaacagagtgagactccgtctcaaaaaaaaaaaaaaaaccggatgtctaggccaatgataattatttttgatgcagtgtggattagttcttttgttaaccccactgtcttggggaatgatgccagctgggaaattgagtttttgactgaaacatggagccttcactgctttttttctggttcctatgaagatttggaacatagaaaacacaaaaactcaccttaaaatttgagcaggtcgttgatggcaaaaataattttaaggaaaaaggaatattcttatgtagttattctaaagtttaaggagcgttgttgaccataatattgcttagttttcttactgctgttaagtaagtaaattgtttcaaagtaggttttgtgtgtgtgtgcctagtgtaaaagaactgaaattttgatgcttacagcacttggctcgtgcatttgtatcaaaatttgcctgcctctttatgagggaggcctgcttttcacacctcagtttatttaatacgaggcaagttgtaagacaacactcattctaggtgattctgtggtgccatgaaatttaaggtaatttggggaaaaggattagtcagttttaagcaagagtcacatcttttgagctttcgattatcagtgtagtacctgactaaaaatgaagtaatacccttaaaccatttataatttctagtatttctctgaaagatcgttttggggacaaaagtgacttgacatgtccaatttcatttcagaataaaaagctagcatctttaaaaatctcagattgcttgcttacagatacaagtaagaattatggacaaacgattccttttagaggattacttttttcaatttcggttttagtaatctaggctttgcctgtaaagaatacaacgatggattttaaatactgtttgtggaatgtgtttaaaggattgattctagaacctttgtatatttgatagtatttctaactttcatttctttactgtttgcagttaatgttcatgttctgctatgcaatcgtttatatgcacgtttctttaatttttttagattttcctggatgtatagtttaaacaacaaaaagtctatttaaaactgtagcagtagtttacagttctagcaaagaggaaagttgtggggttaaactttgtattttctttcttatagaggcttctaaaaaggtatttttatatgttctttttaacaaatattgtgtacaacctttaaaacatcaatgtttggatcaaaacaagacccagcttattttctgcttgctgtaaattaagcaaacatgctataataaaaacaaaatgaagg

SEQ ID NO: 12124 - protein, 261 aa, Homo sapiens
MSRYLRPPNTSLFVRNVADDTRSEDLRREFGRYGPIVDVYVPLDFYTRRPRGFAYVQFEDVRDAEDALHNLDRKWICGRQIEIQFAQGDRKTPNQMKAKEGRNVYSSSRYDDYDRYRRSRSRSYERRRSRSRSFDYNYRRSYSPRNRPTGRPRRSRSHSDNDRFKHRNRSFSRSKSNSRSRSKSQPKKEMKAKSRSRSASHTKTRGTSKTDSKTHYKSGSRYEKESRKKEPPRSKSQSRSQSRSRSKSRSRSWTSPKSSGH

SEQ ID NO: 12125 - DNA, 2897 bp, Homo sapiens
  CDS (88)..(2640)
aagtcacgtgctgtgacagtagctggggtgaggccgtcgtcgccgcacgggctggttggggctgtgtctgtgggaggcgccggggtgatggcggtggagactctgtccccggactgggagtttgaccgcgttgacgacggctcgcagaaaattcatgccgaagtccaacttaagaattatgggaaatttcttgaggagtatacctctcaactgagaagaattgaggacgctctggatgactcaattggagatgtttgggatttcaatcttgatcctatagcattaaagcttttgccttatgaacagtcctctcttttggaactcataaagactgaaaacaaggtcttaaacaaagtcatcactgtttatgctgcactttgttgtgaaatcaagaaattaaaatatgaggctgaaactaaattttacaatggtctcttgttttatggagaaggagctacagatgccagcatggtggaaggtgattgccaaattcaaatggggagatttatttcattcttacaggaactgtcttgctttgttacgaggtgctatgaagtggtgatgaacgtagtccaccagttggctgccctctatatcagtaacaagattgcacccaaaattatagagacaactggagttcattttcagactatgtatgagcacttgggagaactgctaacagttttgctcaccctggatgaaattattgataatcatatcacactgaaagaccactggactatgtacaaaaggttactgaaatctgtccatcacaatccttcaaaatttggaattcaggaagaaaaattaaagccatttgaaaagttcttgctgaagctagaagggcaattactggatggaatgatattccaggcctgtatagaacaacaatttgattctctcaatggaggagtatctgtgtcaaaaaatagtacttttgctgaggaatttgcacatagtattcagtcaatttttgcaaatgtagaagccaaacttggagaaccttctgaaattgaccagagagacaagtatgttggaatttgtggactctttgtattgcactttcagatttttcgaactattgataaaaagttttataagtctttattggacatttgtaagaaggtaccagccatcactctaactgctaatattatttggtttcctgataattttctgatccagaaaataccagcagctgccaaactgctagacagaaaaagtcttcaagccattaaaatacacagggatacttttctacaacagaaagctcaatcacttaccaaagatgtacagtcttactacgtctttgtgagctcatggatgatgaaaatggaatctattttgtctaaagagcagagaatggataaatttgctgaagatctcaccaatagatgtaatgtttttatacagggcttcttgtatgcatatagtattagtaccattattaaaaccacaatgaatctctacatgtccatgcaaaagccaatgaccaaaacctcagttaaggcattgtgcaggcttgttgaacttctcaaggcaatagagcatatgttctacaggagaagcatggttgtggctgattcagtttcacatataacacagcaccttcaacatcaggctcttcattctatttctgtggccaagaaaagagtgatttctgacaaaaaatacagcgaacagcgtcttgatgtgctctctgctctagttttggctgaaaacactctaaatggaccaagcacaaagcaacggcgacttattgtttctttggcactaagtgttggcacacaaatgaaaacatttaaagatgaagaactctttccacttcaagtagtcatgaaaaaactggatcttattagtgaacttagagaacgagtccaaacacaatgtgactgttgttttttataccggcatcgagctgtcttcccaatttatttagatgatgtatatgaaaatgctgttgatgcagccagattacattacatgttcagtgctttgcgcgactgtgtacctgctatgatgcatgcaaggcatttagagtcctatgagatacttctggattgctatgacaaggaaattatggaaattttaaatgagcatttgctggacaaattatgcaaagaaatagagaaagatctgcgactttctgtgcatactcatttaaagctggatgaccgaaaccctttcaaagttggcatgaaagacctggctctttttttctctctgaatccaattcggtttttcaatcgtttcattgacattcgggcttacgtaactcactacctagacaagactttctacaatctaacaactgtagcccttcatgactgggccacttatagtgagatgagaaacttagctgctcagcgttatggactggttatgacagaggcacatcttcccagtcagactttggaacagggccttgatgttttagaaattatgagaaacattcatatatttgtgtcccgatacctctataatctcaacaatcagatttttattgaacgaacaagcaataacaagcatttgaatactattaatattcggcatattgctaattcaattcgaacacatggcacgggaattatgaatacaactaaatgggcattcaccgcttggcgtggtggcccacgcttgtaatcccagcactttgggaggctgaagcaggaggatcacctgaggttgggagttcaagaccagcctgaccaacatggagaaaccccatctctactaaaaatacaaaattagccaggcgtggtggcgggcgcctgtaatcccagctgcttgggaggctgaggcaggagaatcgcttgaacctgggaggcagaggttgcagtgagctgagattgcgccattgcactccagcttgggcagcaagagcgaaactccatctc

SEQ ID NO: 12126 - protein, 851 aa, Homo sapiens [sequence omitted]

SEQ ID NO: 12127 - DNA, 3138 bp, Homo sapiens
  CDS (65)..(1933)
ctcttgacagcggcggcggcgcagccggttccgggttcggcgcggggcggggatgtgaatcccgatggagcggcccgaggaaggcaagcagtcgccgccgccgcagccctggggacggctcctgcgtctgggcgcggaggagggcgagccgcacgtcctcctgaggaagcgggagtggaccatcgggcggagacgaggttgcgacctttccttccccagcaataaactggtctctggagatcactgtagaattgtagtggatgaaaaatcaggtcaggtgacactggaagataccagcaccagtggaacagtgattaacaagctgaaggttgttaagaagcagacatgccctttacagactggggatgtcatctacttggtgtacaggaagaatgaaccggaacacaacgtggcatacctctatgaatctttaagtgaaaagcaaggcatgacacaagaatcctttgagatggtgccttgctgtgttgcccaggctggtctaaaactcctgggatcaagtgatcctcccaccttggcctcccaaagtattgtgattacagggtctgggggtggtggcatctcccctaaaggaagtggtccctctgtggcaagtgatgaagtctccagctttgcctcagctctcccagacagaaagactgcgtccttttcgtcgttggaaccccaggatcaggaggatttggagcccgagaagaagaaaatgagaggagatggggaccttgacctgaacgggcagttgttggtcgcacaaccgcgtagaaatgcccaaaccgtccacgaggacgtcagagcagcggctgggaagccagacaagatggaggagacgctgacatgcatcatctgccaggacctgctgcacgactgcgtgagtttgcagccctgcatgcacacgttctgcgcggcttgctactcgggctggatggagcgctcgtccctgtgtcctacctgccgctgtcccgtggagcggatctgtaaaaaccacatcctcaacaacctcgtggaagcatacctcatccagcatccagacaagagtcgcagtgaagaagatgtgcaaagtatggatgccaggaataaaatcactcaagacatgctgcagcccaaagtcaggcggtctttttctgatgaagaagggagttcagaggacctgctggagctgtcagacgttgacagtgagtcctcagacattagccagccatacgtcgtgtgccggcagtgtcctgagtacagaaggcaggcggcgcagcctccccactgcccagcacccgagggcgagccaggagccccacaggccctgggggatgcaccccccacgtccgtcagcctgacgacagcagtccaggattacgtgtgccctctgcaaggaagccacgccctgtgcacctgctgcttccagcccatgcccgaccggagagcggagcgcgagcaggacccgcgtgtcgcccctcagcagtgtgcggtctgcctgcagcctttctgccacctgtactggggctgcacccggaccggctgctacggctgcctggccccgttttgtgagctcaacctgggtgacaagtgtctggacggcgtgctgaacaacaacagctacgagtcagacatcctgaagaattacctggcaaccagaggtttgacatggaaaaacatgttgaccgagagcctcgtggctctccagcggggagtgtttctgctgtctgattacagagtcacgggagacaccgttctgtgttactgctgtggcctgcgcagcttccgtgagctgacctatcagtatcagcagaacattcctgcttccgagttgccagtggccgtaacatcccgtcctgactgctactggggccgtaactgccgcactcaggtgaaagctcaccacgccatgaaattcaatcatatctgtgaacagacaaggttcaaaaactaagcatccagaggccctgagcagctttcagcactggaggtgaagagagcgtgtttttaaaatacagaggcaagcacgtcaaggtgttttcacagccccctgagggaagggacgcagggtctccgacaggtgctctggggtgactcttctgtggagctttaccctctgagtgagaccctccccagagccccgggggccgcagcccgccctcctggtgagcgctgggcagggctcgtggtggcatcagcagcagagacgaagcctttctgtaacatgcggccgtcctgccgagaggggcagttttgctcttttgtacattttccgaaactacagttaaagcggaagtctgttttcaggaaaagtttcaagggagaagggcaagtttatcaaaaacattgtttcaggagaagggagcataagtttacagcctacaggacgtacacaatatcctgctgctgggaaaaccacagcattttatctattttttattttaataggtttggtgcttatcttctaataagatttaaatgtcacaaactgtagcacaaataatataatttataatttacaaattgactaaaattgggtatagtatggtatttgaaagaataagcatatgcttctgtttattaaaaaaagaaaccttccaatgtccaaaactgctaaccctcgacgtggccgccaagttagtcgctccttgctaaccggtgagtgaccgcggccccgagcctggggctggacgcaggtcccaggacatgctgctcccttgtgtgagtgaccgcggccccgagcctggggctggacgcaggtcccaggacgtgctgctcccttgtgtgagtgaccacggccccaagcccagggctggaggcaggtcccaggacgcgccgctccctcatgctgcccgggcccttcctccaagaccctacagagcctgaggggcaccttggcttccgcctgtgctagctttgccatgtcatctggaataatacttgaaattttgattcttggaaaaaaaagtttcttatcttttgttgaaatcacctgttatccttgtttgtaaactgataacttttttgcttcttctcaggaatacagttttcaactgttgtcttgctcttgatagaaactgagaagcagcaatctgtatttgtggaggaaagtcctctcttttgcatattctaataaatgagccgcgtttgctcctc

SEQ ID NO: 12128 - protein, 623 aa, Homo sapiens
MERPEEGKQSPPPQPWGRLLRLGAEEGEPHVLLRKREWTIGRRRGCDLSFPSNKLVSGDHCRIVVDEKSGQVTLEDTSTSGTVINKLKVVKKQTCPLQTGDVIYLVYRKNEPEHNVAYLYESLSEKQGMTQESFEMVPCCVAQAGLKLLGSSDPPTLASQSIVITGSGGGGISPKGSGPSVASDEVSSFASALPDRKTASFSSLEPQDQEDLEPEKKKMRGDGDLDLNGQLLVAQPRRNAQTVHEDVRAAAGKPDKMEETLTCIICQDLLHDCVSLQPCMHTFCAACYSGWMERSSLCPTCRCPVERICKNHILNNLVEAYLIQHPDKSRSEEDVQSMDARNKITQDMLQPKVRRSFSDEEGSSEDLLELSDVDSESSDISQPYVVCRQCPEYRRQAAQPPHCPAPEGEPGAPQALGDAPPTSVSLTTAVQDYVCPLQGSHALCTCCFQPMPDRRAEREQDPRVAPQQCAVCLQPFCHLYWGCTRTGCYGCLAPFCELNLGDKCLDGVLNNNSYESDILKNYLATRGLTWKNMLTESLVALQRGVFLLSDYRVTGDTVLCYCCGLRSFRELTYQYQQNIPASELPVAVTSRPDCYWGRNCRTQVKAHHAMKFNHICEQTRFKN

SEQ ID NO: 12129 - DNA, 1170 bp, Homo sapiens
  CDS (71)..(1147)
agagtagaggcggcggcggcggcggccggacccagactggtagtgaggcgttggaccccgagccgctgcaatgccgctggagctggagctgtgtcccgggcgctgggtgggcgggcaacacccgtgcttcatcattgccgagatcggccagaaccaccagggcgacctggacgtagccaagcgcatgatccgcatggccaaggagtgtggggctgattgtgccaagttccagaagagtgagctagaattcaagtttaatcggaaagccttggacaggccatacacctcgaagcattcctgggggaagacgtacggggagcacaaacgacatctggagttcagccatgaccagtacagggagctgcagaggtacgccgaggaggttgggatcttcttcactgcctctggcatggatgagatggcagttgaattcctgcatgaactgaatgttccatttttcaaagttggatctggagacactaataattttccttatctggaaaagacagccaaaaaaggtcgcccaatggtgatctccagtgggatgcagtcaatggacaccatgaagcaagtttatcagatcgtgaagcccctcaaccccaacttctgcttcttgcagtgtaccagcgcatacccgctccagcctgaggacgtcaacctgcgggtcatctcggaatatcagaagctctttcctgacattcccatagggtattctgggcatgaaacaggcatagcgatatctgtggccgcagtggctctggggaccaaggtgttggaacgtcacataactttggacaagacctggaaggggagtgaccactcggcctcgctggagcctggagaactggccgagctggtgcggtcagtgcgtcttgtggagcgtgccctgggctccccaaccaagcagctgctgccctgtgagatggcctgcaatgagaagctgggcaagtctgtggtggccaaagtgaaaattccggaaggcaccattctaacaatggacatgctcaccgtgaaggtgggtgagcccaaaggctatcctcctgaagacatctttaatctagtgggcaagaaggtcctggtcactgttgaagaggatgacaccatcatggaagaattggtagataatcatggcaaaaaaatcaagtcttaaaaataaagtgccattctctg

SEQ ID NO: 12130 - protein, 359 aa, Homo sapiens [sequence omitted]

SEQ ID NO: 12131 - DNA, 2849 bp, Homo sapiens
  CDS (76)..(1395)
actgcagcctccatcttggaagcggccgccggcgcctagaactgtatttcagaaaaaagaaactacagttttagcatgcagaaaggaaaagggagaacaagccggatcagaagacgaaaactctgcggaagttctgaatcaagaggagtgaatgagagccacaagtctgaatttatagagctgaggaagtggctgaaagctaggaagtttcaagattcaaacttagcgcctgcttgttttccaggtacaggaagagggctgatgagtcaaacatccctgcaggagggacagatgattatttcgttgcctgagagttgcctgctcaccacggacacagtgattcgaagctacttaggggcatacattactaagtggaagcctcctccatctcctctgctggcgctgtgcacctttttagtttcagaaaagcatgctgggcaccgatctctttggaagccttacctggagattttacccaaggcgtatacctgccctgtttgtttggagccggaagtggtgaaccttcttcccaaatctttaaaagcaaaggctgaagagcagagagcccacgtgcaggagttctttgcttcctccagagactttttctcttctctgcagcctctgtttgcggaggctgttgacagcatcttcagctacagtgccctgctgtgggcttggtgcaccgtcaacaccagagccgtgtacctgaggcccaggcagcgggaatgcctttctgcagagccggacacctgtgcactcgctccgtacctggacctgctgaatcatagcccacatgtccaggtaaaagcagcgtttaatgaagaaactcattcttacgaaattagaacgacttcacgttggagaaagcatgaagaggtattcatctgttacggccctcacgataatcaacggctgttcctggaatacggatttgtttctgtccataatcctcatgcttgtgtttatgtctcaagagaaatacttgttaaatatcttccatcaacagataaacagatggacaaaaagatttctattttaaaggatcatggctatatagaaaatttgacatttggatgggatggaccatcttggaggctactcacagcccttaagttgttatgtctggaagctgagaaatttacatgctggaaaaaagtacttcttggggaggtaatttcagatacgaatgagaagacaagtttggacatagcccagaaaatatgctattatttcatagaagagactaatgctgtgcttcaaaaggtgtctcatatgaaggatgaaaaagaggccctgataaaccaactaactttggtggaatccttgtggacggaagagctaaagattctcagggcatctgccgagaccctgcacagtttgcaaacagcttttacctgatttcaccgaagcgcatttggtcacctcctctgaaacaaaagttaattttgaagagcatcatcatgggctggggtggtggctgcccccaggacatgcaggatttctgcagggggcagcacaggttctgggattgtgaggctgtgagtgaaggtggacaagctgtctggatggcaggtctaatgctcttccgaataaagtgctgaactgtgaggagagaggcggactgtgaggcagccaggagccagctgcgtccgtgtgtggtctgtcaccacggggcctgcttcttatctgacacagcagctatcagagtctagtggttgtgcttttaagatgctctgataccattgggttaaggggcagattggcggtgggtgtggggcagtgtgaggtagtcctggatccccgccagggtggcccagacgccagcccttccctgtgtggctgcactgaggtgggtgttgaagagccccctaggggacacacagcttccaggaggagggaatgtcctctaagcatgctcctggcctctcaaggtggcgcttgtctaattattcacttgggaagaatgactagctcagccagcggctctttctgctttgttctggcgactttcctgggcaggcctttccacctggggagctggctcatcctgcacagctgggccgtggtgggcctgtctgcttgattctggggttcagtgtaggtcagctgatggcgaaccatggtggtggtttggcttctgttcttattcttgagttttgataccacgcagaccttgggtggggagagcttcctgcacagctctcagcggcctgtggccttggaactgcctgcgtaagtaacggaggggctgctggtcctgttcaggcccgtgctggggacgccgcttagacaatgttgcccagagtcctgtttaccctcccagggttcattcttcccaagaactcaaattcctttctcattggagcctagtgaaaccaaatgaacgggacctgctggcctcaggaggcaggcagagtttaaaataaaactttctcatgatttcttgaacatctttccctgtttgtatatacactttgtgtttatttttcagtagctgcagtatattttttttcaatattcagtataatgcagtgtatttcatcatatgctgtatggagagtgggcagacttctgtggagggcccgatagtaaccatttgaagctttctggacctgtggtcttagtcccagcgattctgcagagcggccatcggcagcatgtcaaccatttgcatggctgggctccagggaaactactgacaacgacaggtggtgggccatagtttcctgacccctgtgctatgccagaatttctttttcctcctccctatgagtggacctaaatatgttaattccttttcacctttcaaaacggacagccccttgaacattaaaaacttcgcagaccct

SEQ ID NO: 12132 - protein, 440 aa, Homo sapiens
MQKGKGRTSRIRRRKLCGSSESRGVNESHKSEFIELRKWLKARKFQDSNLAPACFPGTGRGLMSQTSLQEGQMIISLPESCLLTTDTVIRSYLGAYITKWKPPPSPLLALCTFLVSEKHAGHRSLWKPYLEILPKAYTCPVCLEPEVVNLLPKSLKAKAEEQRAHVQEFFASSRDFFSSLQPLFAEAVDSIFSYSALLWAWCTVNTRAVYLRPRQRECLSAEPDTCALAPYLDLLNHSPHVQVKAAFNEETHSYEIRTTSRWRKHEEVFICYGPHDNQRLFLEYGFVSVHNPHACVYVSREILVKYLPSTDKQMDKKISILKDHGYIENLTFGWDGPSWRLLTALKLLCLEAEKFTCWKKVLLGEVISDTNEKTSLDIAQKICYYFIEETNAVLQKVSHMKDEKEALINQLTLVESLWTEELKILRASAETLHSLQTAFT

SEQ ID NO: 12133 - DNA, 2106 bp, Homo sapiens
  CDS (134)..(1567)
accaggcgcggtccggaggccgagggcgaccacagcagcctccgcctcctgctgctccggactattctgcgctgggctagtcggcggtgacccggactgcgcccggcagtggcttcgcgggcgacgcgtcgccatgggctctcgctggagcagcgaagaggagaggcagccgctgctggggcccgggctcgggcctgggctgggggcctcctggagaagccgggaggcggcggcggcggcgctgcccgcggcggtcccgggtcccgggcgggtatacgggcgccgctggctggtgctgctgctcttctcgctgctggcgttcgttcagggcctggtctggaacacctggggtcccatccagaactcggcgcgccaggcctacggcttctccagctgggacatcgcgctgctcgtgctgtgggggcccatcggcttcctgccctgcttcgcgttcatgtggctcctggacaagagaggtctccggataactgtgctcctgacatccttccttatggttttgggaactggtctaagatgcatacctatatcagacttaatccttaaaagaagattaattcatggaggacagatgttaaatggattggcaggtccaactgtaatgaatgcagcaccatttctctctacgacgtggttttctgcagatgaaagggccacagccacagctattgcatcaatgctcagttatcttgggggagcatgtgcatttttagttggaccacttgttgttccagctcccaatgggacatcacctcttcttgctgcagagagcagcagggcgcatattaaagatcgcatagaggctgtgttatatgcagaatttggagttgtctgcttaatattttctgcaacactagcttatttcccaccccgacctcctcttcctcccagtgttgctgcagctagccagcggctgagttatcggagaagcgtttgtagattattaagcaattttcgatttttgatgattgctttagcatatgccataccacttggtgtatttgctggctggtctggagttctggacttaattttaacaccagcgcatgtcagccaagtagatgctggctggattggattttggtccatagttggaggctgtgttgttggaatagctatggcaaggtttgcagattttatcaggggtatgctgaaactaattcttctcctcctgttttcgggagctacactgtcatccacgtggttcaccctgacctgtttgaacagcatcacacacctacctttaaccacagtgacattgtatgcctcctgtattctcctgggagtgttcttgaatagcagcgtgcctatattttttgagctttttgtggaaactgtctacccagttccagaaggaattacttgtggagttgtcacttttttaagtaatatgtttatgggagtacttttattttttctcacattttatcatacagagttgtcttggttcaactggtgccttcccgggtcgtgtttgctcagtctcctcctcattctgtgcttcagggaatcctatgacagactctatcttgatgtggttgtctccgtttaatagcacagacttgaaggagtttaaaaggaggctggaaatcaatactgcacactgcacatttgctcagaattgcacatctaacaggaaaagagggagaagaaagaaacttcattcagaggttttgttaggttacagattatcacattaatttaattactactaggtaataataatgggagacttgagtgataataggggattttaaaactctacagatggcatacctgtgcctgcttctggggttggaagtgtgacttcttacacataaagcactacctaagtaattctctctctgttttgtgccagtgctaaactactgattacttgtaattatgaaaagaaataaagggtgtctatcatatgaagataacgccttccctaagtcacatatcagaataggaagatatgccactaacttctaaagaagttcaaaccctgtatccaattttaatgataaaatagccaagaggtatatcgatgatggaaattagccacatgtacactacattttttctaataaagccatttcttatatg

SEQ ID NO: 12134 - protein, 478 aa, Homo sapiens
MGSRWSSEEERQPLLGPGLGPGLGASWRSREAAAAALPAAVPGPGRVYGRRWLVLLLFSLLAFVQGLVWNTWGPIQNSARQAYGFSSWDIALLVLWGPIGFLPCFAFMWLLDKRGLRITVLLTSFLMVLGTGLRCIPISDLILKRRLIHGGQMLNGLAGPTVMNAAPFLSTTWFSADERATATAIASMLSYLGGACAFLVGPLVVPAPNGTSPLLAAESSRAHIKDRIEAVLYAEFGVVCLIFSATLAYFPPRPPLPPSVAAASQRLSYRRSVCRLLSNFRFLMIALAYAIPLGVFAGWSGVLDLILTPAHVSQVDAGWIGFWSIVGGCVVGIAMARFADFIRGMLKLILLLLFSGATLSSTWFTLTCLNSITHLPLTTVTLYASCILLGVFLNSSVPIFFELFVETVYPVPEGITCGVVTFLSNMFMGVLLFFLTFYHTELSWFNWCLPGSCLLSLLLILCFRESYDRLYLDVVVSV

SEQ ID NO: 12135 - DNA, 3935 bp, Homo sapiens
  CDS (1591)..(2013)
tacacatacaataggaattctctataattcccaaggacaggccataattgaaagaactaatagaacactcaaagctcaattggttaaacaaaaaaaaggaaaagacaggagtataacactccccagatgcaacttaatctagcactctatactttaaatgttttaaacatttatagaaatcagaccactacctctgcagaacaacatcttactggtaaaaggaacagcccacatgaaggaaaactgatttggtggaaagataataaaaataaaacatgggaaatggggaaggtgataacgtgggggagaggttttgcttgtgtttcaccaggagaaaatcagcttcctgtttggatacccactagacatttaaagttctacaatgaactcactggagatgcaaagaaaagtgtggagatggagacaccccaatcgactcgccaggtaaacaaaatggtgatatcagaagaacagaaaaagttgccttccatcaaggaagcagagttgccaatataggcacaattaaagaagctgacacagttagctaaaaaaaaaagcctagagaatacaaaggtgacaccaactccagagagtatgctgcttgcagctctgatgattgtatcaacggtggtaagtcttcccaagtctgcaggagcagctgcagctaattatacttactgggcctatgtgcctttcccacccttaattcgggcagttacatagatggataatcctattgaagtagatgttaataatagtgcatgggtgcctggccccacagatgactgttgccctgcccaacctgaagaaggaatgatgatgaatatttccattgggtatccttatcctcctgtttgcctagggaaggcaccaggatgcttaatgcctacaacccaaaattggttggtagaagtacctacagtcagtgctaccagtagatttacttatcacatggtaagtggaatgtcacagataaataatttacaggacccttcttatcaaagatcattacaatgtaggcctaaggggaaggcttgccccaaggaaattcccaaagaatcaaaaagcccagaagtcttagtctgcggagaatgtgtggctgatactgcagtgtagtacaaaacaatgaattttgaactatgatagactgggtcccttgaggccaattatatcataactgtacaggccagactcattcatgttcacaggccccatccatctggcccattaatccagcctatgacggtgatgtaactgaaaggctggaccaggtttatagaaggttagaatcactctgtccaaggaaatggggtgaaaagggaatttcatcaccttgaccaaagttagtcctgttactggtcctgaacatccagaattaggaagcttactgtggcctcacaccacattagaatttgttctggaaatcaagctataggaacaagagatcgtaagtcatattatactatcaacctaaattccagtctgacaattcctttgcaaaattgtgtaaaactcccttatattgctagttgtaggaaaaacatagttattaaacctgattcccaaaccataatctgtgaaaattgtggaatgtttacttgcattgatttgacttttaattggcagcaccgtattctactaggaagagcaagagagggtgtgtggatccttgtgtccatggaccgaccatgggaggcttcgctatccatccatattttaacggaagtattaaaaggaattctaactagatccaaaagattcatttttactttgatggcagtgattatgggcctcattgcagtcacagctactgctgcggctgctggaattgctttacactcctctgttcaaactgcagaatacgtaaatgattggcaaaagaattcctcaaaattgtggaattctcagatccaaatagatcaaaaattggcaaaccaaattaatgatcttagacaaactgtcatttggatgggagaggctcatgagcttggaatatctttttcagttacgatgtgactggaatacatcagatttttgtgttacaccacaagcctataatgagtctgagcatcactgggacatggttagatgccatctgcaaggaggagaagataatcttactttagacatttcaaaattaaaagaattttttttttctttgagacagagtctcgctctgtcgcccaggctggagtgcagtggcgtgatctcagctcactgcaagttccgcctcctgggtttacaccattctcctgcctcagcctcccaagtagttgggactacaggagcccaccaccatgcctggctaattttttttgggtttttaatagagatggagtttcaccgtgttagccaggatggtctcgatctcctgaccttgtgatctgcccaccttggcctcccaaagtgctgggattacagtcgtgagccaccgtgcccagccaagaaaaaatttttgaggcatcaaaagcccatttaaatttggtgccaggaacggagacaatcgtgaaagctgctgatagcctcacaaatcttaagccagtcacttgggttaaaagcatcagaagtttcactattgtaaatttcatattaatccttgtatgcctgttctgtctgttgttagtctacaggtgtatccagcagctccaaagagacagcaaccagcaagaatgagccatagtgacgatggtggttttgtcaaaaagaaaagggggggatatgtaaggaaaagagagatcagactttcactgtgtctatgtagaaaaggaagacataagaaactccattttgatctgtactaagaaaaattgttttgccttgagatgctgttaatctgtaactttagccccaaccctgtgctcacggaaacatgtgctgtaaggtttaagggatctagggctgtgcaggatgtaccttgttaacaatatgtttgcaggcagtatgtttggtaaaagtcatcgccattctccattctcgattaaccaggggctcaatgcactgtggaaagccacaggaacctctgcccaagaaagcctggctgttgtgggaagtcagggaccccgaatggagggaccagctggtgctgcatcaggaaacataaattgtgaagatttcttggacatttatcagtttccaaaattaatacttttataatttcttacacctgtcttactttaatctcttaatcctgttatctttgtaagctgaggatatacgtcacctcaggaccactattgtacaaattgattgtaaaacatgttcacatgtgtttgaacaatatgaaatcagtgcaccttgaaaatgaacagaataacagtgattttagggaacaaaggaagacaaccataaggtctgactgcctgaggggtcgggcaaaaagccatatttttcttcttgcagagagcctataaatggacgtgcaagtaggagagatattgctaaattcttttcctagcaaggaatataatactaagaccctagggaaagaattgcattcctggggggaggtctataaacggccgctctgggagtgtctgtcctatgtggttgagataaggactgagatacgccctggtctcctgcagtaccctcaggcttactaggattgggaaaccccagtcctggtaaatttgaggtcaggccggttctttgctctgaaccctgttttctgttaagatgtttatcaagacaatacatgcaccgctgaacatagacccttatcaggagtttctgattttgctctggtcctgtttcttcagaagcatgtcatctttgctctgccttctgccctttgaagcatgtgatctttgtgacctactccctgttcatacacccctccccttttaaaatccctaataaaaacttgctggttttgtggctcaggggggcatcatggacctaccaatacgtgatgtcacccccggtggcccagctgt

SEQ ID NO: 12136 - protein, 141 aa, Homo sapiens
MFTCIDLTFNWQHRILLGRAREGVWILVSMDRPWEASLSIHILTEVLKGILTRSKRFIFTLMAVIMGLIAVTATAAAAGIALHSSVQTAEYVNDWQKNSSKLWNSQIQIDQKLANQINDLRQTVIWMGEAHELGISFSVTM

SEQ ID NO: 12137 - DNA, 4823 bp, Homo sapiens
  CDS (38)..(877)
ttatttgaatattggtgaggaaggctgcacttgtgaaatgaatgggctcaccctcccaggtcctgtgggatttgcttcaaccaccactatcaaggatgcccctaagccagccactccatcctctagcagtgggattgcctctgagttcagcagtgagatgtccacctcagaggtgagcagtgaagtggggtccactgcttctgatgagcataatgctgggggcctggacactgccttgcttccgaggccagagcggcgctgcagcctccacccaacacccacctctgggctgtttcagcgccagccttcttctgctaccttctccagtaaccagtctgacaacggcctggacagtgatgatgaccagcccgttgagggggtcataaccaatggcagcaaggtagaggtggaagtagacatccactgctgcagggggagggatctggagaactcaccccctctcatagagagttctcctaccctgtgttctgaggaacatgctagagggtcgtgttttgggatccgaagacagaacagtgtgaatagtggcatgctcctgccaatgagcaaggacaggatggagttacagaagtctccctccacctcctgcctctatgggaagaaactctccaatggctctattgtgcccctagaggacagcctgaacctcattgaagtggccacagaagtgcccaagaggaaaactggctattttgctgcccccactcagatggaaccagaggaccagtttgttgtgcctcatgacctggaagaagaagtgaaggaacaaatgaaacagcaccaggacagccggctcgagcctgagccccatggagaggatcggaccgagcccccggaggagttcgacacagcactgtgactgccccactgggcacagtgtgggaggaggctgtgcagggttggggtagggacttgctagaggcattctgcctctacatttctttttgtttgttcgttttttttttgtttgtttgttttgagacggagtcttgctcagtcgctcaggctggagtgcaatggtggggtctcgggtcactgcagcctctgtccctgggttcaagccattctcctgtctcagcctcccgagtagctgggattacaggcacctgccattatgcccggctaagttttatttttttttttagagacggggtttcaccatgttggccaggctggtgttgaactcttgacctcaggtgatccaccctcctctgcctcccaaagtgctgtgattacaggcctcagccaccatgcccagccctgcgtctacatttctaaaccatagctgtgtggggttgaactcggagccaaaaagtgtgagagccatcaggggctggctctggataaactggtagccactatcagtgttaagtttcacatttaacctgcattggaagtcccaggggtactgggaagaaagcagctgttctgtatcagtcctaccacctgccattaaccctttctctcctaggatcattttgagaatttgcctgcctgggcaggaaagggactatttctgtggaggaaaaaagtgaagattgattctctttactagttgctgctgatggatctctgtgacagagaaatcaccttatctcagactaatggggtgtgatgtgactagtcacatggcttttcattcttctctacgagaatacagcctatcaaaatgatgtctgttggaaatgtagaaccaatcaaacagataatttatgtatgtaatgtaatgagagcacttttcattgactgtgaactttctatttttgaatctgcactcgagccaatcttcttagaggcagcccggcaccttcatccataggcagagagagaactgggtgttggagacttattcgagggtataggaagggccctgtgaagttgatttaacttttggatgtcagactgtgaaagctcctgagaaacttggggtaataggatcttcttttggggatgaaaatggggaaggcgtgaggacctagactacttctccctagatcagaaaaagagaattaccccttgacaaatatgatacctgctaggtatttcccagggaaatttagggattggcctctttccctagcatgtggaggaattggcagacagcttcctaagggcggggagcgggggcccaaggccgacactgcttgcatccacgtgaccttaagttatggcagatgactctgaaacggactgaggccaatgagaacagatggatggagcactcaggttagacttgttccttctcctatgctggaggagagggatggttctctagaatgttggaggtgagttgagagctcgcctcttgaatgttgaacagtgtactcttctgaaaactgcatatccactttatgtggtttcagaatactgggctcaatactaagaaagacacttcattgagaaattcttaagcttacagaaaacctatactctttgcacattccacataaccctagcaaaatgcagtttcttcatacttctgtcactttttccattggaagatttgcttaggaaaattaattcctatttattcccacaaaatgttggcattgcttgattttacccaatggggaatgtgctttgaatttttggaacacttttacaattaaaaataaagtagggccatttttaatttgtttcatcagaaactatgttaaagagagggttaaatataaatatattttcgtgtgtatttttgggaagatttttgttcaaagcaatagtcaaaatcagatgacctgtccataataattatgtgtcttcatcttctcagaggccccatgctcatatgcacgtgtcattgggatacactcttgggggatttggtacactctaatggatgtctaatgttcaacccctcgagaatctgaacttgagtccccagattgtcaaactactggtcagctattgagaattttagaactcaggtctttgatttgaagtagggaacatagtggctcacacagagtttaggtgctgttagaaagatgggaacaagagtgttttgccaccttatttttatatgggaaattttttttaatgaagaaaaaatgaaaaataacaggatgatagtgatgagtgatgtaaaacatcttacttagatggcagaaccttcgggttgtagaatagtgatgtctaaaaattaaagttattttgggaatacaccactttaatagtatagtcttataaaaattattcattatggtgaacccttcttgtctgctattcgtttcccaacctacttattggaaccacctcaaaacccagttctgaaatgaccttaccaaaagtaaatgtatttattttttagtcagcagaactctgtaattccaaatgttgttctgtgtggtagaattttttttcaggaaccattaggttgtattgaaaatctttgttataggcgataccaaaactgattattcttttttgcagtctgctttaattcatgtccttctgcagttgctctgtattaaaacagggtaaaaaggccatagcccattatgaaaaatataatacaaaactctttgacctatgaggtaacttacagacattgtgttttctaaacaggctgtcagtgaaagcccgtatctgtctccaggtgaatgtaatttacttccgagtactttacccagaggatgtattccccaggtgggcagagtacagttgatctctagcacagacagagattctggcctctgcatattctcaggtctctgtgtgtacctcccattgagtagagaagcttaagataatttctgagagaagaacactgctgattgtgggagcagtttaggagtccatggaagaaagaaaaatacatgtgtcttggcagccatggtgtatttttgtccaaatggattggaaggatatttgaatatttgaatgttggtatgacataaagctgcagtgcactatagagtcaagtcattgaattaccactcctgatacagggctttattgtactactgtgaagtgtatgtgtgcaatacattggtgagttcatttactggtgtacggaagagccagcaggagcagcgtggtcattgctgggtgctattacagttgcttgtagtgagtgctgttttccaggagatggagccagttgggtgtggcagatctactgaatatcaaatgatgctcttcttcccatgtagaccttcagcaaaagccggtacttggaagccacaggctcaccttctctatctatccaataattattaatgaagagacctccataagggagcagctggctgttatcgataaatgtaccaattattaaataattagtctccaagccattcagtgatgtcttcagcatcactataggactgtctagtgtcactttttacttccttctgggtggaggctttccgactcccaatcatgaaggcaagttaatctttccagttagtgacttttgccccatagttggggtaagcacttcctagattgagaaaaagcagctacagtcaatcctgctctgtttgcctcatttggtgatcagtcagtcacacataagttccttgtattctaaatttcatgcacttctcccagatgctatagggttttctctcactgttgccaatggatgtcatccagacagtgggctcatatcttacggttttgtgcaatcattgtcgtattgtagtcttaagactcattatagtgtatttttgatatttttgaaatgtgttaaattttttaattcaataatatgagccagagcatgttgcagcaaatctattgtttgtaaaaataacaataacaataataaataaaataaagtggaatctttttcatgg

SEQ ID NO: 12138 - protein, 280 aa, Homo sapiens
MNGLTLPGPVGFASTTTIKDAPKPATPSSSSGIASEFSSEMSTSEVSSEVGSTASDEHNAGGLDTALLPRPERRCSLHPTPTSGLFQRQPSSATFSSNQSDNGLDSDDDQPVEGVITNGSKVEVEVDIHCCRGRDLENSPPLIESSPTLCSEEHARGSCFGIRRQNSVNSGMLLPMSKDRMELQKSPSTSCLYGKKLSNGSIVPLEDSLNLIEVATEVPKRKTGYFAAPTQMEPEDQFVVPHDLEEEVKEQMKQHQDSRLEPEPHGEDRTEPPEEFDTAL

SEQ ID NO: 12139 - DNA, 3118 bp, Homo sapiens
  CDS (59)..(2017)
gtgtggcgaggcggggaaggaagacacggtggaagaggaggaaggcaagtttaacctcatgctcatggagtgctccatctgcaatgaaatcatccaccctggatgccttaagattaaggagtcagagggtgtggtcaacgacgagcttccaaactgctgggagtgtccgaagtgtaaccacgccggcaagaccgggaaacaaaagcgtggccctggctttaagtacgcctccaacctgcccggctccctgctcaaggagcagaagatgaaccgggacaacaaggaagggcaggaacctgccaagcggaggagtgagtgtgaggaggcgccccggcgcaggtcggatgagcactcgaagaaggtgccgccggacggccttctgcgcagaaagtctgacgacgtgcacctgaggaagaagcggaaatacgagaagccccaggagctgagtggacgcaagcgggcctcatcgcttcaaacgtcccccggttcctcctctcacctctcgccgaggccccctctaggcagcagcctcagcccctggtggagatccagtctcacttacttccagcagcagctcaaacctggcaaagaagataagcttttcaggaaaaagcggcggtcctggaagaacgccgaggaccgcatggcgctggccaacaagcccctccggcgcttcaagcaggaacccgaggacgaactgcccgaggcgccccccaagaccagggagagcgaccactcccgctccagctcccccaccgcgggacccagcaccgaaggggccgagggcccggaggagaagaagaaggtgaagatgcgccggaagcggcggcttcccaacaaggagctgagcagggagctgagcaaggagctcaaccacgagatccagaggacggagaacagcctggccaacgagaaccagcagcccatcaagtcggagcctgagagcgagggcgaggagcccaagcggcccccgggcatctgcgagcgtccccaccgcttcagcaaggggctcaacggcaccccccgggagctgcggcaccagctggggcccagcctgcgcagcccgccccgtgtcatctcccggcccccaccctccgtgtccccgcccaagtgtatccagatggagcgccatgtgatccggccaccccccatcagccccccgcctgactcgctacccctggacgatggggcagcccacgtcatgcacagggaggtgtggatggccgtcttcagctacctcagccaccaagacctgtgtgtgtgcatgcgggtctgcaggacctggaaccgctggtgctgcgataagcggttgtggacccgcattgacctgaaccactgcaagtctatcacacccctgatgctgagtggcatcatccggcgacagcccgtctccctcgacctcagctggaccaatatctccaagaagcagctgagctggctcatcaaccggctgcctgggctccgggacttggtgctgtcaggctgctcatggatcgcggtctcggccctttgcagctccagttgtccgctgctccggaccctggatgtccagtgggtggagggactaaaggatgcccagatgcgggatctcctgtccccgcccacagacaacaggccaggtcagatggacaatcggagcaagctccggaacatcgtggagctgcgcctggcaggcctggacatcacagatgcctccctgcggctcatcatccgccacatgcccctgctctccaagctccacctcagttactgtaaccacgtcaccgaccagtctatcaacctgctcactgctgttggcaccaccacccgagactccttaaccgagatcaacctgtctgactgcaataaggtcactgatcagtgcctgtccttcttcaaacgctgtggaaacatctgtcatattgacctgaggtactgcaagcaagtcaccaaggaaggctgtgagcagttcatagccgagatgtctgtgagtgtccagtttgggcaagtagaagaaaaactcctgcaaaaactgagttagtccaaggataagtatgtaaatacggggcgggctctgggaggggagagactttacaaaaatgagggcttttattttccatttggaacgtgggacaacagaccacaacgcaattccattttgcaagtctttccaagggagaagctgttcaaccacccgtttgggggatgagtgagccgacactttcctttggtctttctgaatcgtaactgcactgctttctggaccatttctaaggcggcctttacaagaagacattcctgtcggagaggagggtggacttcggagaaattctcatactgaagcatgagcttaggagtttctgttagtggtagtggtgttttggacacttcattccttgcaacaccgaggttttgggtgttgacataaagtggaccacacaccacatctgctgccgtcttgacacttttttttgtttggttggttttgttacatcttacattatgcagaactatttttgtacaaattgtttaaaagttatttatgcaaggtttgaatgcataccagtgtttttattgttttgagattgccaattttcctgatttccttaaggtaggagagaatttaacgtgtacttcatcgacacaacccatctacaaatgtgcccagatctaacaaagtaggctaagaccttccacttaaaagcatgtttaactggaagttgagagtctgctttgtacctcaagagttacatgagcatgttgtggataaatgtaaattatagtcaaagtaagatactctgccaagtttcctctgtagagaattcacttttctcaaattttaaaatttcgacttcagcctttgcactcaggaggttctgctccagcatgagctcttgtacttacatagatctaatttatacagtgagtcaagacgtagaataaatgctcccacacagcctttcttttgcttttgcttctctcctctgaagtgtgagttgagttctcatttaggtttgtaacatggctatttcctagttgtaaagttctgcatttataagtgccattgttgtaaggtggtgtttcctagaccttccctgatgcgattttacctttgttgaatttgtataaacaattgtac

SEQ ID NO: 12140 - protein, 653 aa, Homo sapiens
MLMECSICNEIIHPGCLKIKESEGVVNDELPNCWECPKCNHAGKTGKQKRGPGFKYASNLPGSLLKEQKMNRDNKEGQEPAKRRSECEEAPRRRSDEHSKKVPPDGLLRRKSDDVHLRKKRKYEKPQELSGRKRASSLQTSPGSSSHLSPRPPLGSSLSPWWRSSLTYFQQQLKPGKEDKLFRKKRRSWKNAEDRMALANKPLRRFKQEPEDELPEAPPKTRESDHSRSSSPTAGPSTEGAEGPEEKKKVKMRRKRRLPNKELSRELSKELNHEIQRTENSLANENQQPIKSEPESEGEEPKRPPGICERPHRFSKGLNGTPRELRHQLGPSLRSPPRVISRPPPSVSPPKCIQMERHVIRPPPISPPPDSLPLDDGAAHVMHREVWMAVFSYLSHQDLCVCMRVCRTWNRWCCDKRLWTRIDLNHCKSITPLMLSGIIRRQPVSLDLSWTNISKKQLSWLINRLPGLRDLVLSGCSWIAVSALCSSSCPLLRTLDVQWVEGLKDAQMRDLLSPPTDNRPGQMDNRSKLRNIVELRLAGLDITDASLRLIIRHMPLLSKLHLSYCNHVTDQSINLLTAVGTTTRDSLTEINLSDCNKVTDQCLSFFKRCGNICHIDLRYCKQVTKEGCEQFIAEMSVSVQFGQVEEKLLQKLS

SEQ ID NO: 12141 - DNA, 3716 bp, Homo sapiens
  CDS (89)..(3028)
ggctgacttatgttttttggtgcagcattatgatttggcttacagttgctatcatactgcaaagaaagattttcttaatgatcaagcaatgctttatgcagctggtgccttggaaatggcagcagtgtctgcttttcttcaaccaggagcacctaggccatatcctgctcattacatggatacagcaattcagacatacagagatatctgcaagaatatggtgttggctgaaagatgtgtgttgcttagtgctgaacttttaaaaagccaaagcaaatattcagaggctgcagctctcctaatacggttgaccagtgaggattctgatcttcgaagtgcacttcttttggaacaggcagcacattgctttataaacatgaaaagtcccatggttagaaaatatgcatttcatatgatattggcaggccatcgatttagtaaagcagggcagaaaaagcatgctttacgctgttattgtcaagccatgcaagtttacaaaggaaaaggctggtctcttgcagaggatcacattaatttcactattgggcgccagtcctatactcttagacagctggataatgctgtgtctgcttttaggcatattctaattaatggaagtaaacaatctgctgctcaacagggggctttcctcagagaatatctttatgtttacaagaatgtaagtcagctgtcaccagatggtcctttgccacagcttcctttaccgtatattaacagttcagcaacacgggttttttttggccatgacagacgaccagcggatggtgaaaaacaagcagctactcatgtaagtcttgatcaagaatatgattctgaatcctctcagcagtggcgagaacttgaggaacaagttgtttctgtggttaacaaaggagtaattccatccaattttcatcccacacaatactgtttgaacagttactcagataattcaagatttccacttgcagttgtagaagaaccaattacagtggaagtggcttttagaaaccctttgaaagttctacttttgttgactgatttgtcattgctttggaagtttcatcctaaagatttcagtggaaaggataatgaagaagttaaacaactagttacaagtgaacctgaaatgattggagctgaagttatttcagagttcttaattaatggcgaagaatcaaaagtggcaagactaaagctctttccccatcacataggggagctgcatattctgggagttgtttataatcttggcactattcagggctctatgacagtagatggcattggtgctcttcccggatgtcacacaggaaaatattccttgagtatgtcagtccgagggaagcaggatttagaaattcaaggtcctcgacttaacaacacaaaagaagagaaaacatctgttaaatatggccctgatcgacgtttagatcccataatcacagaagaaatgccactgttggaggtgttctttatacattttcctacagggcttctctgtggagaaatccgaaaagcatatgtagaatttgtcaatgtcagcaaatgtccacttactggattgaaggttgtttctaaacgtccagagttctttactttcggtggtaatactgctgttctaacaccactaagtccctcagcttctgagaattgtagtgcttacaagactgttgtgacagatgctacctctgtgtgtacagcactcatatcatcagcttcttctgtagactttggcattggcacaggaagtcaaccagaggtgattcctgttccccttcctgacactgttcttctacccggagcctcagtgcagctgccaatgtggttacgtgggcctgatgaagaaggtgtccatgaaattaactttttgttttactatgaaagtgtcaaaaagcagacaaaaatacggcacagaatattaagacacactgcaattatttgtaccagtcggtctttaaatgtacgggccactgtctgcagaagtaattctcttgaaaatgaagaaggcagaggaggcaatatgctagtctttgtggatgtggaaaataccaatactagtgaagcaggcgttaaggaattccacatagtgcaagtatcaagtagtagcaaacactggaagttacagaaatctgtaaatctttctgaaaacaaagataccaaacttgccagtagggagaagggaaagttttgctttaaggcaataagatgtgagaaagaagaagcggccacacagtcctctgaaaaatatacctttgcagatatcatctttggaaatgaacagataataagttcagcaagcccatgtgcagacttcttttatcgaagtttatcttctgaattgaaaaaaccacaagctcacttgcctgtgcatacagaaaaacagtcaacagaggatgctgtgagattgattcaaaaatgcagtgaggtagatttgaatattgtcatattatggaaggcatacgttgtggaagacagtaaacagcttattttggaaggtcaacatcatgttattcttcgcactataggaaaagaagccttttcatatcctcagaaacaggagccaccagaaatggaactattgaaatttttcaggccagaaaacattacagtttcctcaaggccatcagtagagcagctttctagtctcattaaaacgagtcttcactacccagaatcatttaatcatccatttcatcaaaaaagcctttgtttagtaccagtcactcttttactttccaattgttctaaggctgatgtagatgtcatagttgatcttcggcataaaacaacaagtccagaagcactggaaatccatggatcattcacatggcttggacaaacacagtataaacttcaacttaaaagccaggagattcacagtctgcagctgaaagcatgctttgttcatacaggtgtttataaccttggaactcctagggtatttgccaagttatcggaccaagttacagtgtttgaaacaagtcagcagaattccatgcctgccctgatcatcatcagtaatgtgtgacaacttggaaatttgtactgaaatccacaataatcagtttttgctggatgggttttacagcagtatttgatatacctaacttgttatggaggttgattgatatctgatccctgcaaaatactttgacttgtcattttgttgatgatgcaaagcacgttggactgagaatacttaacattctttttctgtatttctttaaaccctgagaataatttacatgctcataatacaggatatcagcatatttgtgcaccttattaagccccatcttaagaaaacacaaagtctaagtctgctgttacaacttgtcaatggtatacgaatattaggagatgattctgagaaaggaaaggccttgttggcagtactcctgttaagccattagtctctaaattccagctttactgtgaagttctatagagtgttaaatacaaattttcctgtcttgcttcacacagttccttaaaatcagttttgaactttggtcatagagtcttcatatttcagtatttggtggtccctatgacttatacataactttgtaaaaagaaaaaaaaattttttctgatgctttgaatatagttttgaaaggagttttgacttttttcccctcattcatctcagtatagagtgcgctatttcacaatacaatttttgtcattaaaattaccatattctttattat

SEQ ID NO: 12142 - protein, 980 aa, Homo sapiens [sequence omitted]

SEQ ID NO: 12143 - DNA, 1134 bp, Homo sapiens
  CDS (301)..(990)
aatcatcttgttggccctgacctcgttggaaaacgaagctccccgcagggtcccggcctctagggctgctgtgcgggcgggggtggcctggagctatttccattcggcggcgggaacaggtgccggcgcctccgccccatccccaggggccgcctcccccggggcggcctccaggctgccgagacctataaaggcgccaggttttctcaatgaagccgggacgcactccggagcgcactgcgtggtcgcaccctacccgggctgccttggaagtcgtccccgccgcccctccgcaccggcatgaagctcatcgtgggcatcggaggcatgaccaacggcggcaagaccacgctgaccaacagcctgctcagagccctgcccaactgctgcgtgatccatcaggatgacttcttcaagccccaagaccaaatagcagttggggaagacggcttcaaacagtgggacgtgctggagtctctggacatggaggccatgctggacaccgtgcaggcctggctgagcagcccgcagaagtttgcccgtgcccacggggtcagcgtccagccagaggcctcggacacccacatcctcctcctggaaggcttcctgctctacagctacaagcccctggtggacttgtacagccgccggtacttcctgaccgtcccgtatgaagagtgcaagtggaggagaagtacccgcaactacacagtccctgatccccccggcctcttcgatggccacgtgtggcccatgtaccagaagtataggcaggagatggaggccaacggtgtggaagtggtctacctggacggcatgaagtcccgagaggagctcttccgtgaagtcctggaagacattcagaactcgctgctgaaccgctcccaggaatcagccccctccccggctcgcccagccaggacacagggacccggacgcggatgcggccacagaacggccaggcctgcagcgtcccagcaggacagcatgtgagcgtttccctatgggggtgtctgtacgtaggagagtggaggccccactcccagttgggcgtcccggagctcagggactgagccccaagacgcctctgtaacctcgctgcagcttcagtagtaaactgggtcctgttttttt

SEQ ID NO: 12144 - protein, 230 aa, Homo sapiens
MKLIVGIGGMTNGGKTTLTNSLLRALPNCCVIHQDDFFKPQDQIAVGEDGFKQWDVLESLDMEAMLDTVQAWLSSPQKFARAHGVSVQPEASDTHILLLEGFLLYSYKPLVDLYSRRYFLTVPYEECKWRRSTRNYTVPDPPGLFDGHVWPMYQKYRQEMEANGVEVVYLDGMKSREELFREVLEDIQNSLLNRSQESAPSPARPARTQGPGRGCGHRTARPAASQQDSM

SEQ ID NO: 12145 - DNA, 3680 bp, Homo sapiens
  CDS (358)..(2448)
gtttcaggtcagacagataaatgtagggaggaaacttttaaacaagaatcacaacctccagaaaaaaattcaggacattctacaagcaaaggagacagagtggcacaaagtgagagcaagagaagaaaaactgaggaaattctgaaaagtcagactccaaagggaggagacaagaaggaatcctccaagtcattagtgcgacaagggagcttcactatagaaaaacccagcccaaacatacccatagaacttattccccatataaataaacagacttcctctactccttcttctttagcattaacatctgcaagtagaatacgagaaagaagtgagtctttggatcctgattctagtatggacacaacccttattctaaaagacacagaagcagtaatggcttttctagaagctaaactacgtgaagataataaaactgatgaaggaccagatactcccagttataatagagacaattctatttcaccagaatctgatgtagatacagctagtacaatcagtctggttactggagaaactgaaagaaagtcaacccaaaagcgaaagagtttcactagcctctataaagataggtgttccacaggttctccttccaaagatgttacaaaatcatcatcttcaggtgctagggaaaaaatggaaaagaaaacaaaaagtcgttccacagatgtgggttcaagagcagatggtcgtaaatttgttcagtccagtgggagaataagacagccctcagtagacttaacagatgatgaccaaacctctagtgtacctcattctgccatctctgatattatgtcatctgatcaagaaacttactcttgtaaacctcatggacggactccacttacctcagctgatgagcatgtacattccaaactggaaggaagtaaagtaacgaaatctaagacttctccggtggtatctggttcatctagtaaatcaaccacccttccaaggccacgacctaccaggacttccctcttgcgcagagcacgacttggtgaagcttcagacagtgaacttgctgatgctgacaaagcatctgttgcttctgaagtatccacaacaagttctacatcaaaacctcccacaggaaggcgtaacatctctcggattgatttattggctcagcctcgtagaacacgacttggctcactgtcagctcgtagtgactctgaagcaacaatttctagaagtagtgcctcttcgaggaccgcagaagccatcattagaagtggagccagactagtaccatcagataaattttctcctagaattagagctaacagtatctctcgactctcagactccaaggtcaaaagtatgacctcagctcatggctctgcttcagtaaattcaagatggaggcgctttcctactgattatgcttccacctcagaagatgaatttggatcaaaccgtaattcccctaaacatacccgtctacgtacttctccagccctgaaaaccactcgcttgcagagcgctggatcagcaatgcctactagttcttcattcaaacaccggattaaagagcaggaagactacatccgagattggactgctcatcgagaagagatagccaggatcagccaagatcttgctctcattgctcgggagatcaacgatgtagcaggagagatagattcagtgacttcatcaggcactgcccctagtaccacagtaagcactgctgccaccacccctggctctgccatagacactagagaagagttggttgatcgtgtttttgatgaaagcctcaacttccgaaagattcctccattagttcattccaaaacaccagaaggaaacaacggtcgatctggtgatccaagacctcaagcagcagagcctcccgatcacttaacaattacaaggcggagaacctggagcagggatgaagtcatgggagataatctgctgctgtcatccgtctttcagttctctaagaagataagacaatctatagataagacagctggaaagatcagaatattatttaaagacaaagatcggaattgggatgacatagaaagcaaattaagagccgaaagtgaagcccctattgtgaaaacctcaagcatggagatttcttctatcttacaggaactgaaaagagtagaaaagcagctgcaagcaatcaatgctatgattgatcctgatggaactttggaggctctgaacaacatgggatttcccagtgctatgttgccatctccaccgaaacagaagtccagccctgtgaataaccaccacagcccgggtcagacaccaacacttggccaaccagaagctagggctcttcatcctgctgctgtttcagccgcagctgaatttgagaatgctgaatctgaggctgatttcagtatacatttcaatagattcaaccccgatggggaagaggaagatgttacagtacaagaatgactttctcttgattgttgaaaaatcattacctgtggaatggctaggaatattggaagcagcatagtgttgatgtacgcaaaacaagacagcttggtcagctacaatcttggaatccctgtcttcttaattttatttatttatttttgacgtataatgtagtatatcaatcctttcaaactatttagataaccacttgatgcacaaataggaaaaagcagattgtggcagtgtcgccttttgtggttttatgattttcaaattgaatttaatgattacaccctttcccttcatagatcttttttcttttttttaagccatgctgtgacctacaagcaaactaaatagccaacatttctgaacccctaagtctcctgtgccaagctgctccctgaaatggacttcttcatctgtacagatttgttaaaccattctatttgcttcttaataataggatttatattagtactcattaccattggacacaatgacataagtactctccacagtaaagcagacctttcacaacaatcactctgtgtcctaaaattttccaacatagatgtgatttatataactttgttgatacgtaaattgtcttggggtttacggaaattaactattatgtttgcactaagatttgctgggagtggtaggtggacatatctatatatcaataaggactaaccgtctttttttgtacataggagattgataatactgtatttgttttaagcccacagtgttttactccactttcaaaaagatcaatttggcactttttttcattttttttaatggaaataagatttggtctctcattttaggttaaatgataactagaaagattaaactagacagatagtttaggtggagtatatttttaaaactcagaacatgtatattggtcctgtgttaccaagtttatatgtgacagttgaaaaagaaattcccttgaaatgatcatgaggttaaaattttcttcattaggggacttggagaaccagtagtcgtaagattagttgatagtttcactcccaagcaatgaattgcttctgtgtgtttccctgtaggactcaatagtaaatgctgtctgtcttacacatttataaggaccctgcaagacgacgacaaaggcctttggcctgtgctactaaacaagaagcctatgaaaaatttcttctttaaacttgttttttctctttccagtaagttcacatttggataatttt

SEQ ID NO: 12146 - protein, 697 aa, Homo sapiens [sequence omitted]

SEQ ID NO: 12147 - DNA, 3017 bp, Homo sapiens
  CDS (186)..(623)
accgcgggcatttacccgtgctttcccaagcctggaagaactcgtcatgctctttgtagcgtggtgcttctgttgctcacagaggtgcctgcttccccttctgccatgattggaagtttcctgaggcctccccagccatgtggaactgacaacttgcctttgatgattttcaagagagttgtgctatgatgtggcaaaagtatgcaggaagcaggcggtcaatgcctctgggagtaaggatccttttccacggtgtgttctatgccgggggctttgccattgtgtattacctcattcaaaagtttcattccagggctttatattacaagttggcagtggagcagctgcagagccatcccgaggcacaggaagctctgggccctcctctcaacatccattatctcaagctcatcgacagggaaaacttcgtggacattgttgatgccaagttgaagattcctgtctctggatccaaatcagagggccttctctacgtccactcatccagaggtggcccctttcagaggtggcaccttgacgaggtctttttagagctcaaggatggtcagcagattcctgtgttcaagctcagtggggaaaacggtgatgaagtgaaaaaggagtagagacgacccagaagacccagcttgcttctagtccatccttccctcatctctaccatatggccactggggtggtggcccatctcagtgacagacactcctgcaacccagttttccagccaccagtgggatgatggcctccctattccctgagacacaacagtattgaaattgggccaattaataactccacagtggcctctcactaaatgtgagaggtgaggaagctgcaggagaaaatttgaagctagcagtgttcatgagatgtaagtaaagaagccatctccataaaagtacaacgtgacgcagcaagtgctgatggagaagctgtagaagttacacagaagatctagcttggaccatcgatgaaagtggctacactaaacaacagattttaaatgtagataaaacagcattttattgaaaaaaagatgccatctaggactttcatagttagagaaactcaatgcctggcttcaaaggacaagctgactcttgtcaggggctagtgcagctgtgactttcagttaaagccaatgctcattgactattctgaaaatcccagggcccttaagatatgctgtataaacgcaacaacaaagcctggatggcgttgggtctgtttacagcctggtctactgagtaagcccactgttgagacctagtgctcagaaaaaatagatttctttcaaaatatggctgggtgcagtggctcacaccggtaatcccagcactttgggaggctggggcgggtggattgcttgatgccaggagttcaagaccagcctgggcaacatggtgaaaccctgtctcaaaaaacaaatccaaaaaaccaaaatattgctactcattaacaatgcacctggttacccaagagctctgatggagatgtacaaggagatgaatactgttttcatgcctgctaacacagtatccattctgctgctgatagatcaagaagtacttttgactttcaaaacttgttatttaagaaatacattttgtggtttctctgatggttctgggcagtcagttcaaaaccttctggaaaggattcaccattctagatgccatcaagagcattcaattcacgggaggaggtcaaaatatcaacattaattggaatttggaagaaatagattccaatcctcatggaggacttggagggtttcaagacttcagaggaggaaggaactgtagatgggctgaaaatagcaagagaactagaagtggaggggcctagagatgtgaccgaattgctgtaacctcaggatcaaacttgtatggatgagaagttccttctcatggacgagcaaagaaggtgatttcttgaaatggaatctactcctggtgaagatgctatgaacattgttgaaatgacaaaagatttagaatattccataaacttagctgtggccagggtttgagaggattgactcctaattttgaagttctactgtgggtaaatgctgtcaaacagcattgcatgccacagaggaatctctcatgaaagagttaataaatgcagcaaacttcactgttgtcttactttaagaaactgccacagtcactgcaggcttcagcaacttatcttttcctaccctcctctcgcatttaaaagtacttttaaattaatgtatgtacattatttttaggcataacactgctgctcatttaaaaaaactacagtatgaaccatgttatatgcagtggaaaggcaaaaaattcatgtgacttacttgcttgtatttggtttattgcagtggtctggaactgaaagtgatgcgtatttctgagttatgcctgtatttaagaagctgagtgaaacccaaagaagtccatgataggacagacttctgaaaactaaagacagaaaaaagcttgaaagcatcaagaaagaagtgaaatcttaactagagggaaaagtaactcagatgacagtggatttctctctggaaaccatggaggccagaaggaagtgagacaagttcttttagtgccagaagaactatcaacttgtggctgggcacggtggctcacacctgtaatcccagcactttgggagaccaaggtgggcagatcacttgaagtcaggagtttgagaccagcctgaccaacatggcaaaaccctgtctctactaaaaatacaaaaattagccaggcatggtggcacatgcctgtaatctcagctacttgggaggctgaggcacgagaattacttgaacccgggaggtggaggttgcagtgagccaagatcctgccactgcactccagcctgggcaacagagcaagactgcctcaaaacaaaactctgtcaactccaaattcctatttggtgaaatgatccttcaggattgatggggtaataaaaacattctcggttgatagaaaact

SEQ ID NO: 12148 - protein, 146 aa, Homo sapiens
MMWQKYAGSRRSMPLGVRILFHGVFYAGGFAIVYYLIQKFHSRALYYKLAVEQLQSHPEAQEALGPPLNIHYLKLIDRENFVDIVDAKLKIPVSGSKSEGLLYVHSSRGGPFQRWHLDEVFLELKDGQQIPVFKLSGENGDEVKKE

SEQ ID NO: 12149 - DNA, 3421 bp, Homo sapiens
  CDS (786)..(3224)
aactccaggaatttgtggcggagagggcaaataactgcggctctcccggcgccccgatgctcgcaccatgtcgaggcgcaagcaggcgaaaccccagcacatcaactcggaggaggaccagggcgagcagcagccgcagcagcagaccccggagtttgcagatgcggccccagcggcgcccgcggcgggggagctgggtgctccagtgaaccacccagggaatgacgaggtggcgagtgaggatgaagccacagtaaagcggcttcgtcgggaggagacgcacgtctgtgagaaatgctgtgcggagttcttcagcatctctgagttcctggaacataagaaaaattgcactaaaaatccacctgtcctcatcatgaatgacagcgaggggcctgtgccttcagaagacttctccggagctgtactgagccaccagcccaccagtcccggcagtaaggactgtcacagggagaatggcggcagctcagaggacatgaaggagaagccggatgcggagtctgtggtgtacctaaagacagagacagccctgccccaccccccaggacataagctatttagccaaaggcaaagtggccaacactaacgtgaccttgcaggcactacggggcaccaaggtggcggtgaatcagcggagcgcggatgcactccctgcccccgtgcctggtgccaacagcatcccgtgggtcctcgagcagatcttgtgtctgcagcagcagcagctacagcagatccagctcaccgagcagatccgcatccaggtgaacatgtgggcctcccacgccctccactcaagcggggcaggggccgacactctgaagaccttgggcagccacatgtctcagcaggtttctgcagctgtggctttgctcagccagaaagctggaagccaaggtctgtctctggatgccttgaaacaagccaagctacctcacgccaacatcccttctgccaccagctccctgtccccagggctggcacccttcactctgaagccggatgggacccgggtgctcccgaacgtcatgtcccgcctcccgagcgctttgcttcctcaggccccgggctcggtgctcttccagagccctttctccactgtggcgctagacacatccaagaaagggaaggggaagccaccgaacatctccgcggtggatgtcaaacccaaagacgaggcggccctctacaagcacaagtgtaagtactgtagcaaggtttttgggactgatagctccttgcagatccacctccgctcccacactggagagagacccttcgtgtgctctgtctgtggtcatcgcttcaccaccaagggcaacctcaaggtgcactttcaccgacatccccaggtgaaggcaaacccccagctgtttgccgagttccaggacaaagtggcggccggcaatggcatcccctatgcactctctgtacctgaccccatagatgaaccgagtctttctttagacagcaaacctgtccttgtaaccacctctgtagggctacctcagaatctttcttcggggactaatcccaaggacctcacgggtggctccttgcccggtgaccggcagcctgggccttctccagaaagtgagggtggacccacactccctggggtgggaccaaactataattccccaagggctggtggcttccaagggagtgggacccctgagccagggtcagagaccctgaaattgcagcagttggtggagaacattgacaaggccaccactgatcccaacgaatgtctcatttgccaccgagtcttaagctgtcagagctccctcaagatgcattatcgcacccacaccggggagagaccgttccagtgtaagatctgtggccgagccttttctaccaaaggtaacctgaagacacaccttggggttcaccgaaccaacacgtccattaagacgcagcattcgtgccccatctgccagaagaagttcactaatgccgtgatgctgcagcaacatattcggatgcacatgggcggtcagattcccaacacgcccctgccagagaatccctgtgactttacgggttctgagccaatgaccgtgggtgagaacggcagcaccggcgctatctgccatgatgatgtcatcgaaagcatcgatgtagaggaagtcagctcccaggaggctcccagcagctcctccaaggtccccacgcctcttcccagcatccactcggcatcacccacgctagggtttgccatgatggcttccttagatgccccagggaaagtgggtcctgccccttttaacctgcagcgccagggcagcagagaaaacggttccgtggagagcgatggcttgaccaacgactcatcctcgctgatgggagaccaggagtatcagagccgaagcccagatatcctggaaaccacatccttccaggcactctccccggccaatagtcaagccgaaagcatcaagtcaaagtctcccgatgctgggagcaaagcagagagctccgagaacagccgcactgagatggaaggtcggagcagtctcccttccacgtttatccgagccccgccgacctatgtcaaggttgaagttcctggcacatttgtgggaccctcgacattgtccccagggatgacccctttgttagcagcccagccacgccgacaggccaagcaacatggctgcacacggtgtgggaagaacttctcgtctgctagcgctcttcagatccacgagcggactcacactggagagaagccttttgtgtgcaacatttgtgggcgagcttttaccaccaaaggcaacttaaaggttcactacatgacacacggggcgaacaataactcagcccgccgtggaaggaagttggccatcgagaacaccatggctctgttaggtacggacggaaaaagagtctcagaaatctttcccaaggaaatcctggccccttcagtgaatgtggaccctgttgtgtggaaccagtacaccagcatgctcaatggcggtctggccgtgaagaccaatgagatctctgtgatccagagtgggggggttcctaccctcccggtttccttgggggccacctccgttgtgaataacgccactgtctccaagatggatggctcccagtcgggtatcagtgcagatgtggaaaaaccaagtgctactgacggcgttcccaaacaccagtttcctcacttcctggaagaaaacaagattgcggtcagctaagggagaacttgcgtggaaggagcaatgcagacacagtgaaatctctagaatctgctttgttttgtaagaactcatctcctcctgttttctttttcttactgatatgcaaatgatgtttactacgttggttgtgaccacaacctcaggcaagtgctacaatcacgattgttgctatgctgctttgcaaaaagttg

SEQ ID NO: 12150 - protein, 813 aa, Homo sapiens
MWASHALHSSGAGADTLKTLGSHMSQQVSAAVALLSQKAGSQGLSLDALKQAKLPHANIPSATSSLSPGLAPFTLKPDGTRVLPNVMSRLPSALLPQAPGSVLFQSPFSTVALDTSKKGKGKPPNISAVDVKPKDEAALYKHKCKYCSKVFGTDSSLQIHLRSHTGERPFVCSVCGHRFTTKGNLKVHFHRHPQVKANPQLFAEFQDKVAAGNGIPYALSVPDPIDEPSLSLDSKPVLVTTSVGLPQNLSSGTNPKDLTGGSLPGDRQPGPSPESEGGPTLPGVGPNYNSPRAGGFQGSGTPEPGSETLKLQQLVENIDKATTDPNECLICHRVLSCQSSLKMHYRTHTGERPFQCKICGRAFSTKGNLKTHLGVHRTNTSIKTQHSCPICQKKFTNAVMLQQHIRMHMGGQIPNTPLPENPCDFTGSEPMTVGENGSTGAICHDDVIESIDVEEVSSQEAPSSSSKVPTPLPSIHSASPTLGFAMMASLDAPGKVGPAPFNLQRQGSRENGSVESDGLTNDSSSLMGDQEYQSRSPDILETTSFQALSPANSQAESIKSKSPDAGSKAESSENSRTEMEGRSSLPSTFIRAPPTYVKVEVPGTFVGPSTLSPGMTPLLAAQPRRQAKQHGCTRCGKNFSSASALQIHERTHTGEKPFVCNICGRAFTTKGNLKVHYMTHGANNNSARRGRKLAIENTMALLGTDGKRVSEIFPKEILAPSVNVDPVVWNQYTSMLNGGLAVKTNEISVIQSGGVPTLPVSLGATSVVNNATVSKMDGSQSGISADVEKPSATDGVPKHQFPHFLEENKIAVS

SEQ ID NO: 12151 - DNA, 1702 bp, Homo sapiens
  CDS (39)..(1577)
gagggagagctggggcctgctcccggagagatacggctatgtcgatcgaaatcgaatcttcggatgtgatccgccttattatgcagtacttgaaggagaacagtttacatcgggcgttagccaccttgcaggaggagactactgtgtctctgaatactgtggacagcattgagagttttgtggctgacattaacagtggccattgggatactgtgttgcaggctatacagtctctgaaattgccagacaaaaccctcattgacctctatgaacaggttgttctggaattgatagagctccgtgaattgggtgctgccaggtcacttttgagacagactgatcccatgatcatgttaaaacaaacacagccagagcgatatattcatctggagaaccttttggccaggtcttactttgatcctcgtgaggcatacccagatggaagtagcaaagaaaagagaagagcagcaattgcccaggccttagctggcgaagtcagtgtggtgcctccatctcgtctcatggcattgctgggacaggcactgaagtggcagcagcatcagggattgcttcctcctggtatgaccatagatttgtttcgaggcaaggcagctgtcaaagatgtggaagaagaaaagtttcctacacaactgagcaggcatattaagtttggtcagaaatcacatgtggagtgtgctcgattttctccagatggtcagtatttggtcactgggtctgttgatggattcattgaagtatggaactttactactggaaaaatcagaaaggatcttaagtaccaggcccaagataactttatgatgatggatgatgctgtcctctgcatgtgtttcagcagagatacagaaatgttagcaactggggcccaagatggaaaaatcaaggtgtggaagattcagagtggacaatgtttaaggagatttgagagggcacacagtaagggtgtcacctgtctaagcttttctaaggatagcagtcagatccttagtgcttcttttgaccagacaattagaattcatggtttaaaatctgggaaaaccctgaaggaatttcgtggccattcctcctttgttaacgaagcaacatttacacaagatggacattacattattagtgcatcctctgatggcactgtaaagatctggaatatgaagaccacagaatgttcaaatacctttaaatccctgggcagcaccgcagggacagatattaccgtcaacagtgtgattctacttcctaaaaaccctgagcactttgtggtgtgcaacagatcaaacacggtggtcatcatgaacatgcaggggcagattgtcagaagcttcagttctggtaaaagagaaggtggggactttgtttgctgtgccctctctccccgtggtgaatggatctactgtgtaggggaggactttgtgctctactgtttcagtacagtcactggcaaactggagagaactttgacagtgcacgagaaggatgtgattggtattgcacatcaccctcatcagaacccgattgctacctacagtgaagatggactcctaaagctctggaaaccataattcaacttttctttttaaatcagctcgaaagcatgtacttaaatgaagcatattcatgtaatgtgcttttttttttttttgccagcttttctaagcaaatagattgtctgaattagtcacag

SEQ ID NO: 12152 - protein, 513 aa, Homo sapiens
MSIEIESSDVIRLIMQYLKENSLHRALATLQEETTVSLNTVDSIESFVADINSGHWDTVLQAIQSLKLPDKTLIDLYEQVVLELIELRELGAARSLLRQTDPMIMLKQTQPERYIHLENLLARSYFDPREAYPDGSSKEKRRAAIAQALAGEVSVVPPSRLMALLGQALKWQQHQGLLPPGMTIDLFRGKAAVKDVEEEKFPTQLSRHIKFGQKSHVECARFSPDGQYLVTGSVDGFIEVWNFTTGKIRKDLKYQAQDNFMMMDDAVLCMCFSRDTEMLATGAQDGKIKVWKIQSGQCLRRFERAHSKGVTCLSFSKDSSQILSASFDQTIRIHGLKSGKTLKEFRGHSSFVNEATFTQDGHYIISASSDGTVKIWNMKTTECSNTFKSLGSTAGTDITVNSVILLPKNPEHFVVCNRSNTVVIMNMQGQIVRSFSSGKREGGDFVCCALSPRGEWIYCVGEDFVLYCFSTVTGKLERTLTVHEKDVIGIAHHPHQNPIATYSEDGLLKLWKP

SEQ ID NO: 12153 - DNA, 1981 bp, Homo sapiens
  CDS (78)..(1139)
tcctggtcatcgatgtcatccacgaggtggcccacagttggttcggcaacgctgtcaccaacgccacgtgggaagagatgtggctgagcgagggcctggccacctatgcccagcgccgtatcaccaccgaaacctacggtgctgccttcacctgcctggagactgccttccgcctggacgccctgcaccggcagatgaagcttctgggagaggacagcccggtcagcaaactgcaggtcaagctggagccaggagtgaatcccagccacctgatgaacctgttcacctacgagaagggctactgcttcgtgtactacctgtcccagctctgcggagacccacagcgctttgatgactttctccgagcctatgtggagaagtacaagttcaccagcgtggtggcccaggacctgctggactccttcctgagcttcttcccggagctgaaggagcagagcgtggactgccgggcagggctggaattcgagcgctggctcaatgccacaggcccgccgctggctgagccggacctgtctcagggatccagcctgacccggcccgtggaggcccttttccagctgtggaccgcagaacctctggaccaggcagctgcctcggccagcgccattgacatctccaagtggaggaccttccagacagcactcttcctggaccggctcctggatgggtccccgctgccgcaggaggtggtgatgagcctgtccaagtgctactcctccctgctggactcgatgaacgctgagatccgcatccgctggctgcagattgaggtccgcaacgactactatcctgacctccacagggtgcggcgcttcctggagagccagatgtcacgcatgtacaccatcccgctgtacgaggacctctgcaccggtgccctcaagtccttcgcgctggaggtcttctaccagacgcagggccggctgcaccccaacctgcgcagagccatccagcagatcctgtcccagggcctgggctccagcacagagcccgcctcagagcccagcacggagctgggcaaggctgaagcagacacagactcggacgcacaggccctgctgcttggggacgaggcccccagcagtgccatctctctcagggacgtcaatgtgtctgcctagccctgttggcgggctgaccctcgacctcccagacaccacaattgtgccttctgtgggccaggcctgccatgactgcgtctcggctctggccatgagctctgcccaggcccacaagcccctcccctgggctctcccaggcagggagaatggggagagggacctccttgtgtctggcagagacctgtggacctggcctccccactcccagctctcttgcactgcaggccctggggccagcccgcacacaccatgcctcctgtctcaacactgacagctgtgcctagccccggatgccagcacctgccaggtgccgccccggggcaagggccccagcagccctatggtgaccgccacactgtgccttaatgtctgccgggggcccaggctgtgctgtccctgcagcacgcctccttgcagggatctgagccaccctccccgcacagccctgcaccccgcccctggggttggcagcctcagttggcccctggcagaggaacaaggacacagacattccctcagtgtggggggcaggggacacagggagaggatggttgtccctggggagggccctctggccccaggcaaccttagcccctcagaacagggagtcccaggacccagggagagtgtggggacaggacagcctgtctcttgtagcttcctggggtgggaggcacaggggcaaagcaataccccagggaaagtgggaggtggtgctggtgctctctccaggcccaccatgctgggagaggcggccagagcctggggcctccagcctgggactgctgtgatggggtatcacggtgatggtcccattaaacttccactctgcaaacctg

SEQ ID NO: 12154 - protein, 354 aa, Homo sapiens
MWLSEGLATYAQRRITTETYGAAFTCLETAFRLDALHRQMKLLGEDSPVSKLQVKLEPGVNPSHLMNLFTYEKGYCFVYYLSQLCGDPQRFDDFLRAYVEKYKFTSVVAQDLLDSFLSFFPELKEQSVDCRAGLEFERWLNATGPPLAEPDLSQGSSLTRPVEALFQLWTAEPLDQAAASASAIDISKWRTFQTALFLDRLLDGSPLPQEVVMSLSKCYSSLLDSMNAEIRIRWLQIEVRNDYYPDLHRVRRFLESQMSRMYTIPLYEDLCTGALKSFALEVFYQTQGRLHPNLRRAIQQILSQGLGSSTEPASEPSTELGKAEADTDSDAQALLLGDEAPSSAISLRDVNVSA

SEQ ID NO: 12155 - DNA, 1745 bp, Homo sapiens
  CDS (382)..(714)
gaaaaaaccctatgaatgtacgcagtgtgggaaagcattatcctctcttacaagttttcaaacacacataagaatgcactctggagaaagaccttatgaatgtaagatatgtgggaaaggcttttgttctgccaattcatttcaaagacatgaaaaaactcacagtggagagaaaccctataaatgcaagcaatgtggtaaagccttcattcattccagttcccttcgttatcatgaaaggattcacactggagagaaacctatgagtgtaagcaatgtgggaaggccttcagatcttcctcacaccttcaattgcatggtaggactcacactggagagaagccctatgaatgtcaggaatgtgggaaagccttcagatctatgaagaaccttcaaagtcatgaaaggacacaaacacacgtaagaatacactctggagaaagaccttataaatgtaagctatgtgggaaaggcttttattgtcccaaatcattgcaaagacatgaaaaaactcacactggagagaaactctatgaatgcaagcaatgtggtgaagccttcagtagttccagttcctttcgataccatgaaaggactcacactggagagaaaccctataaatgcaagcaatgtgggaaagccttcagagctgcctcagtccttcgaatgcatggtaggactcaccctgaagataaaccctatgagtgtaagcaatgagggaaagccttcagatctgcctcacacctttgaatgcatggtaggacacacaatcaagagaaaccatgaatgtaaagaatgtgggaaacccttcaggtctgcccagaaccttcgaattcagtaaaggacacaagcacacataagaatgcattctggatagctgaacaaaaggcagcagaaacttctgcagacttaaatgtccctgtctgacagctttgaagagagtagcagtcctcccagcatggagtttgagatctaagaatggacagtctgcctcctcaagtgggtccctgatctccaagtagcctaactgggaggcacttcccagtaggggccaactgacacctcatacggccgtgtgcccctctgtgacgaagcttccagaggaaggatcaggcaacaacatttgccgttctgcaatatttgctgttctgcagcccctgctggtgatacccaggcaaacagggtctggagtggacctcaagcaaaatccaacagacctcagctgagggtcctgactgttagaaggaaaactaacaaacagaaaggacaaccacaccaaaacccatctgtacatcaccatcatcaaagaccaaaagtagataaaaccacaaagatggggagaaaccagagcagaaaagctgaaaattctaaacatcagagcgcctcttctcctccaaaggaacgcagctcctcgccagcaatggaacaaagctggactttgactttgacgagctgagagaagaaggcttcagatgatcggtaataacaaacttctccaagctaaaggaggatgttcgaacccatcacaaagaagctaaaaaccttgaaaaaagattagacaaaatggctaactagaataaacagtgtagagaagaccttaaatgacccgatggagctgaaaaccatggcacgagaactatgtgatgcatgcacaagcttcagtagctgattcaatcaagtggaagaaaaggtatcagtaattgaagatcaaatggatgaaatgaagtgagaagagaagtttagag

SEQ ID NO: 12156 - protein, 111 aa, Homo sapiens
MKNLQSHERTQTHVRIHSGERPYKCKLCGKGFYCPKSLQRHEKTHTGEKLYECKQCGEAFSSSSSFRYHERTHTGEKPYKCKQCGKAFRAASVLRMHGRTHPEDKPYECKQ

SEQ ID NO: 12157 - DNA, 2676 bp, Homo sapiens
  CDS (293)..(754)
ctggtgcttctgcttctccgtgaccctgatcatcctcatcgtggagctgtgcgggctccaggcccgcttccccctgtcttggcgcaacttccccatcaccttcgcctgctatgcggccctcttctgcctctcggcctccatcatctaccccaccacctatgtccagttcctgtcccacggccgttcgcgggaccacgccatcgccgccaccttcttctcctgcatcgcgtgtgtggcttacgccaccgaagtggcctggacccgggcccggcccggcgagatcactggctatatggccaccgtacccgggctgctgaaggtgctggagaccttcgttgcctgcatcatcttcgcgttcatcagcgaccccaacctgtaccagcaccagccggccctggagtggtgcgtggcggtgtacgccatctgcttcatcctagcggccatcgccatcctgctgaacctgggggagtgcaccaacgtgctacccatccccttccccagcttcctgtcggggctggccttgctgtctgtcctcctctatgccaccgcccttgttctctggcccctctaccagttcgatgagaagtatggcggccagcctcggcgctcgagagatgtaagctgcagccgcagccatgcctattacgtgtgtgcctgggaccgccgactggctgtggccatcctgacggccatcaacctactggcgtatgtggctgacctggtgcactctgcccacctggtttttgtcaaggtctaagactctcccaagaggctcccgttccctctccaacctctttgttcttcttgcccgagttttctttatggagtacttctttcctccgcctttcctctgttttcctcttcctgtctcccctccctcccacctttttctttccttcccaattccttgcactctaaccagttcttggatgcatcttcttccttccctttcctcttgctgtttccttcctgtgttgttttgttgcccacatcctgttttcacccctgagctgtttctctttttcttttctttcttttttttttttttttaagacggattctcactctgtggcccaggctggagtgcagtggtgcgatctcagctcactgcaacccccgcctcctgggttcaagcgattctcctgccccagcctcccaagtagctgggaggacaggtgtgagctgccgcacccagcctgtttctctttttccactcttcttttttctcatctcttttctgggttgcctgtcggctttcttatctgcctgttttgcaagcaccttctcctgtgtccttgggagccctgagacttctttctctccttgcctccacccacctccaaaggtgctgagctcacatccacaccccttgcagccgtccatgccacagccccccaaggggccccattgccaaagcatgcctgcccaccctcgctgtgccttagtcagtgtgtacgtgtgtgtgtgtgtgtgtttggggggtggggggtgggtagctggggattgggccctctttctcccagtggaggaaggtgtgcagtgtacttcccctttaaattaaaaaacatatatatatatatatttggaggtcagtaatttccaatgggcgggaggcattaagcaccgaccctgggtccctaggccccgcctggcactcagccttgccagagattggctccagaatttttgccaggcttacagaacacccactgcctagaggccatcttaaaggaagcaggggctggatgcctttcatcccaactattctctgtggtatgaaaaagaaaaaaaaaaaaaagaaggagtcggggccgggcgtggtggctcacgcctgtaatcccagcactttgggagaccaagtcaggcaatcatctgaagtcaggagttcaagaccagcctggccaacatggtgaaagcatgtctctattaaaaatacaaaaattagccgggcgtggtggcgggcgcctgtaatcccaggtatttggggggactgagacaggagaatcccttcaacccgggaggtggaggttgcagtaagtcaagatggcaccactgtgctccagcctgggggacagagcgagactccatctcaaaaaaaaaaggaatcggacgaagaaccacaggatgttgaagacaactgtctgaagtatttgtgagggacagcgatgtggccctctgtgttaagaataacgtgtcctgctttggcagagagaagaaaatagccactgcccgctttcaaggcaagatcgaccttttctgttttgttttgtttttctttctttttcctggccaagaggacaaaaattactgagtggcccttaaagagggaagtttgttttcagctgttctcttttgcccgtaggtgggagggtggggattgctgcgtcctagctagaggaatggctttgcttgaatgtgtagtgcacacgcacgggtgtttctgtgtgctagttgcttcttgctgctgcttcctgcttgtctgggactcacatacataacgtgatatatatatatatatataaatgtataaatatatattttatttttttttaaatccttggagcttctggttcctatcagttcctgttgttaatcgtagaaccgttgtcccttcccccattcccgtatccatcatgttctttttcttttaaatatcaatataaaggtaaaagaagg

SEQ ID NO: 12158 - protein, 154 aa, Homo sapiens
MATVPGLLKVLETFVACIIFAFISDPNLYQHQPALEWCVAVYAICFILAAIAILLNLGECTNVLPIPFPSFLSGLALLSVLLYATALVLWPLYQFDEKYGGQPRRSRDVSCSRSHAYYVCAWDRRLAVAILTAINLLAYVADLVHSAHLVFVKV

SEQ ID NO: 12159 - DNA, 2730 bp, Homo sapiens
  CDS (181)..(1557)
tctcaaataaagatagatgcacacctgaacaaagtatgtccaaccactgagaccatttacaatgatgagttctatactaaacaagatgtaattattacagcattagataatgtggaagccaggagatacgtagacagtcgttgcttagcaaatctaaggcctcttttagattctggaacaatgggcactaagggacacactgaagttattgtaccgcatttgactgagtcttacaatagtcatcgggatcccccagaagaggaaataccattttgtactctaaaatcctttccagctgctattgaacacaccatacagtgggcaagagataagtttgaaagttccttttcccacaaaccttcattgtttaacaaattttggcaaacctattcatctgcagaagaagtcttacagaagatacagagtggacacagtttagaaggctgttttcaagttataaagttacttagcagaagacctagaaattggtcccagtgtgtagaattagcaagattaaagtttgaaaaatattttaaccataaggctcttcagcttcttcactgtttccctcttgacatacgattaaaagatggcagtttattttggcagtcaccaaagaggccaccctctccaataaaatttgatttaaatgagcctttgcacctcagtttccttcagaatgctgcaaaactatatgctacagtatattgtattccatttgcagaagaggacttatcagcagatgccctcttgaatattctttcagaagtaaagattcaggaattcaagccttccaataaggttgttcatacagatgaaactgcaaggaaaccagaccatgttcctattagcagtgaagatgagaggaatgcaattttccaactagaaaaggctattttatctaatgaagccaccaaaagtgaccttcagatggcagtgctttcatttgaaaaagatgatgatcataatggacacatagatttcatcacagctgcatcaaatcttcgtgccaaaatgtacagcattgaaccagctgaccgtttcaaaacaaagcgcatagctggtaaaattatacctgctatagcaacaaccactgctacagtttctggcttggttgccttggagatgatcaaagtaactggtggctatccatttgaagcttacaaaaattgttttcttaacttagccattccaattgtagtatttacagagacaactgaagtaaggaaaactaaaatcagaaatggaatatcatttacaatttgggatcgatggaccgtacatggaaaagaagatttcaccctcttggatttcataaatgcagtcaaagagaagtatggaattgagccaacaatggtggtacagggagtcaaaatgctttatgttcctgtaatgcctggtcatgcaaaaagattgaagttaacaatgcataaacttgtaaaacctactactgaaaagaaatatgtggatcttactgtgtcatttgctccagacattgatggagatgaagatttgccgggacctccagtaagatactacttcagtcatgacactgattaatacaagttgtcttaacgttactccaggaccacttgattttggaaagagtgcacttaattcagaagctaaagaaaatcagttcataatactatggatttctctttcattaagccttaattttaagggaaacatcagtaagaaactgcactgaagaattataaaacattttggggcatagcatacacttgtctaacggttcacacgtggctatgatcacaagcaactttgaactggaatgctatttacaaaagttttgtgtattaatctgtgtattaatctctctggataaaaagaaggaaaaaatatgtatgaccagaacagatatggatgaagaaattgaaagcaacgaatgcaactattcaaaaagtttaattttatgaatttcttttttgtttagtcttgaagactgattttctatgcaaatagtgtttggcatcctgcacctctgatatgatttggctttgagaatttaataccactgggaagaagtatggtagtggtggatgaagggtggatattttaaattgtgcagttacagtttactgtcctattacctctgctcgtttaaccagtttgttatatcactgtgtccccaaaatcaggatttttgttgatagcatcagtgttgtaggagcaataggtcagatgagacatattaacttagactaaacgtgaacagtattatatggactctcacaacgctcttagagaatccgtgaatgtgaacagacaaatgtggctaaccatttgattcttcagtatgccttctaatgtggctattttatttatgtgagactctaaacctgattgtcctaatatataaaactaaaagattttgtaaagggagtgtctttagaaatagatgaaatgtagaatgttaaaaattattgctagggtagtctttttttccagaaacctaattagggtattaaattttgtgttttttttttttttttttttttaaacagaagcatgttatttcattcccattcccagaaagggagttaatgaagataaaaatttattttttaaggtctttattgagagaaactttgttttctgatatgaactattgcagatgtttttataaatactttcattaaaatgatgtaaacagtagtacccaacactgtaaactcagtgaaaatagtaaatgattcttttattact

SEQ ID NO: 12160 - protein, 459 aa, Homo sapiens
MGTKGHTEVIVPHLTESYNSHRDPPEEEIPFCTLKSFPAAIEHTIQWARDKFESSFSHKPSLFNKFWQTYSSAEEVLQKIQSGHSLEGCFQVIKLLSRRPRNWSQCVELARLKFEKYFNHKALQLLHCFPLDIRLKDGSLFWQSPKRPPSPIKFDLNEPLHLSFLQNAAKLYATVYCIPFAEEDLSADALLNILSEVKIQEFKPSNKVVHTDETARKPDHVPISSEDERNAIFQLEKAILSNEATKSDLQMAVLSFEKDDDHNGHIDFITAASNLRAKMYSIEPADRFKTKRIAGKIIPAIATTTATVSGLVALEMIKVTGGYPFEAYKNCFLNLAIPIVVFTETTEVRKTKIRNGISFTIWDRWTVHGKEDFTLLDFINAVKEKYGIEPTMVVQGVKMLYVPVMPGHAKRLKLTMHKLVKPTTEKKYVDLTVSFAPDIDGDEDLPGPPVRYYFSHDTD

SEQ ID NO: 12161 - DNA, 2454 bp, Homo sapiens
  CDS (24)..(1892)
ttcaagtagcacctctatcagttatggctaaatcctgtccatctgtgtgtcgctgcgatgcgggtttcatttactgtaatgatcgctttctgacatccattccaacaggaataccagaggatgctacaactctctaccttcagaacaaccaaataaataatgctgggattccttcagatttgaaaaacttgctgaaagtagaaagaatatacctataccacaacagtttagatgaatttcctaccaacctcccaaagtatgtaaaagagttacatttgcaagaaaataacataaggactatcacttatgattcactttcaaaaattccctatctggaagaattacatttagatgacaactctgtctctgcagttagcatagaagagggagcattccgagacagcaactatctccgactgcttttcctgtcccgtaatcaccttagcacaattccctggggtttgcccaggactatagaagaactacgcttggatgataatcgcatatccactatttcatcaccatctcttcaaggtctcactagtctaaaacgcctggttctagatggaaacctgttgaacaatcatggtttgggtgacaaagttttcttcaacctagttaatttgacagagctgtccctggtgcggaattccctgactgctgcaccagtaaaccttccaggcacaaacctgaggaagctttatcttcaagataaccacatcaatcgggtgcccccaaatgctttttcttatctaaggcagctctatcgactggatatgtccaataataacctaagtaatttacctcagggtatctttgatgatttggacaatataacacaactgattcttcgcaacaatccctggtattgcgggtgcaagatgaaatgggtacgtgactggttacaatcactacctgtgaaggtcaacgtgcgtgggctcatgtgccaagccccagaaaaggttcgtgggatggctattaaggatctcaatgcagaactgtttgattgtaaggacagtgggattgtaagcaccattcagataaccactgcaatacccaacacagtgtatcctgcccaaggacagtggccagctccagtgaccaaacagccagatattaagaaccccaagctcactaaggatcaccaaaccacagggagtccctcaagaaaaacaattacaattactgtgaagtctgtcacctctgataccattcatatctcttggaaacttgctctacctatgactgctttgagactcagctggcttaaactgggccatagcccggcatttggatctataacagaaacaattgtaacaggggaacgcagtgagtacttggtcacagccctggagcctgattcaccctataaagtatgcatggttcccatggaaaccagcaacctctacctatttgatgaaactcctgtttgtattgagactgaaactgcaccccttcgaatgtacaaccctacaaccaccctcaatcgagagcaagagaaagaaccttacaaaaaccccaatttacctttggctgccatcattggtggggctgtggccctggttaccattgcccttcttgctttagtgtgttggtatgttcataggaatggatcgctcttctcaaggaactgtgcatatagcaaagggaggagaagaaaggatgactatgcagaagctggcactaagaaggacaactctatcctggaaatcagggaaacttcttttcagatgttaccaataagcaatgaacccatctcgaaggaggagtttgtaatacacaccatatttcctcctaatggaatgaatctgtacaaaaacaatcacagtgaaagcagtagtaaccgaagctacagagacagtggtattccagactcagatcactcacactcatgatgctgaaggactcacagcagacttgtgttttgggttttttaaacctaagggaggtgatggtaggaaccctgttctactgcaaaacactggaaaaagagactgaaaaaaagcaatgtactgtacatttgccatataatttatatttaagaactttttattaaaagtttcaaatttcaggttactgctgcgattgatgtagtggagatgcctgaacacaattctatattttagtattttttagtaatttgtactgtattttccttgcaaatattggagttataaaccatttactttgtgttctactgagtaagatgacttgttgactgtgaaagtgaattttcttgctgtgtcgaacaatcaggactgcattcatatgagatccttgtagtataagcacaggccatttttcactttggtattaataaaatgtaaaaaaaaaaaactggctgaatggctgaatgagataaaatttaattttaaaaaatggttatgaaataatgttccaattattaaatttgtattatcccagtggtattcaataaatcaaaatgtgtgaagt

SEQ ID NO: 12162 - protein, 623 aa, Homo sapiens
MAKSCPSVCRCDAGFIYCNDRFLTSIPTGIPEDATTLYLQNNQINNAGIPSDLKNLLKVERIYLYHNSLDEFPTNLPKYVKELHLQENNIRTITYDSLSKIPYLEELHLDDNSVSAVSIEEGAFRDSNYLRLLFLSRNHLSTIPWGLPRTIEELRLDDNRISTISSPSLQGLTSLKRLVLDGNLLNNHGLGDKVFFNLVNLTELSLVRNSLTAAPVNLPGTNLRKLYLQDNHINRVPPNAFSYLRQLYRLDMSNNNLSNLPQGIFDDLDNITQLILRNNPWYCGCKMKWVRDWLQSLPVKVNVRGLMCQAPEKVRGMAIKDLNAELFDCKDSGIVSTIQITTAIPNTVYPAQGQWPAPVTKQPDIKNPKLTKDHQTTGSPSRKTITITVKSVTSDTIHISWKLALPMTALRLSWLKLGHSPAFGSITETIVTGERSEYLVTALEPDSPYKVCMVPMETSNLYLFDETPVCIETETAPLRMYNPTTTLNREQEKEPYKNPNLPLAAIIGGAVALVTIALLALVCWYVHRNGSLFSRNCAYSKGRRRKDDYAEAGTKKDNSILEIRETSFQMLPISNEPISKEEFVIHTIFPPNGMNLYKNNHSESSSNRSYRDSGIPDSDHSHS

SEQ ID NO: 12163 - DNA, 3198 bp, Homo sapiens
  CDS (337)..(3198)
ctttcggagttagcgcagcgcgaacgctgggtgcggcgcctttaagcgtcgcggtgacacgtgtgtgaggcgccggaggcccggatggtgcgcgtgctgggccgcgggccgaaggagtcgccagggctgcgtaggcttgtggcgcgcccgcggagaggccggggctctgacgcccgctctgcggcttcggtgtttgaacaggccacagtccaggagcgcttacattcaggagctccgcgtagcacctgcccaaccaaactcagccctccgttaagatcctggttccatgccgcagtaggacagcaggcccaagtctgcacatcccagtgatgcaccatgccaatagtggataagttgaaggaggccctgaaacccggccgcaaggactcggctgatgatggagaactggggaagcttcttgcctcctctgccaagaaggtccttttacagaaaatcgagttcgagccagccagcaagagcttctcctaccagctggaggccttaaagagcaaatatgtgttgctcaaccccaaaacagagggagctagtcgccacaagagtggagatgacccaccggccaggagacagggcagtgagcacacgtatgagagctgtggtgacggagtcccagccccgcagaaagtgcttttccccacggagcgactgtctctgaggtgggagcgggtcttccgcgtgggcgcaggactccacaaccttggcaacacctgctttctcaatgccaccatccagtgcttgacctacacaccacctctagccaactacctgctctccaaggagcatgctcgcagctgccaccagggaagcttctgcatgctgtgtgtcatgcagaaccacattgtccaggccttcgccaacagcggcaacgccatcaagcccgtctccttcatccgagacctgaaaaagatagcccgacacttccgctttgggaaccaggaggacgcgcatgagttcctgcggtacaccatcgacgccatgcagaaagcctgcctgaatggctgtgccaagttggatcgtcaaacgcaggctactaccttggtccatcaaatttttggagggtatctcagatcacgcgtgaagtgctccgtgtgcaagagcgtctcggacacctacgacccctacttggacgtcgcgctggagatccggcaagctgcgaatattgtgcgtgctctggaactttttgtgaaagcagatgtcctgagtggagagaatgcctacatgtgtgctaaatgcaagaagaaggttccagccagcaagcgcttcaccatccacagaacatccaacgtcttaaccctttccctcaagcgttttgccaacttcagcggggggaagatcaccaaggatgtaggctatccggaattcctcaacatacgtccgtatatgtcccagaataatggtgatcctgtcatgtatggactctatgctgtcctggtgcactcgggctacagctgccatgccgggcactattactgctacgtgaaggcaagcaatggacagtggtaccagatgaatgattccttggtccattccagcaacgtcaaggtggttctgaaccagcaggcctacgtgctgttctatctgcgaattccaggctctaagaaaagtcccgagggcctcatctccaggacaggctcctcctcccttcccggccgcccgagtgtgattccagatcactccaagaagaacatcggcaatgggattatttcctccccactgactggaaagcgacaagactctgggacgatgaagaagccgcacaccactgaagagattggtgtgcccatatccaggaatggctccaccctgggcctgaagtcccagaacggctgcattcctccaaagctgccctcggggtccccttcccccaaactctcccagacacccacacacatgccaaccatcctagacgaccctggaaagaaggtgaagaagccagctcctccacagcacttttcccccagaactgctcaggggctgcctgggaccagcaactcgaatagcagcagatctgggagccaaaggcagggctcctggggcagcagggatgttgtcctctctacctcacctaagctcctggctacagccactgccaacgggcatgggctgaaggggaacgacgagagcgctggcctcgacaggaggggctccagcagctccagcccagagcactcggccagcagcgactccaccaaggccccccagacccccaggagtggagcggcccatctctgcgattctcaggaaacgaactgttccaccgctggccactccaaaacgccgccaagtggagcagattctaagacggtgaagctgaagtcccctgtcctgagcaacaccaccactgagcctgcaagcaccatgtctcctccaccagccaaaaaactggccctttctgccaagaaggccagcaccctgtggagggcgaccggcaatgacctccgtccacctcccccctcaccatcctccgacctcacccaccccatgaaaacctctcaccccgtcgttgcctccacttggcccgtccatagagccagggctgtgtcacctgctccccaatcatccagccgcctgcaaccccccttcagcccccaccccacattgctgtccagtacccccaagcccccagggacgtcagaaccacggagctgctcctccatctcgacggcgctgcctcaggtcaacgaggaccttgtgtcccttccacaccagttgccagaggccagtgagcccccccggagcccctctgagaagaggaaaaagacctttgtgggagagccgcagaggctgggctcagagacgtgcctcccacagcacatcagggaggccactgcggctccccacgggaagaggaagaggaagaagaagaagcgcccggaggacacagctgccagcgccctgcaggaggggcagacacagagacagcctgggagccccatgtacaggagggagggccaggcacagctgcccgctgtcagacggcaggaagatggcacacagccacaggtgaatggccagcaggtgggatgtgttacggacggccaccacgcgagcagcaggaagcggaggaggaaaggagcagaaggtcttggtgaagaaggcggcctgcaccaggacccacttcggcacagctgctctcccatgggtgatggtgatccagaggccatggaagagtctccaagg

SEQ ID NO: 12164 - protein, 954 aa, Homo sapiens
MPIVDKLKEALKPGRKDSADDGELGKLLASSAKKVLLQKIEFEPASKSFSYQLEALKSKYVLLNPKTEGASRHKSGDDPPARRQGSEHTYESCGDGVPAPQKVLFPTERLSLRWERVFRVGAGLHNLGNTCFLNATIQCLTYTPPLANYLLSKEHARSCHQGSFCMLCVMQNHIVQAFANSGNAIKPVSFIRDLKKIARHFRFGNQEDAHEFLRYTIDAMQKACLNGCAKLDRQTQATTLVHQIFGGYLRSRVKCSVCKSVSDTYDPYLDVALEIRQAANIVRALELFVKADVLSGENAYMCAKCKKKVPASKRFTIHRTSNVLTLSLKRFANFSGGKITKDVGYPEFLNIRPYMSQNNGDPVMYGLYAVLVHSGYSCHAGHYYCYVKASNGQWYQMNDSLVHSSNVKVVLNQQAYVLFYLRIPGSKKSPEGLISRTGSSSLPGRPSVIPDHSKKNIGNGIISSPLTGKRQDSGTMKKPHTTEEIGVPISRNGSTLGLKSQNGCIPPKLPSGSPSPKLSQTPTHMPTILDDPGKKVKKPAPPQHFSPRTAQGLPGTSNSNSSRSGSQRQGSWGSRDVVLSTSPKLLATATANGHGLKGNDESAGLDRRGSSSSSPEHSASSDSTKAPQTPRSGAAHLCDSQETNCSTAGHSKTPPSGADSKTVKLKSPVLSNTTTEPASTMSPPPAKKLALSAKKASTLWRATGNDLRPPPPSPSSDLTHPMKTSHPVVASTWPVHRARAVSPAPQSSSRLQPPFSPHPTLLSSTPKPPGTSEPRSCSSISTALPQVNEDLVSLPHQLPEASEPPRSPSEKRKKTFVGEPQRLGSETCLPQHIREATAAPHGKRKRKKKKRPEDTAASALQEGQTQRQPGSPMYRREGQAQLPAVRRQEDGTQPQVNGQQVGCVTDGHHASSRKRRRKGAEGLGEEGGLHQDPLRHSCSPMGDGDPEAMEESPR

SEQ ID NO: 12165 - DNA, 2491 bp, Homo sapiens
  CDS (40)..(1374)
gctgctagctcgcggcgacgtcgggccgattttcccaggatgacagagctgaggcagagggtggcccatgagccggttgcgccacccgaggacaaggagtcagagtcagaagcaaaggtagatggagagactgcatcggacagtgagagccgggcagaatccgcacccctgccagtctctgcagatgataccccggaggtcctcaatagggccctttccaacttgtcttcaagatggaagaactggtgggtgagaggcatcctgactttggccatgattgcatttttcttcatcatcatttacctgggaccaatggttttgatgataatcgtgatgtgcgttcagattaagtgtttccatgagataatcactattggctacaacgtctaccactcatatgatctgccctggttcaggacgctcagctggtactttctcctgtgtgtaaactatttcttctatggtgagacagtgacggattacttcttcaccctggtccagagagaagagcctttgcggattctcagtaaataccaccggttcatttcctttactctctatctaataggattctgcatgtttgtactgagtctggtcaagaagcattatcgactgcagttctacatgtttggctggacccatgtgacattgctgattgttgtaacacagtcacatcttgttatccacaacctatttgaaggaatgatctggttcattgtccccatatcttgtgtgatctgtaatgacatcatggcctatatgtttggctttttctttggtcggaccccactcatcaagctgtccccgaagaagacctgggaaggcttcattgggggcttctttgctactgtggtgtttggccttctgctgtcctatgtgatgtccgggtacagatgctttgtctgccctgtggagtacaacaatgacaccaacagcttcactgtggactgtgagccctcggacctgtttcgcctgcaggagtacaacattcctggggtgatccagtcagtcattggctggaaaacggtccggatgtacccctcccagattcacagcatcgctctctccacctttgcctcgctcattggcccctttggaggattcttcgcaagtggattcaaacgagcctttaaaatcaaagactttgccaataccattcctggccatggaggcatcatggatcgctttgactgccagtatctgatggccacctttgtcaatgtatacatcgccagttttatcagaggccctaacccaagcaaactgattcagcagttcctgactttacggccagatcagcagctccacatcttcaacacgctgcggtctcatctgatcgacaaagggatgctgacatccaccacagaggacgagtaggggccacccagggccaggagaacaggaacagaactgagcaggggcaggtctccaaggcaagcccagctggtgtgacttagacaatgacgaggcttcaactcactgtctttttttttttttttttggagggtattttttatttgtgggttcaaaaaatctgtatatacagtctatgtgtttagaatttgtgttgtaagtaaactacagctttgagttggaaagaagtcacgggttgtaaaaccatttggatttttttaaaacaaaagtattaataatctggaagacagtgttgcccaggtcaggagtgttttcttggtggttccagcccccatcaattgaactgtttctgggctcagtcagacacagacattcatctgtgtctgaccaaatcaggggacttccccacctgtggtgggaggcacagcttagatgttttgtacacctggtcttttctagaaatccctgcttggagctgcagaagggttgccttctgtaggtcggaggaatggaggcttactaaccaggtaagccttctatgcatccacaccaaaatcctgcagaatgtaagtaagctctgctttataagatgggttcaccttcatcgcagactgaaagtttcagtttttatttttttcagaaagcacgaaaaattatttataatagtctggagaaaaaacacactgtaatatttcaagtgtatgcagtagaatgtactgtaactgagccctttcccacatgtctaggctccaatgtctcctgtaggtccacctaactgtgtgttttcagggacaatgccatccatgtttgtgctgtagacttgctgctgctgaatcctttctggggactttctcatcgggcagggagcagagggcttctcgttcatgcaccctttgcctgaacacccatgtagctgctgtgttgtgtatatattactcttaagaggagtgtgtgtgtctgtgtttgttttaaaagtcacttatttcttacagtgatttcaattgcaccatgacttcttcactaaaaccacaaagtcctgcttaaaactatggaaaacctaacctgattagagccttgactattttgaagattaaatgcacactttttatataatgtg

SEQ ID NO: 12166 - protein, 445 aa, Homo sapiens [sequence omitted]

SEQ ID NO: 12167 - DNA, 3116 bp, Homo sapiens
  CDS (701)..(3046)
tatacctaatgataatatttctgatgagccaagtctctgtgactgtgatgtacataaacataatcaaaatgaaaatttagtacctaacaatcgtgttcaaatacacagaagccctgcacagaatttagttggagagaacaatcatgatgttgataacagtgacctcccagtattgtccactgatcaagatgaaagtttgctgttatttgaagatgttaatacagagttcgacgatgtgagtctttcacccttgaacagtaaaagcgaatctttacctgtgtcagacaaaactgctattagtgaaacgcctctggtctctcagttcttaatttctgatgaacttttgttggacaataattctgaactccaagatcaaatcacccgtgatgctaatagttttaaatctcgtgatcagagaggtgtacaggaagaaaaagtgaagaatcatgaggatatttttgattgctctagggatttattttctgttacctttgatttaggattctgtagtccagattctgatgatgaaatattggaacatacatcagatagcaatagacctctagatgatctatatggaaggtatttggaaattaaggagataagtgatgcaaattatgtttcgaatcaagcactaataccaagagatcatagtaaaaattttactagtggaactgttattatcccatcaaatgaagatatgcagaatccaaattatgtacatttgccactgagtgcagcaaaaaatgaagaattgttatctcctggttattctcagttttctttaccagtgcaaaaaaaagttatgagtacaccactctctaaatcaaacacattgaactcattttctaagataagaaaggaaatacttaagacaccagattctggtaaggaaaaagtaaacctacaaagattcaaagaagcattgaattcaacttttgattattcagaattttctctagaaaagtctaaaagcagtggtccaatgtatctgcataaatcctgtcattctgttgaagatggacaattattaacaagtaacgaaagtgaagatgacgagattttccgaagaaaagttaaaagagcaaaaggaaatgttttaaactctcctgaggatcagaaaaatagtgaagttgattctccacttcatgctgtcaaaaagcgcagatttcctataaacagatcagaattatcatctagtgatgagagtgagaattttcccaaaccatgttcacaattagaagacttcaaggtttgtaacgggaatgccagaagaggcatcaaagtcccaaagagacagagtcacttaaagcatgtagctaggaagtttttagatgatgaagcagaactttctgaagaagatgcagaatatgtttcatcagatgaaaatgatgagtcagaaaatgaacaagattcctcattacttgactttttaaatgatgaaactcaactttcacaggctataaatgattctgaaatgagagctatttacatgaaatctttgcgtagtccaatgatgaacaataagtacaaaatgattcataagacacataaaaacataaacattttctcgcagattcctgaacaagatgaaacctatttagaggatagtttttgtgttgatgaagaggagtcttgcaaaggccaatcaagtgaagaagaagtttgtgttgattttaacttaataactgatgattgctttgcaaatagtaaaaagtataaaactcgacgtgcagtaatgctaaaagaaatgatggaacaaaattgtgcacattcaaaaaagaaattatccagaattattttaccagatgattcaagtgaggaggagaacaatgtaaatgataaaagagaatctaatactgcggttaacccaagcactgttaagaagaacaaacaacaggaccattgtttaaattcagtgccttctggatcttctgcgcagtccaaggtgcgttctactccaagagttaatccattagcaaagcagagcaaacagacattgctgaatttaaaggatacaatttccgaagtctcagacttcaaacctcagaatcataatgaagtccagtctaccacaccacccttcactactgttgattcacagaaagactgtagaaaatttccagttccacagaagaggttcggacatctagcactaatgtttcccatgccctctgcctctgcaaaaagaggagctcatggtccacaggatttggcagattactttggaaaggaaagctgggatggtagtgctttggaggattctagcacttcaggggcatcctgttccaagtcaagaccacatttagctgggacacatacttctcttagacttccgcaggaaggaaaaggaacctgtattcttgtaggtggtcatgaaatcacttctggattagaagtaatttcttccctaagagcaattcatgggttgcaagtagaagtttgtcctcttaatggctgtgattacatcgtgagtaatcgcatggtggtggaaaggaggtctcaatctgagatgttaaatagtgtcaataagaacaagttcattgagcagatccagcacctgcagagtatgtttgaaagaatatgtgtgattgtggaaaaggacagagaaaaaacaggagacacatcaaggatgtttaggagaacaaagagctatgacagcctgctgactaccttaattggcgctggaatccgaattcttttcagttcctgccaagaagaaaccgcagatttgctaaaggaactgtctttagtggaacaaagaaagaatgttggtattcatgttccaacagtggtgaatagtaataaaagtgaggcactccagttttatttaagtattcccaatataagttatataactgcattaaatatgtgtcaccagttttcatctgtgaaaaggatggctaacagctcacttcaagaaatctccatgtatgcacaagtaactcatcagaaggctgaggagatctatagatatattcactatgtatttgacatacaaatgttaccaaatgatcttaaccaagatagactgaaatctgatatataatcaagctgctcaagatggggttttcaaagacctctcacaatattaaatgcacttcaataatcaaaag

SEQ ID NO: 12168 - protein, 782 aa, Homo sapiens
MQNPNYVHLPLSAAKNEELLSPGYSQFSLPVQKKVMSTPLSKSNTLNSFSKIRKEILKTPDSGKEKVNLQRFKEALNSTFDYSEFSLEKSKSSGPMYLHKSCHSVEDGQLLTSNESEDDEIFRRKVKRAKGNVLNSPEDQKNSEVDSPLHAVKKRRFPINRSELSSSDESENFPKPCSQLEDFKVCNGNARRGIKVPKRQSHLKHVARKFLDDEAELSEEDAEYVSSDENDESENEQDSSLLDFLNDETQLSQAINDSEMRAIYMKSLRSPMMNNKYKMIHKTHKNINIFSQIPEQDETYLEDSFCVDEEESCKGQSSEEEVCVDFNLITDDCFANSKKYKTRRAVMLKEMMEQNCAHSKKKLSRIILPDDSSEEENNVNDKRESNTAVNPSTVKKNKQQDHCLNSVPSGSSAQSKVRSTPRVNPLAKQSKQTLLNLKDTISEVSDFKPQNHNEVQSTTPPFTTVDSQKDCRKFPVPQKRFGHLALMFPMPSASAKRGAHGPQDLADYFGKESWDGSALEDSSTSGASCSKSRPHLAGTHTSLRLPQEGKGTCILVGGHEITSGLEVISSLRAIHGLQVEVCPLNGCDYIVSNRMVVERRSQSEMLNSVNKNKFIEQIQHLQSMFERICVIVEKDREKTGDTSRMFRRTKSYDSLLTTLIGAGIRILFSSCQEETADLLKELSLVEQRKNVGIHVPTVVNSNKSEALQFYLSIPNISYITALNMCHQFSSVKRMANSSLQEISMYAQVTHQKAEEIYRYIHYVFDIQMLPNDLNQDRLKSDI

SEQ ID NO: 12169 - DNA, 3369 bp, Homo sapiens
  CDS (146)..(2251)
agatatgaaactggttctggagtgagatgagctcggctggggacgctacttgagaaggcctttccccacagggtgacttaaatgtcccaggctggaaggtggagcgagaagtggatgcccccagggctctgggtcacactccaggatgacttctcggaaccagctggtgcagaaggtgctgcaggagctgcaggaagcagtggagtgcgaaggcctggagggtctcataggtgcttccttggaggccaagcaggtcctgtcttccttcactctccccacctgccgggagggaggccctggcctccaggtgctggaagtggactcggtggccctgagcctgtatccagaagatgctccacggaacatgctgccgctggtgtgcaagggggagggcagcctgctgttcgaggcggccagcatgctgctgtggggtgacgcaggcctcagcctggagctgcgggcccgcaccgtggtagagatgctgctgcacagacactactacctccagggcatgatcgactccaaagtgatgctgcaggccgtgcgctactccctatgctctgaggagtcccctgagatgaccagcttgccccccgccacgctggaggccatcttcgatgccgacgtcaaggcctcctgtttccccagcagcttctccaacgtgtggcacttgtatgctctcgcctctgtcctccagcggaacatctactccatctaccccatgcgcaacctcaagatccggccctacttcaaccgtgtcatccggccccgccgctgcgaccacgtgccctccacgctgcacatcatgtgggctggccagcccctcaccagccacttcttccgccaccagtactttgcccctgtggtggggctggaagaggtggaggctgaaggtgcccctggcgtggccccagctcttccagccctggccccactctcatcgccggccaagaccctggagctgctcaaccgtgaacctggcctcagctactctcacctctgtgagcgctacagcgtcaccaaaagcaccttctaccgctggcggcggcagtcccaggagcaccggcagaaggttgctgcccgcttctccgccaagcacttcctgcaggacagcttccaccgggggggcgtcgtgccacttcagcagttcctccagcggttcccggagatctcccgctcaacctactatgtctggaagcatgagctgctgggctctggcacctgcccggccttgccccccagggaggtgctgggcatggaggagctagagaagctgccggaggagcaggtggctgaggaggagctggagtgctccgcactggcggtgtcaagccctggaatggtcttaatgcagcgggccaagttgtacctggagcattgcatctccctgaacacactggtaccctatcgctgcttcaaacgcaggttccctggcatctcacggtccacttattataattggcggcgaaaggccctccggaggaaccccagcttcaagccggcaccagccctctctgctgctgggactccccagctagcatctgttggggaaggggctgtaattccttggaagagtgaggcggaagagggggcagggaatgccacaggtgaggaccctcccgcccccggggagctcctgccactaaggatgcccctgtcccgttggcagaggcgtctgcgcagggctgcccgcaggcaggtgctgagtgggcatctccctttctgccgcttccgcctccgctaccccagcctgtcaccttctgccttttgggtctggaagagtcttgctcggggttggcccagaggcctgtccaaacttcaggtgccggtccccaccttgggcaaaggggggcaggaggctgaggagaagcaggagaaggaggctggcagggatgtgacagctgtgatggccccacctgtgggggcttcttcagaagatgtagagggagggccttccagagagggggccctgcaggagggggccacagcccagggccagccccacagtgggcccttgctgagccaacctgtggtggcagcagcgggtggcagggatggccggatgctggtgatggacatgatcgctaccacgaagttcaaggcccaggccaagctgttcttgcagaagcgcttccagtccaagagctttccctcctacaaggagttcagtgccctctttcccctcactgcccgctccacatactacatgtggaagcgagccctctatgacggcctgaccctggtagatggctgacagggaggtacaaaaggggctgggaagaagggggaccagtttggagagggtcagggacctgagctgaccccaggcttggccaggatgtcctttgctctgggtcccacagtgtctaccctaagtccaagggtatatttgtgttattttctggctccaggacagagaatgccagaaatcagccatctggtctcccgtaggaaactgtgggaccagagatatcctctttcgttgtttgctggtcatatttttactgttatgatttagtttttggttttgatttgagtgggttggttggcccccttgctggagttggaagccgtatgtatgtcagggggtttagaggggggttggttagctagagctgctttcagcttttcctggagacaaaaggagtgttatagcatgatcatcggtcccactgggcagaacgttatcttcagtttcttttgggggttggcatcctctttactcagttgtttcccaaaggaacattaggctcgaatatgggggccaggtgtggtggcttatgcctgtaatcctagcgctttgggaggccaaggcaggaggatcacttgaggctaggagttagagaccaccctgggcaatgtagtgagacctcatctcttagaaaaaaaaaaagaaagaaaatcaaatgtagagctgatcagcagcttgtgcctggcatccccaagggagaaggtgccaggtcagcaggagcagcagcagggatgtatagaaagaaccacagctggcctctaaaggatggcactgaggcaccggagatcttgaggcactggagatcactgaggggctggcctgtcccctgcaaggagtgtgggaccaggtggggcaaggctgggagatgcaggctctgtttgcagattatggcccagagtctctgcttgtgggtgcttgatccacctgctgggaccctgcagtcctcggccagcctggctgtcagttggggattccacctttctgctgagcgccttctcggagctggaggcccatcttcagtgagagatcacaaagcggccaggcaggtgggagactgaatttgccttgttcgagagtaacgtttgaaaaccaaagaaataaagtgatgcagtgcccac

SEQ ID NO: 12170 - protein, 702 aa, Homo sapiens
MTSRNQLVQKVLQELQEAVECEGLEGLIGASLEAKQVLSSFTLPTCREGGPGLQVLEVDSVALSLYPEDAPRNMLPLVCKGEGSLLFEAASMLLWGDAGLSLELRARTVVEMLLHRHYYLQGMIDSKVMLQAVRYSLCSEESPEMTSLPPATLEAIFDADVKASCFPSSFSNVWHLYALASVLQRNIYSIYPMRNLKIRPYFNRVIRPRRCDHVPSTLHIMWAGQPLTSHFFRHQYFAPVVGLEEVEAEGAPGVAPALPALAPLSSPAKTLELLNREPGLSYSHLCERYSVTKSTFYRWRRQSQEHRQKVAARFSAKHFLQDSFHRGGVVPLQQFLQRFPEISRSTYYVWKHELLGSGTCPALPPREVLGMEELEKLPEEQVAEEELECSALAVSSPGMVLMQRAKLYLEHCISLNTLVPYRCFKRRFPGISRSTYYNWRRKALRRNPSFKPAPALSAAGTPQLASVGEGAVIPWKSEAEEGAGNATGEDPPAPGELLPLRMPLSRWQRRLRRAARRQVLSGHLPFCRFRLRYPSLSPSAFWVWKSLARGWPRGLSKLQVPVPTLGKGGQEAEEKQEKEAGRDVTAVMAPPVGASSEDVEGGPSREGALQEGATAQGQPHSGPLLSQPVVAAAGGRDGRMLVMDMIATTKFKAQAKLFLQKRFQSKSFPSYKEFSALFPLTARSTYYMWKRALYDGLTLVDG

SEQ ID NO: 12171 - DNA, 3388 bp, Homo sapiens
  CDS (395)..(2773)
accggtaccggccgcgcgctggtagtcgccggtgtggctgcacctcaccaatcccgtgcgccgcggctgggccgtcggagagtgcgtgtgcttctctcctgcacgcggtgcttgggctcggccaggcggggtccgccgccagggtttgaggatgggggagtagctacaggaagcgaccccgcgatggcaaggtatatttttgtggaatgaaaaggaagtattagaaatgagctgaagaccattcacagattaatatttttggggacagatttgtgatgcttgattcacccttgaagtaatgtagacagaagttctcaaatttgcatattacatcaactggaaccagcagtgaatcttaatgttcacttaaatcagaacttgcataagaaagagaatgggagtctggtcaaataaagatgactatatcagagacttgaaaaggatcattctctgttttctgatagtgtatatggccattttagtgggcacagatcaggatttttacagtttacttggagtgtccaaaactgcaagcagtagagaaataagacaagctttcaagaaattggcattgaagttacatcctgataaaaacccgaataacccaaatgcacatggcgattttttaaaaataaatagagcatatgaagtactcaaagatgaagatctacggaaaaagtatgacaaatatggagaaaagggacttgaggataatcaaggtggccagtatgaaagctggaactattatcgttatgattttggtatttatgatgatgatcctgaaatcataacattggaaagaagagaatttgatgctgctgttaattctggagaactgtggtttgtaaatttttactccccaggctgttcacactgccatgatttagctcccacatggagagactttgctaaagaagtggatgggttacttcgaattggagctgttaactgtggtgatgatagaatgctttgccgaatgaaaggagtcaacagctatcccagcctcttcatttttcggtctggaatggccccagtgaaatatcatggagacagatcaaaggagagtttagtgagttttgcaatgcagcatgttagaagtacagtgacagaactttggacaggaaattttgtcaactccatacaaactgcttttgctgctggtattggctggctgatcactttttgttcaaaaggaggagattgtttgacttcacagacacgactcaggcttagtggcatgttggatggtcttgttaatgtaggatggatggactgtgccacccaggataacctttgtaaaagcttagatattacaacaagtactactgcttattttcctcctggagccactttaaataacaaagagaaaaacagtattttgtttctcaactcattggatgctaaagaaatatatttggaagtaatacataatcttccagattttgaactactttcggcaaacacactagaggatcgtttggctcatcatcggtggctgttattttttcattttggaaaaaatgaaaattcaaatgatcctgagctgaaaaaactaaaaactctacttaaaaatgatcatattcaagttggcaggtttgactgttcctctgcaccagacatctgtagtaatctgtatgtttttcagccgtctctagcagtatttaaaggacaaggaaccaaagaatatgaaattcatcatggaaagaagattctatatgatatacttgcctttgccaaagaaagtgtgaattctcatgttaccacgcttggacctcaaaattttcctgccaatgacaaagaaccatggcttgttgatttctttgccccctggtgtccaccatgtcgagctttactaccagagttacgaagagcatcaaatcttctttatggtcagcttaagtttggtacactagattgtacagttcatgagggactctgtaacatgtataacattcaggcttatccaacaacagtggtattcaaccagtccaacattcatgagtatgaaggacatcactctgctgaacaaatcttggagttcatagaggatcttatgaatccttcagtggtctcccttacacccaccaccttcaacgaactagttacacaaagaaaacacaacgaagtctggatggttgatttctattctccgtggtgtcatccttgccaagtcttaatgccagaatggaaaagaatggcccggacattaactggactgatcaacgtgggcagtatagattgccaacagtatcattctttttgtgcccaggaaaacgttcaaagataccctgagataagattttttcccccaaaatcaaataaagcttatcattatcacagttacaatggttggaatagggatgcttattccctgagaatctggggtctaggatttttacctcaagtatccacagatctaacacctcagactttcagtgaaaaagttctacaagggaaaaatcattgggtgattgatttctatgctccttggtgtggaccttgccagaattttgctccagaatttgagctcttggctaggatgattaaaggaaaagtgaaagctggaaaagtagactgtcaggcttatgctcagacatgccagaaagctgggatcagggcctatccaactgttaaattttatttctacgaaagagcaaatagaaattttcaagaagagcagataaataccagagatgcaaaagcaatcgctgccttaataagtgaaaaattggaaactctccgaaatcaaggcaagaggaataaggatgaactttgataatgttgaagatgaagaaaaagtttaaaagaaattctgacagatgacatcagaagacacctatttagaatgttacatttatgatgggaatgaatgaacattatcttagacttgcagttgtactgccagaattatctacagcactggtgtaaaagaagggtctgcaaactttttctgtaaagggccggtttataagtattttagactttgcaggctataatatatggttcacacatgagaacaagaatagagtcatcatgtattctttgttatttgcttttaacaacctttaaaaaatattaaaacgattcttagctcagagccatacaaaagtaggctggattcagtccatggaccatagattgctgtccccctcgacggacttataatgtttcaggtggctggcttgaacatgagtctgctgtgctatctacataaatgtctaagttgtataaagtccactttcccttcacgttttttggctgacctgaaaagaggtaacttagtttttggtcacttgttctcctaaaaatgctatccctaaccatgtatttatattccgttttaaaaacacccatgatgtggcacagtaaacaaaccctgttatgctgt

SEQ ID NO: 12172 - protein, 793 aa, Homo sapiens [sequence omitted]

SEQ ID NO: 12173 - DNA, 3412 bp, Homo sapiens
  CDS (233)..(2185)
agttttgctccgaaagacttaccgaggagggagcttgcggtgcgttctgggaaagttgctgggccagctcctttgtttccagtctgagcgttgcgttcggtttcccgagggtcttctgaggcaccgcggctgcgggcttctgagttcccggctctccgcagggaagcctcctcttcgtacctcgttttttggctcgtggggggtcctcccaccgctggccgacgcagccagcatgtccggggtgcgcgcagtgcggatcagcatcgaatcggcctgcgagaagcaggtccatgaggtgggcctggatggcaccgagacgtacctgcccccgctgtccatgtcgcagaatctggcgcgtctggcccagcggatagacttcagccagggttcgggctccgaggaggaggaggcggcggggaccgagggggacgcgcaggactggccgggcgccgggtccagcgcagaccaggacgacgaggaaggagtggtaaaatttcagccttccctttggccttgggactcagtgaggaacaatttgagaagtgccctgacagagatgtgtgttctctatgatgttctcagtattgttagggataaaaaatttatgactcttgatcctgtctctcaggatgcacttcctccaaaacagaatcctcagacgttgcaattgatatctaaaaagaagtcacttgctggagcagcacaaatcttattgaagggggcagaaagactgactaaatcagttaccgaaaaccaagaaaacaagctacaaagagacttcaattctgagcttttgcgattacggcaacactggaaacttcgaaaagttggagataaaattctcggagatctgagctacagaagtgcaggatctctctttcctcatcatggtacatttgaagtaataaagaatacagatctcgatctggataaaaagatacctgaagattactgtcctcttgatgtccaaattcctagtgatttagaggggtctgcatatatcaaggtttcaatacaaaaacaggctccagatataggtgacctcggcacagttaacctcttcaaacgacctttgcccaaatccaaaccaggttccccacattggcagacaaaattagaagcggcacagaatgttctcttatgtaaagaaatttttgcacagctctctcgggaagctgttcaaattaaatcacaagtccctcacattgtggtgaaaaaccagattatctctcagccctttccgagcttgcagttatctatttctttgtgccattcctcaaatgataagaaatcccaaaaatttgctactgagaagcaatgtccggaggaccacctttatgtcctagagcataatttgcatctactgattagagagtttcataaacagaccttgagttccatcatgatgcctcatccagcaagtgcaccttttggccacaagagaatgagactttcgggtcctcaagcttttgataaaaatgaaattaattcattacagtccagtgaagggcttctggaaaaaataattaaacaagcaaagcatatttttctaaggagtagagctgctgcaaccattgacagcttagcaagccgaattgaggatcctcagatacaggctcattggtcaaatatcaatgatgtttatgaatctagtgtgaaagttttaatcacatcacaaggctatgaacaaatatgcaagtccattcaactgcaattgaatattggagttgagcagattcgagttgtacatagagatggaagagtaattacactgtcttatcaggagcaggagctacaggattttcttctgtctcagatgtcacagcaccaggtacatgcagttcagcaactcgccaaggttatgggctggcaagtactgagcttcagtaatcatgtgggacttggacctatagagagcattggtaatgcatctgccatcacggtggcctccccaagtggtgactatgctatttcagttcgtaatggacctgaaagtggcagcaagattatggttcagtttcctcgtaaccaatgtaaagaccttccaaaaagtgatgttttacaagataacaaatggagtcatcttcgtgggccattcaaagaagttcagtggaataaaatggaaggtcgaaattttgtttataaaatggagctgcttatgtctgcacttagcccttgtctactatgattttttccagatgtttcctaaagaagtttccagaaactttgacttgaaatgtttgcagatcaactataagcacaaagaagagataacttccaaaagagtgctgtttttaaaaataataattaggaaatgtttatttagcactttcaaacttttcactttataaatgacaagtgctttgaaatgcagaagtttatgtacagttgtatatacagtatgacaagatgtaaaataatatgtttttcatgcagtttaaaatattactaacttaagggtttctatgtgctttttaaaatattccttctttgatgttgacatcaaataaagtatgtggtttaaaaaaatctccaaatacctttttttccccccaaatactttctaaactttttttttttgagatggtatctcactctgtagcccagtctggagtgcagtggtgtgatcatggttcactgcagtcttgacctcccaggcttaggtgatccttctgtctcagccttccgagtagctgggaccacaggcatgcacaaccacgcctggctaatttttgtattttttataaagacagggtttttccatgttgcccaggctggtttcgaactcggctcaagtgatctacctgcctctgcctcccaaagtgctaggattacaggcgtgagccaccatgcccagcctactctaaattattgataacctcttcctccagttgtctcctttaagctttcctgggtctaacctacataggtgatttaagaacatcctcagaaaggacagctgaaggcaataggaggcagattatctctttagggcgtcctcaagtttttttggtctgttctcccacttgattgacctcaccagttgagacacctagtgtatggctcatgcccagccttccacctgggattctccagcctccacccagcagccctggattgctttctccaattaaggcctttccatcagctctctgctttttcaaagcgaaaaaactaatggattagtgggttatcttttccaaggaacaggtttgcacttcttggaaaaagtgcctaaagtgtgcccattaatatgaggatagatttaggctcataagccttttggtaacactgaaagtagtatcatataggcaagctctccttataagtaaggctttcaatttttaaaacagacatcctgctttaacaatttgtaagatgactgtgcagtaataaaagtcctttgtatttc

SEQ ID NO: 12174 - protein, 651 aa, Homo sapiens
MSGVRAVRISIESACEKQVHEVGLDGTETYLPPLSMSQNLARLAQRIDFSQGSGSEEEEAAGTEGDAQDWPGAGSSADQDDEEGVVKFQPSLWPWDSVRNNLRSALTEMCVLYDVLSIVRDKKFMTLDPVSQDALPPKQNPQTLQLISKKKSLAGAAQILLKGAERLTKSVTENQENKLQRDFNSELLRLRQHWKLRKVGDKILGDLSYRSAGSLFPHHGTFEVIKNTDLDLDKKIPEDYCPLDVQIPSDLEGSAYIKVSIQKQAPDIGDLGTVNLFKRPLPKSKPGSPHWQTKLEAAQNVLLCKEIFAQLSREAVQIKSQVPHIVVKNQIISQPFPSLQLSISLCHSSNDKKSQKFATEKQCPEDHLYVLEHNLHLLIREFHKQTLSSIMMPHPASAPFGHKRMRLSGPQAFDKNEINSLQSSEGLLEKIIKQAKHIFLRSRAAATIDSLASRIEDPQIQAHWSNINDVYESSVKVLITSQGYEQICKSIQLQLNIGVEQIRVVHRDGRVITLSYQEQELQDFLLSQMSQHQVHAVQQLAKVMGWQVLSFSNHVGLGPIESIGNASAITVASPSGDYAISVRNGPESGSKIMVQFPRNQCKDLPKSDVLQDNKWSHLRGPFKEVQWNKMEGRNFVYKMELLMSALSPCLL

SEQ ID NO: 12175 - DNA, 2937 bp, Homo sapiens
  CDS (273)..(1742)
agaaaataccggagttgcagggtataggtaaatttctcaaggttataggttggggttcttagaactttttgtggtgtgtgttggcctagagcgactcagaagcgttagtgacttcacctaaaaaagctaacctctctgctgagcgcgaccggtatgcggcgcaggatgagcctcagggcttctgttaagagtctgtctgagaaagccggtctgcgctgttcctcggtggcgaccttaattatgagatgagctaatgctttactgacttaaccatggcgcagcgggcagtgtggctcataagccacgaaccgggaactccactttgtggcaccgtgagattctccagacggtatccaactgttgaaaaacgagccagagtcttcaatggagcaagttatgtgcctgttcctgaagatggtccctttcttaaagcactgctctttgaacttagattattggatgatgataaagacttcgttgagagtcgtgatagctgttcacgcatcaataaaacatccatttatggactcctgataggaggtgaagaactctggccagttgttgcttttctgaagaatgacatgatatatgcttgtgttccactagttgaacaaactctgtcccctcgtccgccactaattagtgtcagtggagtttcacaaggctttgaatttctttttgggatacaggattttctttattcaggtcaaaaaaatgactctgagctgaatacaaaattgagccagttgcctgacttgcttctgcaggcttgtccatttggtactttattagatgccaacttacagaattcattagataataccaattttgcatctgtgactcagccacagaaacagccagcttggaaaactgggacgtacaaaggaaaaccacaagtttctatttctatcactgaaaaggtaaaatccatgcaatatgataaacagggtatagcagatacatggcaagttgttggaacagtgacttgcaagtgtgatttggaaggaatcatgccaaatgttaccatcagcttgagtctccccaccaatggatctccacttcaggatattctagttcacccttgtgtaacttctcttgactctgcaattctgacttctagtagtattgatgcaatggatgactctgcatttagtgggccttacaaatttccattcactccacctttagagtcattcaacttatgcttctacacttcccaggtccctgtcccaccaattttgggtttttatcaaatgaaggaggaagaagtacaactaagaataaccattaatttaaaacttcatgaaagtgtgaaaaataattttgaattctgtgaagcccatatacctttttacaatagaggtccaattacacatttggaatacaaaactagttttggccagcttgaagtatttcgagagaaaagcttattgatctggattattggccagaagttcccaaaatcaatggaaattagtctttctggaactgtaacttttggagccaagagccatgagaagcagccatttgacccaatttgtactggagaaacagcatatttaaagcttcattttaggatcttagattacacacttactggatgttatgcagatcagcattcagttcaagtttttgcatcaggaaaaccaaaaataagtgcacaccggaaactaatttcttctgattattacatctggaattctaaagcccctgctccagtaacatatggatcattattattgtaatagtctcatgtttaaatgggattatataatgataacagtttaaagaaaatcataatcttatatttttaatgtggatgcatataacctgtgagtgaaaaatcactgaatgatttaattgtaaaagtagtcttatgtggtgtttgtagtctgatagagcttgaaaggacattttaaaagctaatgtctccaattttgttaaccttcgattttatgccagtataattcagaacatagaaaagtaatgattcacttgggctcattttagactggtcctgggtcaccctgccacacttgtttcctagtgtttctgtggcagacattgctaatcaattacagcccttttctgtactgagccttggataaagggtcaggctcctttttagttcagagattcaggcagccactcccagtgggttgtagataatgtgcaagataaaaactattttctcttccaaatctaagtactaagctcctagtataaggtgttgttacagaataccagagaccatgttagagacaactacatctcttcaaaaaacagccaacagagacaaaggaaaagtgtttaaatagtaagctgttcttcttaatcagaactatcctattgactaataaataatctgcataattctacttaaggtgtgtaatctctgttctagagttagtttttaagtaagcttgttaatctgccactttgacattttgcttaggatgtcagtagccatattaagatgtgtagaataccttcagaagatgatcatagtgttttgtaatcatttaatgtctgcagccaaatttttaaaggtaatttagacctaatactgctcttgctgtgtcttattaagttaaaattaatgaatgaattctggtaaaaattcaaaaggcactctgtgagtagagagtatcatttaagcttattttagtcacatgtagtatatatctccttaaagctgtcactctcactttcttaccattctcttgatttcttcagaaaccatctagtcatcatctttatactctacctgcttctgcaattatatatcatattacgttttcagagcagttcattgtcaagttggactttaagtgaccattcaagaaaagatgaaatctcacgaacctcaaaacttcattcatgtctttttacaaatgagaaaaaaaaatgcattaaagattaatactcaatttgatt

SEQ ID NO: 12176 - protein, 490 aa, Homo sapiens
MAQRAVWLISHEPGTPLCGTVRFSRRYPTVEKRARVFNGASYVPVPEDGPFLKALLFELRLLDDDKDFVESRDSCSRINKTSIYGLLIGGEELWPVVAFLKNDMIYACVPLVEQTLSPRPPLISVSGVSQGFEFLFGIQDFLYSGQKNDSELNTKLSQLPDLLLQACPFGTLLDANLQNSLDNTNFASVTQPQKQPAWKTGTYKGKPQVSISITEKVKSMQYDKQGIADTWQVVGTVTCKCDLEGIMPNVTISLSLPTNGSPLQDILVHPCVTSLDSAILTSSSIDAMDDSAFSGPYKFPFTPPLESFNLCFYTSQVPVPPILGFYQMKEEEVQLRITINLKLHESVKNNFEFCEAHIPFYNRGPITHLEYKTSFGQLEVFREKSLLIWIIGQKFPKSMEISLSGTVTFGAKSHEKQPFDPICTGETAYLKLHFRILDYTLTGCYADQHSVQVFASGKPKISAHRKLISSDYYIWNSKAPAPVTYGSLLL
